United States Patent Application Publication US 2022/0290142 A1 - sequence listing, part 4

SEQ ID NO: 1237 - DNA, 63624 bp, Homo sapiens
gagtctgggtgggagcgcgccaaatttctcccctgaagcagaggtggtagccaacggctccatgtctctgaggagcggcgggcggcggcgcgcggacccaggcgcggatggcgaggccagcaggtgaggggcgccctcctgaggctctcgggccggccctccggagggtgccatggggccgtcctcggctggcgccgccgaggcgggagggaggcccggttcccgcagccgcccgcactcgccgcgcctgactggggtagggcggcgcgccccgaccgccgacggaggggctcggggcgggcggaggcgctacgggcgcggcttctttgcggggaaacgaggcgggccgcgcggcctttccctgctcggctctttctgaggtttttcgggcctcgccttccgcgcagctgcgtttgggacctgccgcgcggcgggggcgatgagagcggcgggacccgggccaggccctgcggggtggacgcgcggctggggagggtgcggggaggggcggggccggggaccctgcctgggggcctagcgctgggggaggccgaggcgggcggatcgctggagcccaggatcctgttctagatcagcctgggctacagagagagacctcgtctcctctgttttatttttttgggcagggagtcccgctctgtcgcccaggctggagtgcagtggcgcgatctcggctcactgcaacctctgcttcccgggttcaagcgatcccgctgcctcagcctcccgagtagctggaattacaggcgcccgccaccaggcccggctagtttttgtatttttagtagagaccgggtttcaccatgttggccaggctggtctcgaactcctgacctcaggtgatccgcccgcctcggccttccaaagtgctgggattacagacgtgagactccgcgcccggcccttctcttgtaaaaacaagaaaaattagacaggctggtggtgcgcgcccgaggtcccagctattaatactcccgaatccgagccggaggttcacctgagcccggcaggtcaaggctgctgtgagccgggatcgcgccaccgcactccagcctgggcgacggagccagacccagtctcaaaaaaaatagagcaaggataagacgcggctgcttggtggccagagcaaacggtaaacatgaccggaggactggcctgccataagcagaaaacggatgaggcccggcgcggtggctcacacctgtaatcccagcactttgggaggccgaggcaggaggatcacctgaggtcaggagttcgagaccagcctgaccaacatggagaaatcccgtctccactaaaaaaatacaaaattagcggggcgtggtggcgcatgcctgtaatcccagctacgcaggaggctgaggcaggagaatcacttgaacgcggcaggcggaggttgcggtgaaccgagatcgcgccattgcactccaggctgggcaacaaagaatgaaactctgtctcaaaaaaaaaaaaatagaaaaaacgtgtgagaacgtgaagctttttacagacacttagctgaacaaaattcttcccagaggagaaaccaagtggtaaggatccctaactgctgttgtgctcatcgctgtctgtccatatcaggcaagccctagagaggcaggtacccttagggtctacatggtgtgttggaacttggagcttagagacggttactgactgccctgcttcaggacacaggactgcactcacgtgctccactccactgccctgccccaagctcagtgatggcctccaggcagggggaaggctgctgctgggataagtacaagtgatggcttttaccttacatgctttatgtgggttacctcatctcatccttaaaacagtcctgggaggtgagtgtgccccaggaggcagtgggtgctgtttgcctgcgtttcttcttgtgtgaaatggggacaccagtggcctccctcgtaggggttgtcatgaaaactgaatgagagcatatgtggagtactgggacggtgtgatacagtaaccagtcaatggtagctctctgtgaatgagagcctgtgtggagtactgggacagtgtgatacagtaaccagtcaatggtagctctctgtgaatgagagcctgtgtgtagtactgggacggtgtgatacagtaaccagtcaatggtagctctgtgaatgaaagcctgtgtggagtactgggacggtgtgatatagtaaccagtcaatggtagctctctgtgaatgagagcctgtgtggagtactgggacggtgtgatatagtaaccagtcaatggtagctctgtgaatgagagcctgtggagtactgggattgtgtgatacagtaaccagtcaatggtagctctctgtgaatgagagcctgtgtggagtactgggacggtgtgatacagtaaccagtcaatggtagctctctgtgaatgagagcctgtgtggagtactgggacggtgtgatatagtaaccagtcaatggtagctctctgtgaatgagagcctgtgtggagtactgggacggtgtgatatagtaaccagtcaatggtagctctgtgaatgagagcctgtgtggagtactgggacggtgtgatacagtaaccagtcaatggtagctctctgtgaatgagagcctgtgtggagtactgggacggtgtgatacagtaaccagtcaatggtagctctctgtgaatgagagcctgtgtggagtactgggacggtgtgatacagtaaccagtcaatggtagctctctgtgaatgagagcctgtgtggagtactgggacggtgtgatacagtaaccagtcaatggtagctctctgtgaatgagagcctgtgtggagtactgggacggtgtgatatagtaaccagtcaatggtagctctgtgaatgagagcctgtgtggagtactgggacggtgtgatatagtaaccagtcaatggtagctctgtgaatgagagcctgtgtggagtactgggacggtgtgatacagtaaccagtcaatggtagctctctgtgaatgagagcctgtgtggagtactgggacggtgtgatatagtaaccagtcaatggtagctctgtgaatgagagcctgtgtggagtactgggacggtgtgatacagtaaccagtcaatggtagctctctgtgaatgagagcctgtgtggagtactgggacggtgtgatacagtaaccagtcaatggtagctctctgtgaatgagagcctgtgtggagtactgggacggtgtgatacagtaaccagtcagtggtagctctctgtgaatgagagcctgtgtggagtactgggacggtgtgatacagtaaccagtcaatggtagctctctgtgaatgagagcctgtgtggagtactgggacggtgtgatatagtaaccagtcaatggtagctctctgtgaatgagagcctgtgtggagtactgggacggtgtgatatagtaaccagtcgatggtagctccctgtgtgacacttatccccatttttcagatttcttactgtccctggattaaaagtgagatacacagctcagagaaagcagttttgggaggaaatatggtcccagtgagcagttttctagtctacttaatccaacttacttgaggcaaggatatttggaggactggcatagagggccgtgcgcccctgttaagaggtgatgcctcgtaaatagcacttcattcactcttgattttgataaagatctgggactcagaactgaggctgttctctagcaagatttggaatatagtttttctgtgtttttgattacgggtgcattcaactatttaaaagattaaacctttattatacagtatggtggtgtatcagtttcctattgctgcagtaacacatgatcacttagtgactatataaatttattctcttacggttttagaagtcagaagtcgtaatatgaaagtgtctggttggttatatttattgtgatggttcccgggggagaatctgtttccttgctgcttcttcatcttcagaaccaagggttgcatctcctctcccccctaccctctctctcccatccctttctccttcctgactctagctctcctgcctcactctacaaggattcttgtgattacactgcgcccacccagctaagcagaatctcaaggcccttaatttagtcagatctgcaaagacccttttgtcttgtaagataacattcacaggtttgggggattaggatgtgggtctttcatggggggtgtcatcctgcctgcctaccacaagtggttataatctttcatgagaagtaaggatcctagtcttggaatatggtcattctgctcttgagttgaaggtgatccaaggaataccttcagacaaaggaagggtcttcctttctttttttatcttgttctttttttattttattttttttttagacggagtctcgctctgtcgcccaggctggagtgcagtggcatgatcccagctcactgcaagctctgcctcctggattcacgccattctcctgcctcagcctcccgagtagctgggactacaggcgcccgccaccacgcccggctaatttttcgtatttttagtagagacggggtttcaccatgttagccaggatggtctcaaactcctggcctcaagtcatccaccctccttggcctcccaaagtgctgggattacagttgtgagccactgcgcctggccctcaacctttttttgaggtaattgtagattgattctcatgcatttgtcagaaatgatacagagattcccgtatcacttcaccataacatcttgtgtaagtagagtacaattgtcacaactaagaaattgacattgagacgacccatctaatttattttatcttattttattttatttatttttttgagacgaagtttcactcttgtcacccaggctggagtgcagtggcgcaatcttggctcactgcaacctccacctctagggttcaagtgattctcctgcctcagcctcctgagtagctgggattataggcccaccccaccacacccagctaatttatttatttatttatttatttttatttatttttttttttttgccggagtctcgctctgctgcccaggctggagtgtggtggcgcgttctcggctcactgcaagctccacctcctgggttcacgccattctcctgcctcagcctcctgagtagctgggactataggcacccaccaccacgcctggctaagtttttgtatttttagtaaagacggggtttcactgtattagcaggatggtctagatctcctcacctcgtgatccgcccgcctcggcctcccacggtgctgggatttaattttttgtatttttagtagagacagggtttcaccatgctggccaggctggtctcaaactcctgacctcaggtgatccacccgccttggcctcccaaagttttgggattacaggcgtgagccactgtgcctggcctgacaatccgtctgttttattcaaatcatgtcagtgttacatgcactctcatgagccaccgcgtctggctagttttatgcatttttagtgtcccaagaggcaacagtgtctagccatcatgactctttttgttagtattctggttataaagttgaacaggttttgaagggcctgccctaattgtgtttttccaatgagtccttttatcttaatgagcctttttccaagctcggggtttttcaggaatatatataccctgtcatatccgaaacacttaacactaggtgggatgagggttgcagaagtaggtggcagtcggatcacaaggtcaggagatcgagaccatcctggctaacacggtgaaaccccgtctctactaaaaatacaaaaaattagccaggcgtggtggctgtcgcctgtggtcccagctactcgggaggctgaggcaggagaatggcgtgaacccgggaggcggagcttgcagtgagccgagatcacaccactgcactccagcctaggcgacagagcaagactccgtctcaaaaaaaaagaaaaaaaagaaaaaaagaagcagcagcaggtggcattacaaattaagcacggggttcccttctttcactcagggatgatggcgccacttcctcagtttcggcactcaagcgcctggaacggagtcagtggacggataagatggatttgcggtttggttttgagcggctgaaggagcctggtgagaagacaggctggctcattaacatgcatcctgtaagcactaggtccttctcccacccaggaatatggctgcaacccttctggtcatagcgtggtccttatctaaagagtgggggacacatgagggaactttgagtgaatcaggtgggagatgtgaaggttcccagctctcctttcctctttaacgtcattgagggccacagagaggccactgtgagaagccggaggtgatgggcatctcttttagccatcagaataaagctttcaaggattatgagggagaaattgagagagatccccatttggaggccgttacagtgtggttcttgtgaataaggctggtagtgttaatgtaggggtggagtaaagacctagatgagagggtttgtttctaaagtgctgagtttcccgaaaggtaggaggaaagtttctctaactgtgtagaggatggtcttgtgtctgtgttgactgattctcttgtagaccgagattttagatgaagataagcgcttaggcagtgcagtggattactactttattcaagatgacggaagcagatttaaggtaagcccctgactgcgacaagctaaaacccacttttatgggtgttcatgtagctctgtgactgtcagggagggcatgggaggcttccagtgcacagcagcccatagcccagcagaactcgggcccctggaggccccatcagtcatcacgtaagatgtcctgagagaggtcagttcaggaagactctgaatggtgagaagtagcgtgtctttcagattcttgcccctgtgaaaagtgcgcattctgacttcctgtatgctaccaaggtcaaggctaccctggccctaggctgttcatgggatataggagcaagcaatgtgttttcacttttctctcgctttcttctttctcatcacccctggatgggttggtgactcttaacaggtggctttgccctataaaccgtatttctacattgcgaccagaaaggtgagtgtgtttcatagactcaggtcagacgacctgtgtgtcattctgtggtgggctttgcaactgggaaataggcaaggaaggaaatgtattttaccaatggaaagccttttcattctgatcctgattagggttgtgagcgagaagtttcatcttttctctccaagaagtttcagggcaaaattgcaaaagtggagactgtccccaaagaggatctggacttggtgagtatcacccagactttccaggggtaaatgaggccagagtctacattgttcctggcaggtgggatcggaagaggtagaaattcaggtcatctgttgggtgatggggcggtgtggtgaccgtctataaaattccttccaaagagctctagtggtgttagttggtgccacgtgcagagttggacaaggtgccttgaagtcgccaactctttgacttgtgtgtttacctttgagtgtttaccctctcacccataaagtcctatttctcttgaaccaatgagcgtgatctcttcgcattatagccaaatcacttggtgggtttgaagcgaaattacatcaggctgtccttccacactgtggaggatcttgtcaaagtgaggaaggagatctcccctgccgtgaagaagaacagggagcaggatcacgccagcgacgcgtacacagctctgctttccaggtaaactttggtcttgtgagcaaagcatcagcggttcagaacgacaagatggataggagacaggaacacgtagcaacaaagttaccttaatggctggctctgtttgatacggaaaacttgagcaattaggtagagatttctgtatgttctgtgttaaataaacagtggcttcccaggttatattttatgtgttagctctcttttccaatggaggggtgggtttatggctctaaaattgagtggttgtaatagtaaagtcaccttagaggggaaaagatccctcatcctactgccctaacacaatccatctatgaatttcattaagtgctgagatttacacagcacatctccagagaaccttgggtatcgtccacagaaatttaagcctagaacactaaacactgttcttcaagtatttgagcatcaacaataataggatgcaaagtaaccagttaggaagagaaaatcttgagtaatgaagtttagatgacttcggaagaacctaccttaccctctgacaaaagaggatcagtttgggatgctgaacatttctacagtccctacccggagtccgccttccctggcaatgccacaagttgctttttgaaatattggaaggtgtgatcagagactgagtcctcagagacttgagccatatctgagactcgtctgtctttttccccctgaatagcccgttcagtatttgagcttataggccaatagtggccgcaatggtgggccacttctttagacatggcagagacccatgcacaggctgtgtgaagcccaggcctgctcttcagcctgcatgaggcagcctcctgagtatcaggaccatggtgggatggtcatgcctggctctcctgactggcagcacttaatgttttctttcttttttcttctatttacttatttgttttgagacagggtcttgctctgttgcccaggctggagtgcagtggtgcaatcatagctcactgtggcctcgaactcctgggctcaagcgatcctttcacctcagcctcctgagtaactgggatcacaggtgtgtaccccatgcctggctaattattattattattattattacttttgtagagatgagtctccctatgttgcccaggcctgtcttgaactcctgggccgaagcgatcctcctgcctcccagagtgctgggattagaggcataagccaccatgcttggccctctttttttttttctagttggggtgtaactcacatcatataaaatgaatacatcttacactgaattttctcctgtctgtagagttatcatccaagctattctttatttttttgagatggagtctcgctctgttgcccaggctggagtgcagtggcgcaatctgggttcactgcaacctccgcctcctgggttcaagtgattctcctgcctcagcctcccaggtatctggggttacagacatgcgccaccacgcctggctaatttttgtatttttagtagagatgaggtttcgtcgtgttggccaggctcgtctcgaactcctgacctcgggtgatccgccttccttggcctcccaaagtgctgggattacaggcgtgagctgccacgcctggcccagtccaagccattcttaaaggaaggactgccttggtcgttgaaaccacatcaatttaccttttgtgtttcctcggtttgaactctggtctcacctcttcctactgagttggaactctggtctcacctcctccagaccctggcagctgagttagttgctctcttgttaattcctagtgttctgcagaggggcggtgtcattactgatgaagaggaaacctctaagaagatagctgaccagttggacaacattgtggacatgcgcgagtacgatgttccctaccacatccgcctctccattgacctgaagatccacgtggtgagtggggcagggttgggtcgctgctcacatgaatttcctaacagccaggagatgatcattatgggtgaatccacagaagaatagactttcctggatgtagaactctagttagcacactgtgtgttttgcaggctcattggtacaatgtcagataccgaggaaatgcttttccggtagaaatcacccgccgagatgaccttgttgaacgacctgtaagttttgcttgtgttaccttcatcctaaaatttccagttttctggagagaatattcttcagtgctggagagtgaatctgactcaaagatatgtttgctgcttttcccccaaatactttattaaaggaaatatggagttagaatttttcatcagtttctgacagtatcatttccttttttgttgtatatcactgtatgacatcagtgtttgagctaggcaggatttggacactcgagggaaagctgggacttccgtttgggtagttgatagtgaagggacatggtgaaaaatggatttgtaactagaaggccttggttcaaacatgactttgtggtgttgggaaagtctttgtattcagttttctcttttccgaaatgaagatatcatctctgtgccacagttacctttcagagttgtcataaccaccagaatgaggtgatgtcttttgaagagtttttctcctaaagttctgtgattttaggcttgtcctgtgatcagctgctctcttaggtatgtcagttttcataccatagggagtcgtgatactcttgatgtaggttggttagtcttagggtccttctcccagctctagagccttttgactcttttaacaaccagagggaggtagagcaggctgggggtgggtgttcagggaggcctaatggggagtttagagcttggctttatgcttattttgtccccacaggaccctgtggttttggcatttgacattgagacgaccaaactgcccctcaagtttcctgatgctgagacagaccagattatgatgatttcctacatgatcgatggccaggtgagcaggtggcttctgggaagtaagctcctgggatggggaccttgtctggtccccatactacagcagcatctgccccactgttagtatttgttgagtgaataatgagttagtccaggaatgggagcaaccaagccgttccgacctccagctgtaccctcccctttcgagtgggaatccacacacagagcgtctcttctcaggaagcttaaagcactttcacattgctgtggacttctttgtagtgagaatctctaggcagagtgtgtgggcagggtgggaacgccatttcttggctttgcagcctctgacttgtgctgattgctaatgaacttggctagggctacctcatcaccaacagggagattgtttcagaagatattgaagattttgagttcacccccaagccagaatatgaaggccccttttgtgtcttcaatgaacccgatgaggtaaggaggtatcacttgggaaactacccggtattgtgggaagaacggacatgtggatctttccaaggcctcaggcattccgtcagatcagaattgcagctccatgagctttgttctcagggtatgaccgtcttttctgccagagacgggcggaggggcggggcaggaataagggccaacatgaggctgctgcttctgaactttgggagaggaatttggaatagcttgaagaagagaaagagcagacctctgactgctgtgacttgggttcaggctcatctgatccaaaggtggtttgaacacgtccaggagaccaaacccaccatcatggtcacctacaacggggacttttttgactggtgagtctgtgtcttctctatgagtaactgggcagcatttgagagggagggcgttgcgtggtgcaggggcgcttcccatgtcgacttaggaggtggctcctgggttcactctgcacctcccgtgtctgggttcctccctgggtctgagggaggaatggagaaaggggcattagagcctgacctgcccacttgcttgtctgtcctctttccaacccaggccatttgtggaggcccgggcagcagtccacggtctgagcatgcagcaggagataggcttccagaaggacagccagggggagtacaaggcgccccagtgcatccacatggactgcctcaggtaggggccacagagcagcatggctcctcactgctgtccgtgagcgagatctgaaggcctcttgcagactgtgctgtcaccacatctcatgggaggagggtggcctccgagaggccgtttcaggtcacccaagagtatggcagctgcaaccctgccagggcccgggatgtgctgtctttgactgttgactgacaattcatcagtgaccaggcacattgagcatcagcctctggggtggggaagccgctggaaagacgcactcagctgacaggtcccagacctaggacctcatggagctgctctgcccaggcaaggttgggatgtggcagcccggctgcctcacaggacaagcctcacgggacaaccacagattccatatgagctagggtgggaggcagctcagagcttcggagagtcacggcgttcgggggctctgacatgactggttgggaagacaggtggatgtggaaatgccaacagaaggaggctggaagggaaggaagggaagggagggaggaaaggagggaagggaaggaagggaagggagggagggaaggaagggaagggagggagggaaggaagggaatggaggggcctccacggcctctgtattctgcacagtgccactggggtgcttgcagcctgaatgcgtttctgtttagctctgatgctcagcacttggcttggagagggaggccaggaggctggggccggtttagcgtgtgacggtgtgacagtcctgatccaaggcagggagtgagggttgtgaggattcaggatctgtcatgtggggcagggggaggcccagggatgctggttcttagggaggggttggcacctggggtttttgtgccatccgtggagacagggaatgggtagagaaggggcttgaggcaggaggtgaccctgctaccgatatgctagcctggaagccccacccatatgggggccctgaagaccaccatgaggcttggtttgggctcgcactgtagattgggactcactgggttgcgggtgggtcttggtgaaagctggggtagtggatgaactgaaggcaagaggtaaagtgagagaagaaggccacagggtggaggctgcggggggtggagaccggacatgacccctggacagctgctccagggaatgcgtctgtagggaggaggtagagacaggttccgggtagagtgtggggggccttcttttcttaatttttattttttatttattttttaaatttttattcttcttggcatctgatcacatcttgccttctattaaaggagggtgggcttgagtgtttccgtgctgaagggacagtgtgaggagagaagatcagtgtggttgatagaactaggccccaggggtgcagacctgaggtctggggagaggcccaaggaggtggggcgcccgtcggagaggccacaaactctgctgaggatgggaggaaggcgagggccggaaggaccagtcctggtgcttccttgtgttgtggataggtctgtgagattaactagatcctgatgaagggttttcacaaggtgtctacaccatgtggggccttggtgtgaggctcctgggtgcctgttaggaacttgcatctgtctgtgtggtgcccagttttgccagttctcaggggttcccgggctgcatgttagaatcatcctggcttctgttctcattctccttccaggtgggtgaagagggacagttaccttcctgtgggcagtcataatctcaaggcggccgccaaggccaagctaggctatgatcccgtggagctagacccggaggacatgtgccggatggccacggagcagccccaggcacgtaagccacatcccggctgcccctgctgccgtgtgcacgcatccagatggccacggagcagccccaggcatgtgagccacatcccggctccccctgctgccgtgtgcacgcatgtatgccagcccgctccacccagcaggctgtgtctccgggacacacgtgttttgtcctgtgccggtctccttactgtgtgtgcggcaggctggtcaggccaggctttgctttctgtgcttcacacttgaccctgggctcttgatttttgatggccctgctctctggcgttctctcctcagactctggccacgtattctgtgtcagatgctgtcgccacttactacctgtacatgaagtacgtccacccattcatctttgctctgtgcaccattattcccatggagcccgacgaggtgagcattatctgtcctgtcggcaccctggcctcctcagcccttgccccattccaaatgcactggagctgaatggaggtggatgtcccaggagtgctggcaccagaggcggcagtagaattctggtgtgtgacgtcagggatgtcctttgggaattctctggccctggtgtgaggaagaaaccacaggaggcagaatttgcagccatttaccacgaggttttctctcctttcacactgaagttcagcttaggttcctggactttgcctgcaagtcagggcctttggtgttgcttttggctggaagccttggtttctcttgcaggtgctgcggaagggctctggcactctgtgtgaggccttgctgatggtgcaggccttccacgccaacatcatcttccccaacaagcaagagcaggagttcaataagctgacggacgacggacacgtgctggactctgagacctacgtcgggggccacgtggaggccctcgagtctggggttttccgcagcgatatcccttgccggtttaggatggtgtgcttcttccctgggattcagattcttcccactcttgtgctgtggtaggacccagaagctgcaggggctgaaataaagccccttctccccatcctgtcccacggcccctcaccgggtgtggcttctctggcccagcaccccccgggggcttctttagggcagtgcactgcagattgtgcacatgagtccttccggagctttctcgggcacaacctgccacgtgcagccacagcgtcaaacctgaggcaggctagtgtgggtgtgtttcccctctgaccccgtcgtctcactgttgtgctagaatcctgccgcctttgacttcctgctgcagcgggttgagaagaccttgcgccacgcccttgaggaagaggagaaagtgcctgtggagcaagtcaccaactttgaagaggtaaccatcagggaggcaggaagagccagtctgtgtttggcgccttcttcacagaccacgtctttcagcagcacgtttattgtgcacctgctgcgtgtggtgctgtggacggatgacacagggtctctggtgggacagggcagtcatggttgtgacgtgtgatgctgtcacaaggtcggagggcttcatgagaggtggggtgtgagctgctcctgaaatgcagtaacatggaaggtgggtcctggtgggatgtatcccgtgtcctgttttaaagcattaggactttattttataggcactggggagccattggaggttttaaattttatttactttttgttgttgagacttaaaaatgacagtaaattcctacaaatgacaggattagtgactgtaaaatctgtttacataatggttagaaagcacacttacaaagtgtgttatgtgactggagagggagacaccagttcttctctgatccctgttcctcaggacatggcacatctcaggtcttttttttttttttttttttttttccctttttgagatggagtctcgctgttgttggcctgggctggagtgcaatggcatgagtttggctcactgcaacctctgcctcccgggttcaagcaattctcctgcctcaggctccccagtagctgggattacaggcatccgccaccacacctggctagtttttgtatttttagtagagacagggtttcaccatgttgtccagtctgatcttgaactcctgaccttgtgatccgcctgccttggcctcccaaagtgctgggattacaggtgtgaggcaccgcgcctggcctatctcaggtctttatgtcaggcactgtgcagcactacatcatgttcagtgaggttgctggtttagagtttttaacagttttcacattgatgccaagaaactttttttttttttttttttttttttgagacggagtcttgctctgtcacccacactggagtgcaatggcatgatctcggcttactgcaacctttgcctcctgggttcaagcgattctcctgtctcagcctcctgagtagctgggattacaggtgcccaccaccatgcctggccaatttttgtatttttagtagagatgaggtttcaccacgttggccaggctgctttcgaactcctgactgtaagtgatctgcccacctcagcctcccaaagtgctgggattacaggtgtgagccactgtgcctgccctcaagaaacatcttgtaatagattcactagtcaaaatttaaacaagaatatgtgtacactcttggcaagctgtgaagcactgtttggctattgtcagccacatccattattatacttcagggaactcttatgaaccgatcaggaagagagccttgtctgaataacaaataggagttaaagaatgtcggccatggccgggcacggtggctcacgcctgtaattccagcactttgggaggccgaggtggatcacgaggtcaggagattgagaccatcctggctaacacggtgaaaccccgtctctactaaaaaaatataaaaaaattagccgggcgtggtggcgggcacctgtagtcccagctactcgggaggctgaggcaggagaatagcaagaacccgggaggcggagcttgcagtgagccgagatcgctccactacactccagcctgggcagcctggaatcccagcattttgggaggctgaggcgggtggatcacctgaggtcaggagtttgagaccagcctggccaacatggagaaaccccgtctctactaaaaatacaaaaaaaaattacccaggcgtggtggcgagacgtctcagaatctgagacagagtttcactcttgttgcccaggctggagtgcaatggcatgatctcggctcaccacaacctctgcctcctgggttcaagagattctcctgcctcagcctcctgagtagctgggataacaggcgcttgccaccacgcctgggtaattttttttttgtatttttagtagagacagggtttctccatgttggccaggctggtctcgaactcccgacctcagctgatctgcccgcttggcctcccaaagtgctgggattacaggcgtgagccaccgcgcccgacctagaagcagatatttaaagtctttaagaaacagtgagatgggcaggtagagtgaggctggaggtgtggtagatgtgaggatgccaggctccctggtgagtgaggaagagagctctgtagatgtgaggacgccaggctccctggtgagtgaggaagggagctctgtagatgacattgtcctgttagcgattcctaagtcctcgcaagtgcccttgaaagggaagcccaggatcgcctttgtgtccctgaagggtcacctgttgggcggagggtggctggggggatgtcagcaggggctcacagccacgtggggcatgtccaggtggtgtccccaccatggaaacttggccattcacttgtcccagcccatcctccccttcttgactggacagcctttcagaacacgccgttactgggcagagaagggtgcagtggaggctcttccccggctgattcgtttatctgtaattcaagtagaaacaataggtgttactgttgtggtatttcctgttctatggaatagatgttattccttgtaatcacttttttcttaaaattttaggtgtgttttctatttttactactttggagggttttaaggatttttctttttctttttttttttctgaaacaggatctggctctgttgcccaggctggagtgcagtggtgcaatctgggctcactacagccttgacctcacgggctcaagcgattcttccaccccagcgttccgagtagctgggactacaggtgccaccgccacacacggctaattttttattttttatagagacgggggtcccactgtgttgctcaggctggtctcgaactcctgggctcaagtgatcctctggcctcggtctccgaaagtgctaggattacaagcatgaaccactgcacctggcctaaggattttttttaatactaaggagagtttagtgttcaagtaattttctaatgactccaccaaatttaatgtatttcatagaaatgatggcaacccttcttaacttttttcttctggctagtttttgctctatttatatatttttcagctttttcctctcctgaatgtctaaaaggggttggtgaactgcacacgaggcaagcttggtcaccagcctctactgagtttcgctttctctgcaggtgtgtgatgagattaagagcaagcttgcctccctgaaggacgttcccagccgcatcgagtgtccactcatctaccacctggacgtgggggccatgtaccccaacatcatcctgaccaaccgcctgcaggtgagactttacttcccgtgtcagagtcggagctctctctgcccagccctaagtgctttctcacccctcccagccctctgccatggtggacgaagccacctgtgctgcctgtgacttcaataagcctggagcaaactgccagcggaagatggcctggcagtggaggggcgagttcagtgagtgtcggccgcctgggtgggcactcggtgggaaacgggtgggtgagtgtcggccgcctttctccacttggtgggaagccggtgtgtctgtgcctccttttgaacttgcccccattgcctccttcccagtgccagccagtcgcagcgaataccatcggatccagcaccagctggagtcagagaagttcccccccttgttcccagaggggccagctcgggcctttcatgaactgtcccgcgaggaacaggcgaaatacgagaagagaaggctggcgggtgagtgcctgggcatggtcacggctgtaaagatgtggctcctgctcccactttctgttcttactgggctgcgttggtccatcccagctggggccccagaggtgttgtcacagcagaccagaagctgctctaggtcactgtaagctgtgctctcactgcagggtcctttatttgcttccccatctgcaagtgttagacactgctgctctgtggtcttggggtatttggcctgttcctacccctgggctgtcctatttctttctttttttttttgaaatgaggtctcactctgtcacccaggctggaatgcagtggtgtgatcttggctcactgcagcctcaacctcccaggcaccggcaatcctcccatctcagcctcctaagtagctgggactacaggtgtgcgccaccatgcctagctaattttttgtattttttgtagagatggggtcttgccatgttgcctaggctggtctcaaactcctgggctcaagtgatccgcctgcctcggcctcccaaagtgctgggattacaggtgtgagccaccgtgcccgcccacctttttcggtatgagaaactagcagtgtatctgagctgttgctcctttgtggtgacgtagaagccatgttcttcagcacccctgtgccctggctccctctgctctgggagatctcacccacctgctctgcccatctccgtcgtgcttagattactgccggaaagcctacaagaagatccacatcaccaaggtggaagagcgtctcaccaccatctgccagcgggaaaactccttctacgtggacaccgtgcgtgccttccgggacaggcgttacgagttcaaagggctccacaaggtgagctctgaggggctgcaagctttggcctctgtgagggcagtttcagtcggctcatgaagtgggcactcttggctccttgcctgggatcctctgagcaggcacttgcactcggatggtaacgtgcaattgtttttgacttggaagagttgatggccacgaaggatgcagaccatcatccaccctggtctgaggcctcagaaggaccctaaaggatgatttctaaagtgattatttagagcaggggtcagcaagctacagctggctggccgtttgagtacatcaagttttacgaacccaactgccttcgcctattgtttatctctttcccgctgtcatgggaggtgaggagttcctagaaactctaaggccttctcatctatggtattcaccatccggcccctcgtgtttaactgacgtatttcatccggtaggaacatggaaaatgcatagcaacacctctgttttgataccaacgggtcattattttatatctgatcagattgagccattttttttctgagagaccttcactgtagactcagcacggcccctgctgtgcggccccctggcatcctgcactgccctgctgaactcatcgtcacatgttcttttttataatggtaaggcggacataatatgacatttagtgtttttaagtgctcagttcaggggcatgaagcatattcgcactgttgtgcaactatcaccaccatctacctccagaattcttcgccttctgaaacggaaactcttatctccatcaaacagtagctccccacctcctccctggcccctagtgaccccattccactttctctctctgaattccacgactctagggatgtcatgtaagtgaaccgtgcagtatttgtatctttgtgaccggctttttcacttagcatgatgctttcttttttggagacggggtctcactctgtcaccaaggttggagcacagtggtgtgaccttggctcactgcagcctccacctcccaggctcaagtgatcctcccgcctcagcctccccagttcctgggaccacaggcgtaccatcacgcctgatcgttgtatgtttggtagagacggggtttcaccatgttgcccaggctggtctcaaagtcctgaactcaggtcatctatccaccccagcctcccacagggctgggattacaggcgtgagccaccgcgcccagtcttagtatgatgttttcaaggtttatcaacatacagcgtgtatctgtactgtatttttgtaaatggctgaataatatttcattgtgtggatttgtcacattttgtctatccttcatacaccgacgtgcacttgggttgcttccaccttttggctgtcgcgagcaatcctggtttcaacatgggctgcaagtgcgtcttcaggtctctgcttttggtgattttggatatgtacccagcagtagagttgttgggtcatatgctaattctacatttaccttttaaggagctgccttactatctcactttattttaattaagcaactgctaaattacttgttcatctgtctccctcatcaaataagcaccaaaagtgtagtgactgtctcgtgcttcagagtacaatggagttcctggcacatactaggcactcagtaattatcttaaggaatttgcttttgttccttaaatacccagcctttaaaaaccttttctcatgttgggtggggaatttgatgagacatctgtggtcttagctgcatttcttgattgattttaccaggcacccccgagtagctcttgttccctagaaactgtgctgaagcgtttaggatgtcagaccgtgaaatctacaatgttcaaatgattctgtcaacacagagagacagaataaaggaagtgtgacaaaatattgacagttggccagtctaggagaagaatgtacactcttcattgtactggttttttaggttttctatagatttgaaaattttcaaaatactaaaaacctgggctattgactttgtagaatgtgaaatggaagaatctgtgaggtgctccatgttcatgtgcttctcaggtgtggaaaaagaagctctcggcggccgtggaggtgggcgacgcggctgaggtgaagcgctgcaagaacatggaggtgctgtatgactcgctgcagctggcccacaagtgcatcctgaactccttctatggctatgtcatgcgcaaggggtaggtgggcccgggcccgggagaggcttatgggaggaatggatgagtccacgtttagggcagcttcaggtgtaggctgctgtgcatggagggccgttcatctgattcaaggaatgttggagggagaaggctttgggctggggtggggctgggaggttgaagagagtgggggccacgctgactttgagggtctgggtgtccatgagtgatgcgtgctgtggggtgtatgtgtctctgcatcatgggctggagacacgacttgccattttccagcgcgttcatgtctcccagcgtggatcctcactcagggacttgcagagtgtcgggcagttgcttcacagcatgtctgcgtgtccgggaggggcagagaagcaactgacaaggggcatggggctggtgccgggaggggagggtgggacagctgacagcagggctgggacccaggctggaggagggttgggcctggcagctaggcctgggctttctctgagaagctggaggtgagaatggggcttgggaggaggtgtgaagagagtagagaaggcgtgaatgggtctgggtggtattaagagtcctgctgaggctggagtcctgaacggctggacgcagtggcacatactgcacccttccagatccttcctgggcaccaaggtggggacagagaggtgtcctcgggcagagccagattccaccttagttctgtcctggtgcacgcacatttggctgcttcccttgtccctgtcgcatctctcctttcctcctccctactcctcactgcctctgataccccctggaggagccatgccagccccacccaccagtttgtggtgtcctctcagggctcgctggtactccatggagatggctggcatcgtctgcttcacaggggccaacatcatcacccaggcacgggagctgatcgagcagattgggtgagtgcagaaggggagccgtggggctgggagcaggtcctgggggcaagcatgggcaggaaggaaggagggaaggctggaggccacacactgggcaggaaggaaggagggaaggctggaggccacacactgggcaggaaggaaggagggaaggctggaggccacacactgggtgaaaaggaaaggggaactcacgaccttgctcctctctttctctgaaggaggcccttagagctggacacagatggtatatggtgcgtcctgcccaacagcttcccagaaaattttgtcttcaagacgaccaatgtgaagaagcccaaagtgaccatctcctacccaggcgccatgttgaacatcatggtcaaggtgagtctggggcctctggtcctgaagctctggctggcctggcgtcagtgccctgatgtcactggctctgcagcacctcacagtgtgcatgccttcctggcacccagcactgctcacattgcttttctatagcctgaagaccatggtcagaggtatcaagtgattccactcctttctctttcagcatagctcccagaattttttgcttttaactttttattttgaaataattttaaacttacaggaaattacaaaaatagtacagagaatttctgtatccccttcaacctgccttcccctaatgctgacctcgcataaaccatggtgcgcttgtcaaaactaagaaacctatgtctgtgccccagtaactgcactgcaggcctcacctggatttcccatttcccaccatagcccctcttctctcccaggatcccagcaaggacccacgtggcgccgagttgtcctgtcccggtctgtcctcgtgtcacgacctccccctctggtggtgccggccaggcgatggttggctgtcccttgatcaggggttgtctgttgtttctcgtgactagactgaggtgatttgggtttttggaggagctccacaggtgcgacaccctccccacgttctcacacgcatcgtgttggtttgtggtggtgtgggagtgtgggtgtgttgtggggacggcttagtctcctgcctgaggggcttctgcaggccttactgtggcgctcctgtgccccctcccatacggctcttcagtcgtaaatacacacccagtggggaggatataagcgtccctggaggagggctgtcagagtttctggacctgtattagagccatcacagcagcaaatagatatcgtggagcaggtgcttcgagacagtgtatccacagctgctccataagcttctgcccactgtgttagcgttgctgatgggctgtgtttgctggtgggccgcacctgcagcagttacgcctgaggtttcctgtcgtggtttttctctggcgattgtctgtttccttcattccttctactgtatcaattgggatcctgtagggaagcgttgctatccttctcttccatttgttctcgtttatttgtctgcttattgacatcagtgtggatttgcggatcagagtggacatcccagggttattgttcataggaccggagtggcttcctgctccacgtgttccccttgggccactggggcctcctagtttgtggcgtgttcttgggacacgccctcttctggtctttgtttctggagcactttcctacttcttggtactgtaaggtccaccagcctcatcttgtattttccctgctccaacctggagtcagccagttctccgagaagaatgatgtaaaaacccgagatggggtgcttgctgtgctcactgttcctgggagtgtcatagcttccagtctctcatagtggaggcagccaggaagtatgtctctagtaacgcacgcacacagaactgtttatttctgtgtctgtctgtctgcatggatgcatttaaacacatgagtctgcccctttcttattagtgacttctttctccttcagtgataaacctgtttcgaatttctcaatatatgtgtttgttcaatcctagagtccatgtaaagtagttttagaattgctaacagacttgtgtcccatgagaaataatttcaccagccactgtacagcatttgtagatagttacttttgttttcagccttaccctgtccagtcagcagagttcacgggcagctccttcctccccaccctgttggcatgttctgctgtatgtccacagtgctgttgggctcatttggcccagtctgcacccctcttgggatcccagcaccatggctggatggcttgtaatttgcacacagtgacgttcactctgtagcgtacagccctgtgggtttggacaagtgcatagtgtgtgtgtccagcaccacgaagcaacacaaaacagctgcaacccctttgtcagcaaatcctctccctaccccgaaaccctggcaacccacaatgtgttttttgtactataattttgctttgtcgaaaatgtcatgtaaagggaagcatacggcctgtagcattttgggtctggcttcttggacctaacagatacacctgagtttcaccacttggttgcatgcatcagaacttccttccttcctgctgccaagtcgtgttagttatgtggaaaagcctcggtttgtcaatccatccactcctggagggacaccaggtggtttccaggtttgggccatcatgagtgaagctgccccctcttcactcttgtttctcaggaaggcttcaccaatgaccagtaccaggagctggctgagccgtcctcactcacctacgtcacccgctcagagaacagcatcttttttgaggttgatgggccctaccttgccatgattcttccagcctccaaggaagaaggcaagaaattgaagaagaggtgggactctcatagcttttgtgctttagaaaggacatggattgagatagattaaatttagcccagaaaggaggttggatcaggagccaggatagaaacagacctgggttcttgtgatcttactgattccgtttgcaccagctctgtctgcccgcctgctgtattctggctctgtggctgcaggcccttcagccattttccttttagagaagcagtggcctaagggagagagacgtttgctgcctcgtggatgacaggtggagggttggaaagggaagaggcgggcagagaggatgaggcacagctggtggctccccagcgctccttgccactgctgtgcttgccttttttttttttttcaggtatgctgtgttcaatgaagacggttctctggctgagctcaagggctttgaggtcaaacgccgcggggaactgcagctgattaagatcttccaatcctcggtgtttgaggccttcctcaagggcagcacgctggaagaggtgtatggctctgtagccaaggtggctgactactggctggacgtgctgtacagcaaggtaaaggcctaccctccaccctcacctgctctgagggatgaaggatgaagcaagaaggggaccccgtgcttcctgggctcctggagaccaaggtgaccgaagaacacagggccagtcctaatgaaatcccaagacctcctgagcacaattacccccttggagttcccctcaacttctgcatccagggacacaactctgagggaaacgtttttctaaatagcgtgataagcctggcatggtgatgcgtgcctgtggtcccagctacttgggaggatcacttgagaccaggaagtagaggccacagtgagccgtgactgcaccactgcactccagcctgggatatttgtttatttctatgttactttgtattttttatatttttcaggctacataacattttgacagtttacataccttaatttacgtaactagcccacgattatttactaccagataggtttcacatttccattgttatcaatggtgttgcattgaacgagatatctcggtgcatatgtttcccaggcacaggcgtcttgggtagaaggaatactggaacactctgcagtgctttcctggcttgctttgctgtgtgggcttctgtttcttggcatattgtcttgtatagagtgaaacacacgagcaagggagcaccagggtatcacacagaatattcatgagcccagcactccttacaggatgtggggggcctgtggtcaggaacatgtgtgcaaagcacagctccagctggatgtgggtgccacactggaactgctcaggcctccactgctcaggccactctccagccggccggagtttctctttcctctcttctggctcttcctgccccttctttctcttcctttcaaggagaaaaacttcctgtcttaggccgagcaacatccttttctgcagccttggtgctcttcagtaaattcttcttgatattttgtgcacagtttaataaaataaaagccaagccaggcgtggtggctcacgcctgtaatcccagcacttgggaggcctcggcgggcagaccacttgaggtcaggagttggaaaccagcctggccaacatggcaaaaccctttctctactaaaaatacaaaaattagctggatgtgatggcatgtgcctgtaatctcagctacttgggaggctgaggcacgagaatctcttgaacccaggaggggaggttttagtgagttgagattgcaccactgcactccagcctgggtgacagaatgagactctgtctcaaaaaaaatataaaagctaaagttttgtgtgtgtgtgtatgttttaaagtattgccacacaggcatattagagagctcttgaaattgcagccttctgcgtctcaggctagagaagggcatggcctagaggagcacagtccagggtgagctcagactctgccccttgatttctgcagtgttttacccattgtctttctctaggcagccaacatgcctgactctgagctattcgagctcatctctgagaaccgttccatgtctcggaagctggaagattacggggagcagaagtctacgtccatcagcacagcaaagcgcctggccgagttcctgggagaccagatggtcaaggatgcagggctgagttgccgctacatcatctcccgcaagcccgagggctcccctgtcacggagaggtgagggctccccccatcacggagaggtgagggctcctcccatcacggacaggtgagggctccctccgtcacggagaggtgagggctcccctcatcacagagaggtgagggctgccctgtcacggagaggtaaggggttccttacagatttgggctgtgtttaacaccaagtttggggatggcataagtgtccatcaaccagaaatggataattgccattttgtagggaatgagatacactataccagagttcaaagggttgaattgcagctacaggttacaacactgacagtttgaaaccactttggagaaaaaagcaaaaatcaggttgaaggaagacccttatgcctccgtgtatgtaaaacttaaaaacatggaaactgctctttttttttttttttttttttttttttggtggttatatacaaataggaccagtacaaatgcctgcatggggttgatgaacaccagaataagggttgtctttacttctgtgtgaggagggaataggttggggtcacacagggcttcactctaatcgtctcacaaaggaagtcagagtggccaagtgttgaagcttgatggagccgagtggatcatagtgtgcgtgtcttctttaggtctccttatgtttgcagtattcaccacagatgtttcctccagtgaaagggaagcactgacggttgccagttgctttgctagtgacatgaaaacaggctcgttttttctagaaagcagcctgagtcttctgtgtgttactcagcaaggaacatgtagacatggttatgaacgtgcacgtttgcctgtatgcatgcacgtggttactcagaaacgcagacatgtttacgcacacacgcatgtctttgcctatacgcatgcgcgtggttactcagaaacgtagacatgtttacgcacgcatgcgtttatgtatgtgcatgcacatggttatgccgtgagaaacatgtagacatagttacgaacatgcacgtgtttgcctgtacgcatgcacgtggttactcaatgagaaacgcagacatgtctacgcacacgcatgtgtttatgtatatgcatgcccatggttacgctgtgaggaacatgtagacatgtttacgtgcacacacgcacgtgtttacacatacgcacgtgttactccccgaggaacctgtaggcatgtttgtgcatacatatgcacgcagatgtatacattgatgtttgtgaacagctgttacacgtccttatttccatgttcatttgataagagttaggatcagattttgggtgattttcactgttactgagctgtgtgcctgtcttccttacccagggccatcccacttgccattttccaagcagagcccacggtgaggaagcactttctccggaaatggctcaagagctcttcccttcaagactttgatattcgagcagtgagtgccagttgcgttctctactcttaaaagtttacaaggaaagctagacagagcagaatatgtctgagttggattatgttttttgtctggcgtcttcactcttgacttcctcctttctgataagtaataggtgagcacctaataaccttttagggcaaaactgaaaacatgaagtgcctggggccctttagctgttctattggatggactaaggccaggggtgttggctcagccacctactagctctgtgatctagaggagtcagtgaagctccctgccttggtgtcctctgttgtgcaatgggcacctttcatcatagagtttctgagaggattaaataagacacagtggttagccctgtgctcagcatgaagtgagccccactcttggctgctgccacctgctgttctctgtgcccgtttcctgcacatgcagattctggattgggactactacattgagcggctgggaagcgccatccagaagatcatcaccatccctgcggccctgcagcaggtaagggcggggtcagtggcacgggctgtggggctaaaaactgtgcagttagacaagggtctctctctgatgggtgttggcctcacacaggtaaagaacccagtgccacgtgtcaaacaccccgactggctgcacaaaaaactgctggagaagaatgatgtctacaagcagaagaagatcagtgagctcttcaccctggagggcaggagacaggtgacggtggggccccaaggctgggctgggcgggatccttgtgacacacaggactccaggcttcttgcgctgctgtgtgtgctgtagtgaagcttctgttcaagcatcgaaaatggactttttctgaaaatgtgcccattggcactttactctctaactctgagtgtcactcttttgttaataggacaccattgtgaggctgaggtgagggcaaggaactgtctccttatgtgaaaatattagggtgcactacttagactcagtgccttgggcaaatcactgtctcttgaagccccagttttctgaatgtgaaatgaatatcttccctatggaaacacttagaaacacaggacacagtgtaataaaaggtacagtgaaagtcagaagagcaaaaggaaaattcttaaatgctgaaaattaaaagtaagctataaatcagagcagtatacaaactcacatgacaagaacaaggttctttgaccaggtgcggtggctcacacctgtaatcccagcactttgggaggcctaggtgggcagaccacaaggtcaggagatggagacaatcctggctaacacagtgaaaccccatctctactaaaaatacaaaaaattagccaggcgtagtggtgggcgcctgtagtcctagctactcgggaggctgaggcaggagaacagcgtgaacccgggaggcggagcttgcagtgagccgagatcacgccactgcactcccctgggcgacagagcgagactccgtctcaaaaaaaaaaaaagaaaaaggttctgagatggattggattttaaaatttaactgtcttatttgtaagagttatatatgtattctttcccctgccccccaagacggagtcttgctctattgcccaggcaggagtgcagtggcacaatgcagcttctgcctcctgggtttggctcactgcagcttctgcctcctgggtttaagcagttctcctgcctcagcctctagtgtagctgggattataggcacacaccaccatgcctagctaatttttatttttttaatttttttctgcctcagcctctagtgtagctgggattataggcacgcaccaccatgcctagctaatttttatttttttaattttttttttaaatttttagtagagacggggtttcaccatgttggccaggctggtctcaaactcctgacctcaggtgaatgcacccgccttggcctcgcaaagtgctggaaatacagcactgcgcccagtggcttatgggccagtataacaatttcaagagttatattgaaaagataggacgcaggaaaagcaaaaggagtaaaaaatacgtataccaggtaaatgttaaccaaaagaaagctgatgtggctgtattaataccagacaaaatactctttaggccaaaagtattaggaaacataaggactattgttacataatactgaaagtcacaattctctggaaatatatactaattgtaacaatgtagcctcacattaaataatgtaaacatttacctaattataagaagaatttacctccaatcagtttgggagatgttaacatccctccctcaattgatagttggagcagaccaaaaatcagcaaaaatatgtttggaatgacacaatcaactaactagatttagtcactagctataatacatttagtgaacaaatgtagtcttgcactaaaattagagaatacctatccttttcaagaatacataaaataatgaccatatatataccacagagtaagctgcaaccaattctagataacttaaatacagaccatgtttggaaatttaagaaaaaaaaaacacatttataacttgtggatcaaaaaagtcatagaacttagacaatacttggaactgaatgtaaatacaaatgctattaaaatttgtagtatgcagttaaacaggacttgtatacgcatttatatatctaaatgcatgtattagtaaagaaaaacaaatagaaaattaagtttccaactgaaaaagttagagaacaacagatccatcagaggaagtagacagaagttataaagagttataaaggtaaccaggcatggtggtgcacacctatagtcctagctactcggaaggctgagaggcaggaggattgcttgagcccaggaatttgaggttgtagtgggctatgatggcacctgtgaataggcacttcaccccagcctgggcaacacagggagaacccaactcaagaaagaaaagaaagaggttacaaaattgagccagaatgagtgaaacaaacaatacaaccaaaatgttgttctttgaaaagacttaggaaaatagtcacatctttttcttttcttttgagacagggtctcattgtgtcacccaggctggagtacagtggcgcagtcatggctcactgcagccttgacctcccaggctcaattgatccacctgcctcagcctcctgcatagctgggactataggcgcacaccaccacatccagctaatttttgtaattttttgtagagacaaggttttgtcatgttgtcctggctggtcacatctttttcaggacagagttttttattttaatgaaaacagacatcattatagatatagtaaagcctaaaaaaatggaaggattcccattttctgctaaacagttggaaaacatagatggaacggacagtatcctcaagttatgcactgacctaagaagtaataaaaacctgaatagaactttaaccattacagaaattgacacttaaaaagaaacaggccaggcgcagtggctcacacctgtaatcccagctctcagggaggcagaggcgggaggatagcttgagcccaggagttcgagacctgcctgggcaatatagcgagaccccgttctccacaaaaagaaaaaaaaaagagacgaaaaaaaataagtgtaaaagaaacatcaaacccaaatgatttttaagagaaaaaggaaaaaaaaaacccttagctcatttggtaaccttggcaatccttgttactttggtaacataattgaaaacaggaaaggaaagttacgggccatgaacaatagatgaaaaaatatcaacatacatgaacaataacaatatgaccaactaggacttatgctgggaatagcaagcactgtttaattttagaatttgccaggttagtttttcttgggagaaatccactaattcatcattaaaggagaaggctcgtaagatcatctccaatagatgcagaaacaacatgcggtaaaactttaacatctgctcatgttaaagtttgaacaatcaaaatcagaatagatgagatgtttcttaacctgataaagtgttcttgaaacctaacagcagacctcatacttaaccacaaaacactggaagcattgaagtaaggagtaagaaatggatgcctgttaaccactgcttctgttcaaaacagtttggagatcctagccagcataattaaaccagaaaaagaattaaggattgaaaagggagacatcaacttattatttacaggcgatgtaatttgttaacagaaaatgtaaggaaacctagattttgtgttaacttatatgtatttcagcaacaattagataccaaggtaagatataaaagtctattgctttcatttatactagaaacaaaatattttttgaaagataccatttacaatagcaataaataatgtactaaggaataaattcatggtaacaatgtgtgtaagacttttacagaaaaaattacacaacttttttctttttgagacatggtcttcctttgtcacccaggctagagtgcggtggcaagatcatggctccctacagcctagaactcttaatctcacgttatcctcccacctcagcctcctgagtagctgagactgcaagtgtgcaccaccacacctggctatgtattttttgtagaggctgggtctcactgttgcccaggctgatcttaaactcttgggctcaagtgatcctcctgcctgggccccccccaaagcactgggattacaggtgtgagccaccatgcctggcctatacacaactttattgaacatataaaaatttacctaagtaacaaaaagaggtaccatctttacagatgaaaggactcagtattaaaatatggcagtttgccccatattaattcataaaattcagtgtaattccaataaaaaagaatctgccaaaagctttttggatagaacttgacagacgaatcctaaaattcatataaagggtaaggataagaataaccaaagaattttgaagaataaggagggcacgttgatcttactatgtaacgagacacactatcatggcatcttgacaagatgagaggagagcagtagagccgattgggagcctagaaacagactcccctgttagtcggaagttggtaggtcacagatcgttaaggagagagtggactgcagtgagtgatgctggtgaaaatggtttttcatatttggagaagtaagttgttgtatcacactgagtgtgaaactaaggctgagtgtgatggctcatgcctgtaattgcagtgctttgggagtccaaggaaggaggatcagttgagcccagaagttccagacgagcctgggcaacatagggaggtctcgtctctacaaaaaaaatccggcacaacattaggcatggttgtgcatgcctgtagtcccagctacttgggaggctgaggtgggaggatcacttgagcctgggaggttgaggctgcggtgagccaagatgaccactgcactccagcctaggtgacagagcgagacccctgtgtctttaaaaaaaaaaaaaaaaaaaaaaaggaaactacaatctttggtaaacaactcaggagactatgatgctggggtgggaagggcttttttaaggcacatgtgaaaaacatcacaaagggaaagaatgatcaattaattaaaagttaaatcttgtgtagtctgtgacaagaaaggcagaatgttgataattgttgacactggtgataagaacatgggagctcattactgtgctttcgtgtatgtttgaaaactttcctgataggaagtcaacacacacaaacttacatgtagcacagaagtcaccatgaaacaaaggcctgagtcacattttgaagatgtttagaatgtataaaagttagaaatggctcataaacgtgttagctatctattgctgcatagcaagtaaccccaaaacttagcaacttaaatgcactcgtgtatccgagggctccactggagaaggagccacttccgagctccctcccatggggatggcaggactcggttcctccttggcctttgtctggacgttatccttagtcccctgctccatggggctcttcacaggacagctcacagcatggcactggacttttgagagagtgccagccaggcagaagccacagtgttttatagctgctctcaggagtggcattccatgacttttgctggaatctgttcattacgggcaagtcaccgggtcccacccccactcagggaaggagtcacacagggtgtgaacaccaggaagtgggggtcgttgggccattttgggagctgcctgcacagggccaagatgttcagccttactgttgatgaggtaaatgcagcatgatgtatttagatagcaggtcacactgaaggcaagtaagtgtggtggcatcaagtagcaagattgtgggaagtaggaaatccctggtgctagaggtggaggtggttgttctccgggaccaggcaacacatacagagatggtcattgagtcacagtttgtagttttgaaaaagtaggcgcttgtcattcttcatttgcaaagtcatgggtaggtaggctgatgtgtttatatgataaatcatttcacatcagttacaatgaacgaaccatatgtgcatgtttcacccggtgtcagtctcaaaaatacatggctgaataaagaaacaagttgcagggacaggcatgtggctcacgcctgtaatctcaacactttggaaggctgaggtgggtggatcacttgaggtcaggagttcgagaccagcctggccaacatggtgaaaccccatctttactaaaaatacaacaaaaaattagccgggcttggtggcaggtgcctgtaatcctagcttcttgggaggctgaggcagaattgcttgaacccaggaggcgaggttgcagtgagatgagatcgtgccattgcgctccagcctggacaacagagtgagattctgtctcaaaaaaaaaaaaaaaaaaaaaggaaacaagttgcagtcagatgtgtcccacatgttactatttaggttaaaacttacagctgtggcatgtgtctgtggacatgtggtaaaaatttaaaggtgtgtgggggcagacagaagagggctgtacccattatttgcaatattttctttcttacaaaaagcattctggagcaaacatggcaaaatgcaaagatttacttattggtggtattgagtgacgttttatttttcggtttgatcttttcactttttttttgaaagagggtctcaccctctcgcccaggctggaatgcagtggcgcaaccttggctcactgcaacccctacctcctaggctcaagtgatccttccacctcagcctcccaagtagctgggaccacaggcccacacaaccacacccagctaatttttctattttttgtagagacggagtttcaccatgttggccaggctagtctcaaactcctgggctcaagtgatccgcccacctcagcctctcaaagtgctgggatgacaggcgtgagccaccacacccggccttcactattaaaggttcaataaacttgtgtaaacgaacatcccatttcaggtgatatacttatactagatttcgagaagtagaatttgtggggatgagatcctgagatttttgtttgcttgtttttatgaggcaaggtctcacttgcccaggctggagttcagtggtgtgatcatagttcgccgcagcctccaactcctgggttcaagtgatcctcctgcctcagcctaccaagtagcttgggactacaggcgcactaccacgcctggctaatttgtaatatattttgtagagacagggtcttgctgttacccaggctggtctcaaactcctggccccaagcaattctcctgtcttggcctcccaaagtgctggcattccaggcatgagccaccctgcgcagcccgagatcctgagatttaaggcttcactgggtctttccaggtcacgatggccgaggcctcagaagacagtccgaggccaagtgctcctgacatggaggacttcggcctcgtaaagctgcctcacccagcagcccctgtcactgtgaagaggaagcgagttctttgggagagccaggaggagtcccaggacctcacgccgactgtgccctggcaggaaatcttggggcagcctcccgccctgggaaccagccaggtaaggcacacagctgtgatactgtctgtctctgaggggtctgcacagcccagggagcccgagatgcgtcctgacccctagggaggctgcttgtgagaaagtcatggcgggcattcccatctcaccacttgcacactggctgtgctcaccatccatcccaggaggaatggcttgtctggctccggttccacaagaagaagtggcagctgcaggcccggcagcgcctcgcccgcaggaagaggcagcgtctggagtcggcagagggtgtgctcaggcccggggccatccgggatggtcctgccacggggctggggagcttcttgcgaagaactgcccgcagcatcctggaccttccgtggcagattgtgcaggtatagaccttgatccaaggggagggcagtggctctgctgatggcccagggagggggtgtccagctgggccctgaggtctgggatgggagggttagagtgggcctggagtttcctgcccatcgtagggaggcctaaggccctgtgctgggagctgcaagctacctggaaggtggccccgtctgtgggttccagtgtgtcctgtgatgtgctgtatgtccgtgtggcctttcagatcagcgagaccagccaggccggcctgttcaggctgtgggcgctcgttggcagtgacttgcactgcatcaggctgagcatcccccgtgtgttctacgtgaaccagcgagtcgctaaagcggaggagggtgcttcgtatcgcaaggtagggaggagctggtgctgcctctgcagtcatctgggcagcctgaggtggctttcccatgatctagcctggcctccagcctccatctcctcagtaccttatggggatgttctaggaattcctcaaaacaacgtgtgtgagcgctgagcaccgagcctggggcagagcgagtgccgggaatggagctgctggtgtccttgtcacgatgagcttgtctgcccgcgaggtccatgttgcggggacaaaccaagtggcattggttagagattgtgaactctgtctccgtaggctctttggttgttaacagctttattgggatgtaaagttacgccatccaactcacccatttaaagtgcagaattcaatgacttttagtggcatgactattgccagtcaatagtgacattttctttttttttcttttttttaattttactttgatttctgggatccatgtgcagaaagtgcaggtttgttacataagtaagcacatgccatggtggtttgctgcacccatcaccccgtcacctgggcattaggccccacatgcattagctgtttatcctgatattccccctcccctcacccccccattcggatattttcatcactccaaaaagaaacctggcatcccttacctgtcaccatcctcccccagccctcagtagccactgatccacttcctgtctctgggtttgcctgtttgggcatttgatgtaaatggaaccctacagtaggtgggtctttgtgctgggcttcttccacctgcagaaactgcgagggttttcatgtggccatgagtgcgctgaggctcttagatggcatctccacccgaactccccgttgttaatgtgtcggctcagcacatttcttgactggatgctgtgaatcacgtaagaagtgacacgtagttggggagatgaggtgtgcatatttgtacctacacaaggaggttttctggagaaggtgaaactcgattccagccaggtgattcagtagaatgtgcatatagaaagtagacgcagagccaggtgtggtggttcacacctgtaatccccgcactttgggagaccgaggtgggcggataacaagaggaaagcggacgcagaggcatcgagaccacagagaacaggtgggactgtggggtttctacaccttcctttcgatgcgtggtgctgtggtgctgtggccgtgtggaagtgccctaacttttgggatgtttccctttatgactatcagctcatctcgagggaggttctggcgctgtgtgaatattctgtcctcaacgtttgactggatggtgtcagcatccatgtctcgtggggtccatggggctccaggatgatatcttcagattctgttcctctgtgtgtattagctgtttcctttataacgaagagctttgtgcagatcaggtagaaatgaactctattccttaaaaagcaagatacgagagggataatacgctttttttttttttaagcaagataaatgctttttccctttaaattatttttaattttcaaggtagggcatggcaaaatgggtttattcctttcatttttcctctctttttaaagtattactatggattagaggatttttgtttaacttttttgtttctgtttttgagaaggtctctcactccatcacccaggctggagtgcagtggcatgatcttgcctcactgcagccttgtactcttgggctcaagcaatcctcctgcctcagtgtttaatgttttaacatcaaccgtagccaaatcccgcccaacacacacacgttaggtatgttaaggtacacggtaggccctcactttatgttgttgataggtccttagaaactgcaattttaagtgaaatgactaagtaagatgatgtataatgaaacagattttttttcttctcagaaactataatgaaactgtgttggccaggcgcagtgctgcatatctgtaatcccagcaatttgggaggctgaggctggtggattgcttgagctcaggcattcgagaccagcctgggcaacgtggcaaaaccccttctctacagagtattttttaaatttatttatttttatttgtttgtttgtttgttttgagatggagtttctctcctgttgcccggctggagtccagtggcgcatctcggctcaccgcaacctccgcctcccgggttcaagaaattctcctgcctcagcctcccaagtagctgggattacaggcacgcaccaccacgcccggctaattttgtattttttagtagagatggggtttctctgtgttggttaggctggtctcgaactcctgacctcaggtaatccatccacctcggcctcccaaagtgctgggattacaggttgaaccatggcgcccggccccagaatttttttttttttttttttaaaggaagaaagaatgttgaacaaaatgatgttatttgaggacctgctatacattacttcacttaaccatcacagtttccaggaatccattgatgttaagtgaggacttactgtaatttacatatagttaagtgcagatttttaaatgtgcagttgattgggtttttggacacatgactatgcctgtgtcacccacacccccacccaggtgcagaacgtttccatcacccgggagggtgctcttgtccccctgtgcaaccttctgctggcctgatttctgtatttctgtaactgtgtgcatgtgactttctagaacttcatattaatggaaccagacagtagactctttggtggtcaatatcttcttgagactcaaattatcccaaattgggctggccagatcccttcaagctggcacctgagtccttttgacatgccctgttggtctttgaaaacttccttgctttttggccactaagagaggccaggctcaccttgaacttccagacgtggaattagctgttcctctaaagagcctgagcctcgttgagaggttatgttgagaaaccaagcttagagctcaaggggtatcatttcatctagattccttcagtgaacagccaggaaatatatacattttaaaaagtgcaattacactaattgttccagttcatatttaccagaacataatttttcatttctttgattttgtgtgtgtgtgtgtgggtgtgtgtgtgtgtcggtctaatttcatgttactggaaaaatctaaccctactggttctcttctcgcttgagaattattcagattttcctggttgttgttacgccaaataacgctttattgcaacctggacattttacatatttgagactttgggtatttttaaaaatcctttagcgtgtcaggtttttttgtttgtttgttttagcaacaaccaacacggttaattccagtgcccaagctcttccttgcctctttgtgcaaagcttccaatgtcagctcagcctccagagcctctgctgcgttgttttgggtcacctgtgcaagtgcagctcgtagtgagcctgggacttgtgctgctggttcatgcatgaagctagggtgctcctctccaggattcccccagccccccacacacgaagctagggtgccccctctccagctctcctctccaggattcccccagccctccacacagggagctagggtacccctctccagctcgcctctccagaattcccccagccctccacacagggagctagggtgccccctcttcagctctcccagaccccccaggaccccacacaggaagctagggtgcaccctctccagctctcccagaccccccaggaccccacacaggaagctagggtgccccctctccagctctcccagacccccccaggaccccacacagggagctagggtgcccctctccagctctcccagacccccccaggaccccacacaggaagctagggtgccccctctccagctttcccaggcccccccaggaccccattcacgaagctagggtgcccctctccagctctcccagacccccccaggaccccacacaggaagctagggtgcccctctccagctctcccagacccccccaggaccccacacagggagctagggtgccccctctccagctctcccagacccccccaggaccccacacagggagctagggtgcccctctccagctctcccagacccccccaggaccccacacagggagctagggtgccccctctccagctctcccagacccctccaggaccccattcacgaagctagggtgcccctctccagctctcccagagccccccaggaccccacacacacactctggctcccccaggggctctctttccgtttctctgactaggaaaatgtgatttctctcagtttttgccatctacaccctcaggttaaacccatgagagaatggaggaagatgaactgggaacctccccagatcagtgttgactgctgtattctgacagctcttgtctattctcagaggctgcaggttgcttttcaaaattgcgtccagaggccaggcatagtggctcacacctgcagttccagcgatttgggaggatcacttgagtccaggagtttgagaccagcctgggcctcatagtgagacctcctttctacaaaaaaaaaaaaaaaaaaaaaaagccatccgtggtggtgtgttccttgtcccagctactcaggaggctgaggctggaggaccacttgagcccaggagttggaggctgcagtgagctgtgatcacactgctgcactccagcctgggcaacagactaagaccctgtctgtaaaaaataaataaataacataaaaattacatccagagtttttagttgtaatcattgagagaggtggactgtggcgtggtgggtgtaccccgtcgctaggggcaccagaagtctaggactccgaatagcgtgtgctttgtgtgtgtaccacagacattaccacttacgcccagtgacgagatcatcgtcgtattctcgccaggtaaatcgggtccttcctcgctccaacatggtctacaatctctatgagtattcagtgccagaggacatgtaccaggaacacatcaacgagatcaacgctgagctgtcagcgccagacatcgagggcgtatatgagactcaggtgactccccagccaccctcgactgaactgggggaggctccagcagggtggtatggaggaaagaaacccgcccagggtgtgggctggggaacagcagcgacagtggactcgttcccacaggtgaggtgaatgtcagcagtgtgtctgccaaaagtggcctttgggcagtgggccgggcagctgcaggggcacagccacatcccgggcagaagtcacgtgggcagccagagcccccaccatccagcccttgccggcctgtctgcccgattcttccaggttccgttactgttccgggccctggtgcacctgggctgtgtgtgtgtggtcaataaacagctggtgaggcacctttcaggctgggaagcagagacctttgctcttgagcacctggagatgcgctctctggcccagttcagctacctggaaccaggtatggcctgcaccagccgcccatcatgtgcctgcctcccacacatctggggtgacggtcttgtttccttctccagggagtatccgccatatctacctgtaccaccacgcacaggcccacaaagcgctcttcgggatcttcatcccctcacagcgcagggcatccgtctttgtgctggacactgtgagtcctgggccctccatggcagcacattggctggggcagggtttggggaaggaggacatctcccagggtgcccaggccctccaggtcttgtcctcaagggcctttgcccatgagtgcttgtcgtgattgaattggcagtgccgtggcagtggtggagtctgccccagggctgcccccacttcctcctgcgcagggggaggctgacgtggcctgcgttggtctaggtgcgcagcaaccagatgcccagccttggcgccctgtactcagcagagcacggcctcctcctggagaaggtgggccctgagctcctgccaccccccaaacacaccttcgaagttcgggcagaaactgacctgaagaccatctgcagagccatccagcgattcctgctcgcctacaaggtgagagtggttggggtcttgctgtgtgagccccatcttctttgaggctgggtccacccaggtcttttcttccattttgccttgacccaggaggagcgccgggggcccacactcatcgctgttcagtccagctgggagctgaagaggctggccagtgaaattcctgtcttggaggaattcccactggtgcctatctgtgtggctgacaagatcaactatggggtcctggactggcagcgccatggagcccggcgcatgatccgtcactacctcaacctggacacctgcctgtcgcaggccttcgagatgagcaggtgagcacagtactgtcgttgtgggccagtggtccccaggcagagccggcctcggtggtctctgtgacccggcgatgtgccccggtgctgacctgtgccctggtgcaggtactttcacattcccattgggaacctaccagaggacatctccacattcggctccgacctcttctttgcccgccacctccagcgccacaaccacctgctctggctgtcccctacagcccgccctgacctgggtggaaaggaggctgatgacaactgtcttgtcatggagttcgatgaccaagccactgttgagatcaacagttcaggctgttactccacaggtaagtgggcgggaggacgaggcccatgagacctggctggtgtttctgccattctgtgacatcttctcaaggcaatagtgccgaggatgggctcagagttcgaccgcgcaggtcagagctgaggctgcaggagacggtcctggggtcaaggtccaggtggggcctcctgtgccctcgggaatctgaatagcctggcaggtgtgaggatgggtgtgggcaggtctgttgctggttctggaggtggtggtggctggagtcaggcccagggggctggtggtgctggagctggcaggatgctggctgagcatggcgtcttcctgtgcagtgtgtgtggagctggaccttcagaacctggccgtcaacaccattctccagtctcaccatgtcaacgacatggagggggccgacagcatggggatcagcttcgacgtgatccagcaggcctccctggaggacatgatcacgggtggtcaggctgccagtgccccggccagctacgatgagacagccctgtgctctaacaccttcaggtgccaccctctctgggaaggagtgttactaatagaagggtcttatcctttgcccttaatttggaaagctaaggtctaagacagggtccattgggcttcccttagtcttaatggcagagccagagaccactgtgtggcgagttttccatagtctattgtctttaccactgtgggggtccggcctggtccctggcgactgttcagtgtgctgcctctgacctccctgtggccagaggtacttcacacagagtctttctaaccagggccacttttcgatgtgaccaaaggtacatcacagggatctccagccagctctactgagtatgatgtgtgaggcatcagcacttaggtgtcaggagccgtcggtctgctgcagagggcgtggttgagggtcaggagccatcagtctgcggagagcatggttgagggcagctactcgcattacccaccagcggtggttcatgctgggcaatgcttgctgtgtaccaggaggtgggccgagcacttcgcattctgcctctgtccccacatcagcccagggacggggagcggttattgtctgtttttcagataaggaaactgaggtcagaggggctgcctttgtggtcataccacaaatgaatggaagggtaggtgctcaaaaacaagtctttgtaattccagagcctgtactcagctgtagttttaatgactccatacaaaaggggagagggagcatgccagagctgggaaatgaggcagggagaggactggtggaaagaggcagggaggcagttgggagccgggagcagggtcttggcagagagacagtagcccaggcctgaaaggtagaaggagtccaacagcagatacccaaactgccgctctggagaatgtggggtttgccaaattattgaagagtttgtgatgaaagggagttttaggaatgggacttggacctctgtaggttctcttgtaacattctgttcttgaccccattgaagttcccgcttcttcagtagggtgatgtgcagttttggaatcctttagctgaattggggttccagtaccagagcagctggcatctctgccccatgggaagtgaagggggccagacagggcgtgtacagtgcactggccaatgcctagctgtctggcctgtgaccagggccccccggaacgggaaacttgtttacactggcacacgcccttgtggcttttgtgtgacctgtgtctaggtaccacctgcctgaccattgcttcggtgtaggggcccagccttgtgttccccctagtgtcgtagggaagacccagcccagggcagcccctgcctcttcagagggaaggcacaaaatcagtcaccaccacaatagggaacaagtgcaaagatgtgttccttacagctcctgggcagggagggtgccgtgagtagggaggccatcctccatccctgggtcctgcaaggcaggactgaagagtcagacagggagggtgcccagggcagctaggcgtgtgagggaatggggtgtaggcatgtgttagttcacgggcgagcgcctgaatggtccatttaaaggaagtggcgggaaggcagggcccagcctgctaggcgggagagaggcctctaagttcttgtttctgaccagctggggccatgtgggtatggtgatgttttgttttgttttgttttgttttgttttgttttgttttgtttttgttttttgagacagtctcactctgtcacccaggctggaatgcagtggcaccatcttgggtcactgcaacctccacctcccgggttcaagcgattctcctgccttagcctcccgagtagcaggattacaggcatgcactagcccagctaatttttgtatttttaatagagacggggtttcaccatgttggccaggttggtctcaaactcttgacctcaggtgatccacctgcctcggcctcccaaagtggtgggattacaggcgtgagcctctgcatccggcctagtgtggtgttctgatgtctaggcagtggctttgctgtgtccttcctgtcagggtccccggcccgtcacacacttgctgctttgtactgtgctgccctcccgtcctgctttagaacacacagagtttgggatgcggtgaagcctgaacaagtttaaggaatgaaatgggaagaaacagatgaggcatgagggtgaagggatgaaatttggaccgtgacttaaggtggggacagtgagaaggggaggcgacagtgacggatttggacccagccgtgtagggaaaacctgtgcccatttcagttggagcgtcccgcgtggcagcagcgtgggaggctgagggtacgagggtgtcgtgcaccttctctttcaggatcctgaagagcatggtcgtgggctgggtgaaggagatcacccagtaccacaacatctatgcagacaaccaggtgatgcacttctaccgctggcttcggtcgccatcctctctgcttcatgaccctgccctgcaccgcacactccacaacatgatgaagaagctcttcctgcagtgagtgctcctcctccctgggctgtccaccgcgtcctcagctgggctggtcccttactccccagaaccagagacatggccagccagtgcctctgggataagtagtgtatttctgagtttgtggagcataacaatccaaaggatcccagagaaacacgcagctgctgctgcagcgtcgcctgcacatcctgcagagaacactaggtggcacctcctctcctgcccctttcctgcacaaagtcatgctacacattgtattgctgtgtgccttgttgttttagtgaaaatatgcctgtgtcaggagatctgtgtgaggacatgccatatgaaagaacatttagcctctctccagccttgtgccgttgttacaaatagcaaatcagtgagaggcttcatgcatgagctcatgcagatagatccgtggggtaattgctggggcgtagccctcttgcaggcctcagaggtgttgtaactcgggatgaatcctgatttgatggacttcaccagagcggccccacagaggccccttgtggacacttcttccctggccgcgcctcaccaacatggccggggattattacccaactgctgggataaaagtgcttcttggtgcagtcttaacttaggattcttacaatgaatgaagtcgaattttctcttctagtcctttgtctatttttctgtagttttggtggttcttctcttattaaatatcgaatgagttgtctccatacaaaaagttgccatttttctgtgataagaatttgctaattttttcctgtttttggttatcttttgcctttgtttgtggtggatttttgccatgcagaaatctttgctcttcattagcttctgggttctagtgtatctcggaggcttttctgcttcaggaccctcagctcttttccctcttggattttctgggtgccctctggctctccatgactgtggcgtctccaccacggactctcaacttgctccacaggctcatcgctgagttcaagcgcctggggtcatcagtcatctacgccaacttcaaccgcatcatcctctgtacaaagaagcgccgtgtggaagatgccatcgcttacgtggagtacatcaccagcaggtgcggctggctggtcctggtgacgcagcactgtggctttgagagggatgctaaaatgaccccctgaggtgccagctctcctcctgggtgggctgggaggtcgttagaagtgcaggactcaccatggtgaatctgagcagcgtgaaaagggggttaccgccacctgtgcgcggtagcagatcggaggccactcagctgtgcagcttgagttgggcaagttcaggaagtggcctgcctttgctaagaaggttccacagtgatttttgtttgtttgctttttttccccatggatattcagggcacagattcaaggtgccctgaatatatgcaccccgtaagtgttgacgttgtaagccttttcatagacgtcagtgttggcgagtggagtggtgtggttcccgggtgctcaggtgtgcacagctctcagctgtcagagcctggtgtggttttgacttcctgccttccaggccatgttcctgaggttccctcctaggccttgctgtgcttctcacacactcagcactatttaaatctaaatagaagacaaagcaacagaaaaatctccaccagcaacttttgttcaactgatagtaggaagctccctcctaggtgcgctcaccctggggatgaatgcagccctttctgagcacagaggggagttgcttgtggaggcacagagagtctgcatgggtctgatctttgcatggttacaggggtagcatctgggggcgctgcagaaaaggctgacactaaattgataataggccttatcactgagaagtaggaaggtagagcttataagactttcattcctaatcaaaccatatgcactggattaatttgaaacacaaaagcactgttgtcctcctgcagacccactgtggccccttatgtctatccaagatgagccttgatggtcagtggtcacgctgtgtgcctgggaaagctggcttgggctagaattgtatttcggagcatggctgagataatgggaaggatgtgcctctccccacgttggccatgggcagctccaggggtgccctgtacctgaggaggccggggttgctcatgtcgagaaacaggctgctattcttccttagcgcgaagagcagagttagggagaacataaagttctcctgcaggagctgcgatgtgggctactcagctgcattttgaaactgtgatttaggatgttcctccttccttcctctctttctttgtttattcttccattttttggggttttgtttgttttttaggagatggggtcttgctctgtcacccaggctggagtgcagtggtgcagtcatggctcactgcggcctcaaactctgggctcaagctatctgcccacctcagcccactgagtagatgggactagaggtgcatgccagcatgcccagccaatttttgtattttttgtagagacagggttttgccacgttgcctggggtggtcttgaactcctgaactcaggcgatcctcctgcctcagcctcccaaagtgctaggattacaggcgtgagccaccgtgcctggcctgttctttttttttttttttttttttttttttccttaaatggatctaatgtgcagaggattgggtcagcgctagggaggcttaaccgaggagtgacaaggatgacgatagcttaaaagagcttggcagtgggaagcactgtggttggttaccagcaggtgcaggtcacctaaggccgcagagcagaggcagaacaccctgtgggccatccccagcacgaggaggcacccagctctctttgtggcgccagctcccaggggcctggtgggcctccttagttttacgtttaccacatttccccaggaagcctgagggatgatgtggtctgaatgaactttcaaattcagtgttaagtaagtggagggtacagatagatacaaggggaaataaaggaaagttgagaacaaggtcgatttcactgaagcagcgtcttcaatgcttcctctgcagcatccattcaaaggagaccttccattctctgacaatttctttctctcgatgctgggaatttcttctctggatggatccatctaactatggcggaatcaaaggaaaagtttcatctcgtattcactgtggactggtaagcgagctgcagtgtggcacccgagccagctttgggggtcgcgttcattcctgcagcaagtgctgagtgctcagggccccggcgggcctggccgtgagcagcagacactgcacccgcatcctgccctcatgaacacggggagggaccatgcgcagacaagcacgtcagtgtggagtgtggcgtcagccctggtgatggcaaggcttgccgtgggcaacagggaggtggaggcccatgaggtggtgacagggaatccgagagctgatgaagtgcaccatagttgtgcgagcataaggcgcctccagcggatggacaccagggaggcaaagcacaagtcagtggagcagtggttgcagatgcaggcagagagctgacagagccaggcaacttgggcatggcagggcagggcctcggctttcgtggggatgggagcttctgtgtgggtgatgttggagctttcttggccccatgtggataacccaccattggagggcacaggcaggtaaagccggttagtgcctgtgtcagggagatgctgggcagcgaggttggtgagaagggcctgggtgggctttgaagtggagccaaggggccagcggatcggatgtgtgtaaatgcccaggtgcgggccaggctgtgggtgagtggaggtggctgtcgggagcagtctggggaaggggtcacgtctggctggggctcatggtgtttgcaaggttgagacgtgggtggtcagctggtgcaggagtggccagagagtggctgggtgggttgagaggaggcctgtgtcctccacaggggccctcatagtggactgagaggaagctgtgggtaccagagccaggggctcagatgtcagagggaaagccctttgtaaggacgcagacgcttctgggagctggcaggatgaagccaagactgcccaggacacctggatgggagcgattctggttggagttgggggataaaccctgattgaagggattcagaacaaagtgggagggtagaaactcaggcagtgtagaccgctctgaggaggggatcagcgtgtggtcagggcaggtggcagtgggtgtcggtgtctacacagacgtggatggtgccgtggcacgaacacaggctgcgcgggaggctgggtctgtgatggggtcgtgccgtcccaggagattcatggactcagaggagagaacagtcaccgggaagctctggctggttctttcgtccttggggggtgggagttcaacaattaaagtgaactctggaagagcagagtgaagctcacagtcccaggtcacgagcacttctgtgtgccaggcgcttcccacaaagcactttgtactgggagccaccctgggggattcacgcaggctccaggggatgccttgactgcgaggaaggcctctggtcaaacggggcagatggacccaggttggaggagccttcgctgtggcatcctacccctctaccaggccgcgatggtgcaaacacagccgcgttgtctcatgtgttacagcaagactcccagaaagcagggggagcagaggatgagcaggaaaatgaggacgatgaggaggaaagagatggggaggaggaggaagaggcggaggaatccaacgtggaggatttactggaaaacaactggaacattttgcagtttttgccacaggcagcctcctgccagaactacttcctcatgattgtttcaggtaagcccagagcccagggctgcgcagcccccactgaagggactcatggttagtagatgtggctcctgtgccatggtatcgcaagaagggagacagggaaaatcagatcgggcggagcctgcccagcagttgggactttgtgagccgaggggcctcctctccaggctccaggcatgttccactggagggcccggagaggggtgactgtcttccctccagcctttgctctcaggaaactccatggggagcggctgcccctggccgtgtcattgaggagtttcctagctctgctcccgccatctgattcggtaactcagtcacatacattcccagggaacatttgtgtgtgtgcacgttcagtagctgaagataaagccctgggtcaggtcagctgccccctggctggtctgtgaggcctaactttctggtgggggagttcctatgccttggtttgggtctgcaggcttagagtttgcaaatcaagctatgcaggttagtgtgcagatgaagtgtatcgaggaagcactgtttgtagttgacagccctaagttaaagaatgccctaagtaaaaacagcaggttgtgatgtgcacacacaggtggatgcggtcacagaggccttcgttgatgatcattttatatttttgtctacttgtccttgagtctttaactttctcagttctctcttgcaactttctatgtctcttttgaaaagttccgggttggccgggcgcagtggctcatgcctgtaatcccagcactttagggggctgaggcgggtggatcacgtgaggtcaagagtttgagaccagcctggccaacatggtgaaaccccatctctactaaaaatacaaaaagtagccaggtgtggtgcgcacacctttaataccagctactcaggaagctgaggcaggagaatcacttgaacccaggaggcggaggttgcagtgagctgagattgcgccattgcactacagtctgggcaacaagaatgaaactgtgtctcaaaaaaaaaaaaaaaaaagggtaagtgccaggtgacaggcccggagtagtttttggagaagcttgctgatgccaggggccctgcctttgcttgtgttgggagctgtctttcacgcgctacccagtgagaggcttagtgtacatggccccatttatacagttttctctctgacaatgaactcaggtgtcagcgagtgttccttctcatttccacttctcacttctctaatttacttttagctcatctaaaggctgcagataaaattattaacaatgacattttagcctcatctgtgaggcaatctgaccagccatgggtcccctcagattctagggtgtttgcagcagcccgactcagggcctgtggtgtgtgtgcctctccacagcgtacatcgtggccgtgtaccactgcatgaaggacgggctgaggcgcagtgctccagggagcacccccgtgaggaggaggggggccagccagctctcccaggaggccgagggggcggtcggagcccttcccggtgagcagtcttttgtcttttgaggccactgccatgtgccagtgacctaactcctctgtgtgccatgggtggtccccggtgccagtcccccaggtgggaggtccccagtgccagacaggtcccagacccctccctcagcatccttatacttccaggaatgatcaccttctctcaggattatgtcgcaaatgagctcactcagagcttcttcaccatcactcagaagattcagaagaaagtcacaggctctcggaactccactgagctctcagagatgtttcctgtcctccccggttcccacttgctgctcaataaccctgccctggagttcatcaaatacgtgtgcaaggtgagagtgccagcgtgcgtgtgaggagaggacactaacgtacatgtgtaaggcgagaatgttactgtgtgcaaggtgaggctgtaatgcgtgcaccatgaacgtgctagcgtatgtgtgcaagataaggacaccgacatacctgtgcatggtaaggatgttaatgaatgcaggatgaggctttcagctgtgcaagggggaggtacctacatgtgtagggtcagggtgccagcgtgtgcaaggtgaggagcaggtgtaagttacttgttcattccaccaacatttatcatgtccctgtcacatgcagccacagttgcggcatctgtgctcaggtgtgagcaagacaggaaaggtcctgccttgtggggcctgtctgctgccagccgacccgagaagggagagggccgttcagaggcgcaggtgctgtggggatggagcctgtgaggggcgctgggaccaggtgcaggaggagggaagacgcaaaggccctggggggtgagcttggtgtgttggtgaaggcacagccgaacacccagtgccaccggctgggaggatgggtcaccggagaccagtaggctggaccaggacccagagctgatgagatgagagcttgctcggatgctgaggcctttctgggaaaggcaggctgagtccaaggagggataatattaccagataacgaccgcgggtgtcagcccttacagagcagagtgcttcactgtccatttcctcactcagccttcccagcaaactgcatctcacacacggctaaggttacgctggagatcaggtgacagcctcaaggtctggttgtggtgaagaagtgtttttagctcaccattttaattcctttattgacttttacatattttaaattcatttttattaaggtgtaatttatatacagtaaaatgtactctgtggcgtgcagttctgtgatttttcctaggtgaatggaattgcatcatcatcagcaggatacaggatagtcaccgcccgaaaacattccccgcactgccctcctcacctgacaccctttagccactggtgtgtcttccgtccctgcattttttttctcttctagagcgtcacataagtagagacattgtgcagccttttggatgtggcttcttagcaaaacacacctggaattggttcatccacgcgctcgtgtgtatcagaactccctttctgttgcgagcagtgtccattgtgtgggcaaaccacagcttgcttttcattcactggtggaaggacatttgcgttgctttcactttggggtgattaataacaaagctgctgtaaacattctgtaggtgtaggtttttgtgtgaacataaatttcaattctctgaggtcattttttaagtgtttgtttaacttgataagaaactgccaaactcttttctgaagtggctgcaccgtgtcagggtctcctcagcagtgtgtggcaagagttgctgttccacatcctcaccaggacttggtatcattgggtttttaaattgcagctattccagtaggtgtgtagtggtatcgcattgtgtttctgatttgcatttccctggcgactaatgatgtggagcttttttttggagatggagattcactctcattgcccaggctggggtgcagtggcgcgatctcagctcactgcaacctctgcctcctggttagctgggattacaggtgcctgccaccacgcccccccaattttttgtatttttagtggagacggagtttcaccatgttggccaggctggtctcgaactcctgacctcaagtgatccacctgcttcggcctcccaaagtgctgggattacaggcgtgagccaccacgcctggctgtggggcattttttaatgggcttctttgctgtcctggtgtctgtcctctttggtgaagttttaggttttatccatttgagttaatttttatacaatgtgcatgctgtagatccaagtccatatttctgcatgggatatctgattgcaggcatatcctgtcttattgtgcttcgaagcggttacctgtatttttataaatggaaggtttgtgggaatcttgtcttgagcaagtctcatctttccaacagcatgtgctcactgtgtctgtgtcacatgttggtaactctcaggatatttcagacttttccactattattatatcagccgtgataacctttgatgcttctatggcaattgttttggggcgccatgaaccgtgcgcatagaagacaatgagcttcatcaatgttgtgtgtgtcctgattgctccactcacgggccattctgccatctcgccctttctccttgggcctccccagtcccggtgacacaacactatagaaattaggtaagttaatagccctgcaatggcctctacgtgttcaagtgaaaggaagagtcacacgtctctcactttacataaagagctagaaatggctaaacttaggaaggcatgttgaaagtcgagacaggctgaaagctaggcctctcacaccagttagccaagtcaactgcaaaggaaaggttcttgaaggaaattacaagtgctcctccagtgaacacatgaaagataaagaagtgaagcatcctgttgctgatatggagaaagttgagtctggatagatcaaaccagatataacatcccctcaagccagagcctaatccagagcaaggctctcactctgttcagttccatgaaggctgagagctgaggaggctgtagaaggaaagcttgaagctggcggaggttggttcatggggtttagggagagaagccgtcccagtaacataaaagggcaaatgaggcaacaggtgcgggtggagaggctgcagcgagttctccagaagatctgtctgggatcattggcgaaggtggctacactgacaacatattttccgtgtagacaaaacagccttcttttggaagaagatgccatctaggactttcatagctagagaggaggcctcagagcctggcttcagaggaaaggctgactcttgttagcggcagatgcagctggtgactttaagtcgaagccactgctcattcagtcttttaaggccactacctgcagctcagaaaaagattccttccaaaatagtactgctcattgacagtggacctggtcacccaagagctctgatggagacgtacaaggagatgaatgttgctttcatgcctgcggacacagcatcccttctgcagcccatggatcaaggagcaatttcgactttcaacgtttattatttaaaaatatatttcatgaggctatagctgccatagatagtgattcccctgatggaactgggcacagtaaattgaaaaccttctagaaaggattcaccattctggatgccattaagaacatttgtgactcatgggagaaggggtcaaaatatcaacattaacaggagtgtggaagaagttgattctgaccctcatggatgactttgagggattcaagactattgtgggaggcgtgactgcagatgtggtggaaacagcaagggaactagaattagaagtggagcctgaagatgtgaccaagttgctgcaatctcaggacaaaatttaacagataaagagtggcttttcatggatgagcagtaaagtagttttttgttttgttttgttttgttttgttttgttttgttttgttttgagatggagcctccttgctctgtcgcccaggctggaatacagtggtgcggtcttggctcgctgcaacctccgcctcctgggttcaagtgattttcctacatcagcctcccaagtagctgggattacaggtgcccgccacaatgctcagctaatttttgtatttttaatagagacagagtttcaccatattggtcaggctggtctcaaactcctgacctcaggtgatccacccgccttggcctcccaaagtgctgggattacaggcacaagccaccacgcccagcccaaaaaagtagttttttttttaagatggagtctcgcactctcgcccaggctggagtgcagtggcgcgatcttggctcactgcaagctccctcccaggttcacgccattctcctgcctcagcctcccgagtagctgggactacaggcaagcgccaccacacctggctaattttcgtatttttagtagagacagggtttcaccatgttagccaggatggtctcgatctcctgaccttgtgatctgcccacctcggcctcccaaagtgctgggattacaggcgtgagccaccgcacctggccaaaaagtagtttcttgagatgaaagtgaacattgtggaaatgacaaaggattgagaatattccataaacttagttgccaaagcagcagcagaatttgagaggaccgactccaattttgaaagaagttctactgtgggtgaaatgttatcaaacagcatcacatgctacagagtctttcatggaaggaagagtcagttgatgcagcaaacttcattgttgtcttgttttaagaaattgccacagccaccccaactctcagcaataccaccctgatcagtcagcagccgtttacattgaggcaagaccctccaccagcaaaacgattgcgactcactgaaggctcagatgatcgttaatatttctgagcaataaaacattttaaaattaaggtacatacattgttttttagacataatgctgttatgcacttaatagactacagtatagggtaaacctaagttttgtctgggtagagtgactcacacctgtaatcccagcactttgggaggtcagggtgggttgactgtttgagcccagcagttcaagaccagcctgggcaacatggcaaaacccatctttacaacgattacaaacattacctgggcatggtggcgcatgcctgtcgtcccagctactgggaaggctgaggtagaaggatcaattgagccccaagaggtcaatgctgcagtgagccatgattgtgccactgcagtccattctgggtgacagagtgaaatcctgtcccaaaataaaaaaaatcacatagctttttttttttttgagatggagtctcactctgtcactcaggctggagtgcagtggtgcaatcttggctaactgcaacctccacctcctgggttcaagcgattccctgcttcagcctcccaggtagctgggatcacaggtgcacccgccaccatgcccagccaatttttgtatttttaatagaaatggggtttcactgtgttggccaggatggtcttgaactcctgacctcaggccatccacctgccttggcctaccaaagtgctgggattacaggcgtgagccaccacaaatcacgtaacttttatatgtactgagaaaacaagcgtgagccaaaaatcatgtaacttttatatgcactgagaaaccaaataatttgtgtgatttgctttattgtgatgttagtccattgaggtggtttgaaaccgaacttgccatatctccaagatacgcttgtattcaagaaccatttgttgaaaagactattctttttctatcgaatcatctttgtacctttttccataacttagtaaccttatctatgtgagtctctttctggattatgtattctttttttcgatcttgcattcaatttgctaatatctcgttgcgcatttttgtgtctgtgctcaggctgttattggtctgtagtttcttagtacggtctttggttctagtatcaggggatgctggcctcatagaatgggttgagtgctctctctcttcagtgttttgaaagatactgtgtagaatcagcagcatttcttccttaaatgtttagtaaattccccagggaagcctgtcctcaccgatggaaaactgctaatgtagagaagtcagctgaggcgtctaaagggactaaggaagggaggaaaggacaccaggaaactgtagcctaaggtccagagggttctggtccagacagagcagcagggaggccccgggagctccttcccgatgtgggctgtggtctctgcaggtgctgtccctggacaccaacatcacaaaccaggtgaataagctgaaccgagacctgcttcgcctggtggatgtcggcgagttctccgaggaggcccagttccgagacccctgccgctcctacgtgcttcctgaggtcatctgccgcagctgtaacttctgccgcgacctggacctgtgtaaagactcttccttctcagaggtgcggctgagctccagcgggcccttcactgtggagcagaacatccgagggcactgcggtgtcttgagggcttctgcagctccagctctgtgggtcacacctgctgcccctctgactcacatggattggcaacaggccccttcccaggcctccccacaccatgttcggaatgttgtcctaggaagggctcaagtgcaggtgggaggccagagtgcgtgcagctgcactcaggagactcgcccgtcaccaggcgcttctcacagccccttcctctcctgagatcctgcccatggcactgtggtctggaggctgggctggtgacctctcgcactcttgctctgcctaggatggggcggtcctgcctcagtggctctgctccaactgtcaggcgccctacgactcctctgccatcgagatgacgctggtggaagttctacagaagaagctgatggccttcaccctgcaggacctggtgagtcgtgcatgccgcctgcccgtgtgccctggagtccacaggggggtttctgtgcactcccgggagccggggtgtgtgcaggtcctgaggcacgccctggtgtcttccaaggggcctgccctgcagaccagtccatgccctgagcctgatggactgttctgtccacactggttgagcacctgccttgggtcaagagctggccttgtgggtgcttcgttctagcggaaggaggcagacactcccaagtgtgaagagaaggaaaggaggaagagggagttgcacagctcggccacaggaaggtcttgccgaggggcatctgagcagaggctgggggacgcgccaagctgccgtgtggtggtgcacggcgttcaggcctgcaggatggagggagtgagcagggcctggaggaggcctcaggactgggcatctggggtggaacatccacagcgagggtgggtgtagggaaggcgctggcaccgtgggatgaggtcgtgcattttactcataaccgagggctggctgcacacagcaggggctcgaggcttactgatgggcccacgaatgtgtctcgcgagcctgtgaagaagcagcaggcaggtctggccagcgcgggagggctggcgcccatcggggctgctccctttcaggtctgcctgaagtgccgcggggtgaaggagaccagcatgcctgtgtactgcagctgcgcgggagacttcgccctcaccatccacacccaggtgggctctccctcatctgcctcggctcagcctggcctccttggcctcctctctgagtggactggggtctcactgtgcctgtttattcctgcaggtcttcatggaacagatcggaatattccggaacattgcccagcactacggcatgtcgtacctcctggagaccctggagtggctgctgcagaagaacccacagctgggccattagccagccccgggccccgggtgcctctgcgtccgtgccaggcctcctgatgccaaggccacatccccgtgcttccagtgaccagaccactgaccaccctgactgtccaaacctgtgaccccaggccagggaacggggaggaaaccaaagaaaaccattttcagggagctcagacgtcacaggagggagcgggagcaggatgtggccctggcctcgccagagcacctgaagaagcaggccgtgagcgaggctgcgagtgccctgggcgccgtttctcacgcagtgaatgcttttccaggcctctgttgcttcctgcaccacacctggtggggtgggagcgtcctctaggtgcccctagttctttgtcctgcctcccagagggaggaaaagcccctgggggcttctggctccctgagattgggctctgagacgagacgggttcccaaggccctggtggggctggagtctcacctgtttgcatggagaaatgggctggccccacagcctcacaggagcagtttgtgggctggtttccccaggaatccagaccctaacccgtgagaatctggattttggcttgtgagccctgcttatttggagccgggtctagagggaaccctctatcagcctcaggaaaacaagacctctgtgcacctcacttttggctcactgcagcccttgtccttcacctccacacaggaccagctggaagcagaaagaagaaaggccaatttcacagggcaccaaacaagtatgaaatgtaaatcagaaatgcagacaccccagacgagagcctcacaggagggagggggccccacaggctccccaggaggctcgtgtctttggcccagagccagccttagtttgtccctgccatctactgtctgaggccatcgctgctacactttgtttttatttgtatttcatactgaagtttctctaggttg

SEQ ID NO: 1238 - DNA, 30468 bp, Homo sapiens
tgctttctatgtaagtttctcactggaatagcgagtgagaaatgtgtttgaagactagggaaacgagaaaggtatgcgggctgctagagggtttcgggtgggttgtttgaaaaaggaagtgaaggaattcaaagtttcacatcatgagcctaatgtaaggcgtgtccgggccgtcccgaaggtatctggggaaataggtttgtgaggacaaagaccagggccaggcccagggcggagcctccgcggccccgacgcagggactcggcctaggcggaggacggggcggagcgcggccggcaccatcgagccgggaagatggcaccgcccacggagctgctggccaggccggagcgaggcagcgcgcccggctcccgcgccatggggcggctggtggctgtgggcttgctggggatcgcgctggcgctcctgggcgagaggcttctggcactcaggtaggtgggactcccgcgcgcccctcctcggcggtccccaggctcggggtggccgcgtggtgcggggagggcgcaggctgggggagggattcctgcgggacctggccctgcggccgggggtggagaatttttgaatgctgtccctcccccagctagttgaacccccatcaccccgactctccgcttctagtgaaaaaactagcaaagtttggagtgaatcgcgacactttcttgaaagtttataagcccttgctgctaacaaagttctcttctgcttaggctgacaagagaatgctttgcaattacccaagggccaaactagtggtttaaattgaaaacaaaatgactactcatgcattgaaaccttaactatgaagatttatttcaggtcattggtgctgtttctccttgttgcccaaaccagacccgtctttaataaagttgttctccacccatttctgcatagtttgagaaactcttcagctgtagatcaaagacacttgaaatattcagctactgttcttacttcctatttattcaccagggaagcctgaagccagaatgccagacagcgcagacactattccatctcgcattttagttttaatgaaaatctctggtaggtagacatcatcgtttataaattaccaactcaacgtttgttttttgtttattttattttttgtagagatggggtcttgctgtattgcccaggctgttccctaactcttgcactcaagcaatcctccagcctaggcctccccacagtgctgggattacaggtgtgagctgttctgccctgcctcaaccaaaattttataggcctcatgcaaaagagttccagaaagactgagcacctgctatgtgtaatgttctctcttaggcttctatagtagagtacgacccttatggagtttgatacaggggaagagagaattaaaatacagtaaatgtataaattaggatgttctaaggacagacacaaatgaaccgcataggcttaaagaggaaagattccatcccctgagggtggagttctagagggaggaagagacattcgacctgaccttgaagggtgggtgcaacacatatgagcatgaaggggcccatgccaaatgtatagtgcagcaggagcaaaggggctaaggtgggaagttggaagactagcaaatgggccaatttgaagggagcataaagtcaggagatgagaatagtagggtggtgggaaggataggttttgaggccattaaatataagttgaaaaatggggccccactttcataggcccaatagtgcttcaaaagggaaatattggtgggttttgcttttcaacaagaacttaatataactagttgtgttttatagagataagcctggaaggggggattggaggagagcaatggttctctgtacattagaatctcctggagggctggtgtctgagtggcaccaccaaagattctgattcagctgttctggatcagaatctacagctcacacctgtaatcccagcactgttggaggcctaagccagaagattgcttgagcccaggagttagtgacaggcctgggcaacatagcaagatcccacctctacaaaatgaataaataaataaataaataaataaaaaacaaaatttgagttggtaatttataaactatggtgtctacctaccagagatttttcgttataattaaaatgtgatatggaataatgtattgtttggcaagctggcttcagggttcccaggtaaatagataaataaggaagtgcataatgtaagaacagtggctgacagtagcagtggcattttttatttttaaaaacattcctgataattctaatgagcagtcaaggtcgagaactactagaatagagagcagacatggggtaactggttaaggtattgcagtaggtcagagaggataacagggacccaaactctggaaccccagggatgagggagaagtcaaaggtgctaccagagtttgtgccacagctccactgtcccatggttgtagtttcatctactgataaagcagtgcaaagaggaagcgtgtggtggctgagatgggagtgagatttgaggaaagaacgcttatgggtaggaaatggacatgttgaccttaattttcatgttaggtaatgcccattgtgctctacagaacattcatgagttggatgactttgtatatgatctgtcctgctctccatttcaaaggcaagaccaccaaaattcacaagcttattatgttgtcactaatgtgtaagccaccagtttttctgcaagttggaagttttctcaacagtcaaatattcccccttctcactaatcttaaggttttaaagttatagctgcaaatctaaaaaaaaaagaaaaagtaaataaaacttattgacagaatgcctgatagtttatttacaggtttttgtttgtttgttttttgtttttctttgttttttattttgacacaaggtcttgctctgccgcccaagccagagtacagtggtacatcaaagctcactgcaatctcaaacacctaggcacaagcagtcctccctcctcagcctcctgagtagctgggactacagatgcatgctaccatgcccagctagtatttttatttcttgcagagacagggtctcactttgttgcccaggctaatctcaaactcccagcctcaagtgatgctcctgcctcagcctcccaaagtggtaggattatacacatgagccaccaccctcggcctactttacaatttgatgcaccttttctttacgtgactgtgatgcactttaatgggcagtgactttataaaatggtaactttattggatatgtggagccccaaatgggctgacgtgagaatgttggggtaggtggtgggtggctggatttagcaaagaaaaatgtaggctacccagttaactttgaatttcacatggatttttttttttttttttagtataagcatgaaatacttataccatacttttagcattaagcgtggaatttgggacataattatactaaaatatcattcattgtttatctcaaattaaaatatcactgggtaccctgtattttatcatatgttcgagtgccttctgtcagaatttggtgaccctttgagtctgttttaaaaaggagcatgtttggccggacacagtggctcacgtctgtaatcccagcactttgggaggctgaggcgggcagatcactagaggtcaggggttcaagaccagcctggccaacatggtgaaaccccgtctctaataaaaatacaaaaattagccaggtgtggtggtgcatccctgtaatcccagctacttgggaggctgagtcaggagaattgcttgaaccccagaggtagaggttgcagtgagccaagattgagccactggactccagcctggacaacagagaaagactccctcaaaaaaaaaagaaaaaaagcatgttcccacctccccataaggaaaggctcttcagaggaagttgaaggaacagaggctttatgtttgatttttgctttaatctgatgcctactgtttgattattcaatatttagagatggtactttggcaatcaagttatttctctccccaggttgcccacttcaatttttagtataaggatgtcccagagggataaatgccatcaaagttgtctttcttcttctgaactgtaactgggattccacaccctccttttccacccctccctagttgagcaataaaggggaaaataacagtatacaaatattcccaggccagttcctggtgtcaaggtacacagccatggatgaatcatgaggcttgagtgcatcagagacctaagcgtgggcaggaacccccagagtacccatgtgaatgttctgcttgctgcctcgcaccttttatgacaattcccacaagaagctatgtggtctgtttctacttctgaaagagcagcctttttcccttttttttttttttaaaccaccatcctttaaatcatttattatgtaactcttgtgtgctggtcagtcagtgtgtcaaaagtgtaaaaacttctttatttatttttttaatctatcttttaaaaaatattttctttctttttttcttttttcttcaaggcaggttcttgctctgtcacccaggctggagtgcagcagcacaatcatagctcattgtaacccagaacacctgggctcaagcaatcctcccacctcagcctcctaagcagtgaggactataggcatgcaccactacacctggctaattaaaaaaacatggccgggcacggtggctcattactataatcccagcactttgggaggctgaggcgggtggatacctgaggtcgggagttcaagaccagcctgaccaacatggtgaaaccccatctctactaaaaatacaaaattagccaggcacggtggcacatgcctgtaatcccagctactcaggaggctgaggcaggagaatcacttgaacccgggaggcggaggttgcagtgagccattgcactccagcctggcaacagagcgagactctgtctcaaaaaaaaaaaaacaaaaaaatttttttgtagagatgggggtcttgctgtgttgcccaggctgatctcaaacttctagccataagtgatcctaccgcatcaacttcccaaagcactgggattatgggtatgagctactgagccctgccaaatttctttatattaaaccaaaacgtacatttactgatatttggaaagaaagctcttttacttttatgccttcatccagtcttcatagatatcttcccttttacattataactgtaaatactgaggttagagaggttaactagttagttcaacagaataatataaatattgaataatataattaatgaataattagtgctgaacctgtcgcctcagccaggtctcctgattccaaatacagtttgccccagctccccacagtcttctagcttctctgccagtggagcaaattttccctaggtttacaggcctaagcacagattcttagttacttagtgcaagtattgccagagcccaaggggtgaattccaaagggtttttacaaggctatacataaaagataaagccctggcttgtatatcacttgcacataggagataaagccccagcagttgtatgtaaatttcaaaagcagagaagtatggcacaaagaaactcctgatagtaacactgtgttcccactttgcttaggggcatattggcaccgtagcatggtacacccttactgctacctgccatgaggccagataatagctagcagcccctggtctcattctactctggatgggtactgctgtttcctgaatgaaagacactgagattgatttcatgctaatgactgttggttaagagttcatgctttctattcacaatagcaaagacttggaaccaacccaaatgtccgtcaatgatagactggattaagaaaacgtggcacatatacaccatggaatactatgcagccataaaaaaggatgagttcatgtcctttgtagggacatggatgaagctggaaaccgtcattcttagcaaactattggaaggacagaaaaccaaacaccacatgttctcacttataggtgggaattgaacaatgagaacacttggatacaggaaggggaacatcacacaccggggcctcttgtggggtagggggaggggggagggatagcattaggagatatacctaatgtaaatgacgagttaatgggtgcagcagaccaacatggcacatgtatacatatgtaacaaacctgcacgttgtgcacatgtaccctagaacttaaagtataaaaaaaaaaaaaagttcatgctttgtggacaggtagcctgagttcattcatagctctactatttacctgaaaccttggactaattatttcacttttctgtgccccagtgttgtaatctgtaggatggggtactgcctgctccacagtgggactatgagaatgcttaaaataatgccaagcgcacagtcagctcaataaatgtcatctatgtagacaatgaaattcaagcataattccttaaacctttgtgccatacatccctttggcagtctggtaaagccttcattccttctcagcatcatgtttttaaatgagtaaaataaaatatataggattacacaggaaaccaattaaatactgctaccaagctatttaaaaatctatgatataatatgctttttaaattaaacccttaaatggatctagaggtaggtaaatgtctaacagcagatattttgaagttgcaatgaatgtaaatggcactttgagctatctacaactgaaatgcgatagaaaagtatctataatttctattagtgacagtcacaaatactactaatagtattgtggtttgttgcttatactcatcatcaaaggaaatactcaatttgagttaaaggtttaaataaagatgtatttttcccccatccaagttcatggatccctgaattctacccatggattccttggtcactggactccataggggtcacttggggaatgattgtgacaccaatgaaggaagccagcggatactgtttgctgtattatacctaccataggctcgtgatgaggaaataataaaataaataactgtaatgaaaaagaaaagaaaggaaaacaaaaggaacctaaaacagagaaggcaaatagctttccttttgagtgtcaattttaacagactccctgtggttgcgaaacaatgtgtctgaggctggctctgggttagagggagagtgctgttattgattagcaattcctgcatgacagcagagtggcaacagccatgcatctctgacctggcacagtcataagcatgttatagacataaagtgttagggaacaaataggctctagcaaaagtaaagagtgttcctcctctcatatcatcacttatatgtgtttataccatttatgttgtattttttacatgaatacttttagatttattaatctaatccaaaaaggtttgtatagctttctctatattaagagaaatatatgtatttcttaaatacacaaagttcttaaatctgatgccagcgaggattgcttccagccacaagtaacatatatcagattaatagtagttcattcaaagagggatttattttcctcacatgaaaaacagctctgtgggtgacccaatatagagcttgttcattgagccagtgattatatcaaggaactgggttcttcatatattttcattctttgatctccccctattgactttatagctgtatctttctcaaggatgcagaatggctgccgcagtctcaaacactgcgtgtgtgttcaaatcatgaagaaaggagattgagtgatgccagctagctctcttctcgtgactctcctttgtatctagaacacagtgtctttccccaaaacctgggtcatatgactacacctcaatacagcggagtctgggaaagcaaatatttgctttgcccaccactacaatagaaacgacaagggagaaagaaagggggttgggcatggcgttaattttgtcagccgctagggtctgccacccagaaaacagaagtccactaacaagcagggaactgattgttctgccagggaaaaagtctggcagtttcctactgaagaaatttggaagtcttgatggtccaggaaggataaaggcaaaaccttcattttcttttatcaaaaaggaaagccaagaaaaaaattagttaagtagaagttatgcacaaccctcatgtaactcttccatgttaatagcaggtaggctgcatatgaaaacatgatattatacaagaaaactagttgatgaagattgccctatttagcaccaattacttacgcaaacctaagttgactctgaaacaggaaccccatattaaacttttcaaacacatcagaatatgttactttgaacagattttatttaatccaaagagattatctttgaaaaaggtagatggtaaacatcgttatccctatttttgtatagtcaaataggcatagtagtaagttgtgtaaaattgacatccaaaccaatgcatgatactaaaacttggtgtacaaacagcagttacatcctattgctttgtatctacatctgtttctggagtcatataacatttgtagaatcttggaggtgttttaggctcatccttattttatccataaagaagactgacacctatagagattaactgacctgccaagggtcatggcagtttcactgctgagacaagaacacagatccctttacttctttctgagaaaagtacaaagtagtttaaagcaaaagcttccctgcttccagcacttctggctaagttgcgccgtgggaaaattgttttgtctgattcagttttctcatcttttaaactggaataatgctacctaatttacagggttgtttgaagaattaaatgaatgcatggaggtaaatcacttagaacagcggtaaattatacttttttattatttatttcctttgaccacccacaattatcatcagtgtcatcctcatcatcacaattaagattactaccacattaggctacataaactttttttttctctctctgttttataatttcaattttattttagattcaaggggtacatgtgcaggttttacatgggtatattgtctgatgctgaggtttggggaacaactgatgccatcacccaggtagtgagtatagtaccctatagtttttcagcccttgtctactcccttcccttccccttctagtagtccccagtgtctaccatcgtcatctttatgtccatgtgcaccattgtttagctcccagttaaagtgagaacatgcagtatttggttttctagcttatttttcctctcttaaatcacttctgtgacacgtaggccatgagatttattgtattttttaatgccttatttaaaaatttgtattatttaatacatttaatgcattattttttattatatttaaatattgatttatttgtactttttgccttattgctatattgtttcaaaaaatttaacattatttgagttacatgatttcaaatacatactgattaacattttaattagaaactttatgtctgatatgaattgccaaaatgtgtagttggtacaacctatgagtcattctgggttatctagaagaaactggtagcctgccccatactccagaagccttccccagtgtctagacctcagaagctgtcaggaatatgcacaggagaaggacacatggcaaatagctatttcgtctcttaaatgtatggtatgtgggaaccactgaaaaatgtaaagtttctacaaggtgctatttttattatttatggctctagagaacagagaaggtgaaaaatgtgagagagaagggaaagccaatagtatgtggccttcaaaacaaaagatcccacagatattgtcccaaactgcttcctggccctctagagtggagagggagggggaagacatcctattagagttcaacattctcttattatttccttcttttaattttctgggtatacaacagcaaatagttttgctgaagtagttacagaactagttggtgttctccaaccttcctattccaatacatactgtcatggatgggtacactaaaatctcagaattcactgctatatcactcatccatgtaaccaaaaaccacatgtacccccaaaagctattgaaataagataaatacattcttatttaaaaaaatactgtcatagggatgctaccttcttttcttttttgttagtaactatttgtgggatgtctttggtgtgtcaggctctgagcaatgccattttctcttggcttctttgcagtctctgtgtgaggcttacagtcatttttcacgtttgactcttcagaaggaagacagggctactggttctacatctggaactcttttcccacaacaccaacactgagaaatgtgacatggtgctgtgtttacatttgcataggaacttgcattataagttttatttgttgagttattggctttttttttttaataacccacatcagtatatagaactttgcaataggcatttttgttttaacttcatttctggtgcagttttattttcctacccttgtctttctattttctctttcatctgctttagacttaaactgtgttttatgtattgctgtaagcctctttaaaccctttctaaaacaaagcagggaatacataaacaaatagttttttgttttttgtttttttttctttgtaacagaaatcgacttaaagcctccagagaagtagaatctgtagaccttccacactgccacctgattaaaggaattggtatgtatatgaaaatgcttgttgggcacattgcattttttggccattaacattaaaacactcattaatggcattttagcatgaaattactgcttttcagtggataaatcacattagatcaacaaaaacctctttggtcaacctcttgatctgatgaaccctgtatttattcttctttcctaccctcactgtaaattattcttttttgtgtgtaattctatgtttagcatttgatttcttgcttgttttgtgacttctctgaactatttttgttgcgtctgtattgtttgtcaggtatggccgctgcagtctgtgttctgtgagccttgtggtcagctagtgaaggaagctttatgtaggcagtgacagcatttaccctgctcactactctataactaggatctgatcttatggctaacacgtaactgaccaatatggtttggttgtgtccccacccgaatctcatcttgaattgtagttcccataatccccacgtgttgtgggagggacccagtgagaggtcattgaatcatgaggtggttaccctgtgctgctgttctcgtgatagtgagtgagttctcatgagatctgatggttttataagggcttttcccccttttgctcggcacttctccttgctgccgccatgtgaagaagggtgtgttttcttccccttccaccaagattgtaagtttcctgaagcctccccaaccacacggaacagtgagtcaattaaacctctttcctttataaattacccggtctcaggtatgtctttattagcagcctgagaacggactgatgtaccggcacttcacaatatgtattgtaaaaacttgtttttattttatcttctaagctatgactgcagagggggagtctccctcttcccttgactttatgtaggatgtattgtggagtctgagtctttgagtaggggttcctaagagcaagccccaattttgctatagataaggagggatctgtccagattcttctccagcactgagggtctctctggtgtgtttgcagtttttctccaaggtagagtctgtgtcttgctgtcttttaccctttatcatctactaagtacatgtccctagtacataatagactagtagttagattatcaatgaacaataaatattggctttccttttttttaaattttaattttttttttttttttttttgagaggtggcctcactttgtcacccaggccagaatgcagtagcgcaatcttggctcactgcagccctgatatcctgggctcaagcgatcctcccgcctcgtcctcccaggtagctgagactacaggcacatgcccccactcatggctagttttttatttttgtagagacagggtcttgttatgttgtccaggctggtcttgaactcctggcctcaagcaatcctcccagcttggtctcccaaagtgctgggattgcaggcatgaggcactgagcccagccaatattggctttccttagatatggttcatggtatgattagaaacaaaaagaattagcagtcaaaacacctagtttctagttctattctgccacaatgtaaccttaggcaaagttggtttttgtatttgtcacctataatgatgagtttgtgattagactaatggtttttagactttaaaaagcctgggaccatttatttataatcttactctgagagccacagtgtggaaataactagactgtcattgagtcacttctagtcctttacaacaacatccttctctagaggtaggagagacaatttaatattttgttttactctttagaaattaaaactcgggttacatggaaatgttctcttctctgaataggtaacattgttaaacaagttttgagtgtccttccatctttttctttttatgaatactcctgtacataatttttaaaaacataagtgaggtcaaattatgcataatatttcaaaactagctttttgtacttaatactaggttttggaaacttatgtttgtacataatgttaccttttcttcacaactgcacagtattttttgtgcaaagttcatataaacagtgtatgtgcaaacaatatagaaagatataaaatggaaagtaaataaaaataaaaatctctcatcaaactcttcatcacccccaacagaaataaccccaaagataaagctcccttttttatctttcctgatagtttcagtgcatttgcaaacaaatatattgactctttttttcacaaatagaattttagtgtaaatatttcacaaccttcttcattcctaaaacagtgtgagcagctttccacatcagcatatatagttactttgttctttttaatattttcacattccatgatttatttaaccattccccttttaatgtacatttgggttgttacagttttttgcaactatgaacaaatcagtgaacatcattgctgttgagtttgtgtgtctgtagaatatgtccttaacaatgggattgttgttcccttagaatatgtgtttagagttttgacagtcattgctaagttgctctcaatttggcaacagtaataaactcagtacctcatagttgtaaccacattcactccagacagagttctcagcactcttttagtaaaaataaaccatcagttgacagtgccaccttcagagtttctctacaaataccttgcttgcctccctttctttttttcttcttttaaatcagcttcctcaggttgatctgcctctcattccttaggcatctgtttcctatgtgttctttctcctttttttcattgatacttttgtatttccccagttctacctcccctcccctagactggttggctgtcctggaatttcccttccttctttcaattgcccaaacactaagtgggaggaggcaaactcatatcaaatagcagattgactacatctgtgctggatcatgcagacagttcaagagtcccaagtaacttagcagcttcatcttgccttccagctgcaatcaagaagagccctctcagaactggtcactcagcaaaagccagatggcattagtaaaagatgttgggcaagggtgggagtttgggccagtgatctcttaggttacttttgctgctgagttaataattgtcacattattaaacagcccttggccctgggaagcccaccttctgtgaatacaagtctcagagtagacaatagggcacaaccagccatgttacatgacagactgccaagtgcattcctcttacaactcactgggatggagcgctcctcagagaaaaacaagcccagcaacatttgtattctgaacaggcatctgtctatgtttgtgacctttatgttgtgatgtgtgtgagctgctgtctggaattggaaagaatgaggaaatatgtcacctatggcccctcttgtgaagtgttaaatgcctctgaggcacttcaaaaggcaacagagcggagaggatgagtgattagaagcacatttgggatacatttttagatctaattagaattgtccttttttttttcttttttgcttttgccctgtggttagcacacaccatatgaacgtttgtcgaatgctatgttagtgatgcataatggttaataataacttttggttatatatctttaacaacagttgcttattcacaggtctttgataagaagaaataacaatgtgctggacacacatttctatacaggcaaaagtgactttttatgatagagagggctgtttcttattttctgttttgaaaacagtagtagctatgcacttgaggccaactaatccctctaagaggtgaaccttccttcccccttgcccttgattcccatcaacacacacatacatatgcacacactaccgtgcttcagtcaccatcactggaagtgaactatgtgcaacttttgggtgctttatatatatcatatcatattgtgtctgctttaataaatcatagttattgactacatatcatacaggatgtgtgccttctgtgggtcagaaaataagttcactatttagtccttttcaaaaattccttcccgatctatcttatagacagaaactaagcttttatacacccaagatttggcagattaacatctgcatattaaaatgtcaagagctagttaactttatttgaggcttaaaagttaaaaaatctgattttctaaatgtctggccttcaaaatttgagtggactgtctttctcaagataactaacaattttatgcacttggcagtcaagacctttacaataactgctgcttgggagattgaggggaaaaaagcattaaagtttgtggcccttataatcaagtactttacagtctactgatgggagaaaaggaaaacaaaacaaaacaaaaaaccactgtgagatatagatatgtcttttctttctctagcagataagtacctgaggctcaaggaggttaagcaacttttgcaaattcactttccaatatagtgtcttttcccagggtgactaatgtatatacttgatgagtgaaccagaaaagtaggaaataatatgttacatatgggatgctctattgggtatagtaaaggatgcgttgctgttataaaattatagtcacttagaaaagagatgtttatttttatttttctctcatcagtcttaaggtaagtgaatggcctagggtagttaggtgactgtgttccatatggtcattcaggggcaaatgctgatgaagcaacacagctgtcttcatctaagactagaactctgcttgttgccatttcccagcaggaaggggttgaaagaaaatttatgtagatttttttttctacccagtagttgcatatatattgtattctcacatcctattgacccaaacttagacatatggccacatctgtcagccagaaagggtgggcaatgttatctatagctgtgttgctacgtgcctattgctaaaaaggctaaaaaggaagaaggggaacatggatgctggtgaacacttggccacctctgacacagataattgctaaagtaataagaagagatggaaattaaatgtgctaagctaggagactttctaaagaaagggtttgtcatgctacgctgtgccattcatgtgtttttttgctcatgctgttccttgtgcctggaaattctccccctaattcccctgagcagtggatgcagtggataccctccccagatcccccccaacttccctgagtgttggctaccaaaagctctgagtgcacccagggagctaagtcctcctgcccacaggcaataatggactgacacggggtagacttaaagaaataagaggcacatcaatcaattgaaatgtgtgggaccttacctggactctgaattaaacaaactgtaattttttaaagctacaccttttaaacatgattggctatttgaacactaactagatatttgatgatattgaggaattattgtgaatttttagtgtagtaatgatattgtggtttgtataaatatatttagggataatatgatgcctcagatttgctttaaaataacacaggatgaggataagtggtaggactgcaagggaaacaagactggccatgagctgataactgttgaaggtgggtactgggtatataagggctcaccacaccattctcttgatttgtgtctatttcccataataaaaagtttaaagagagagaaccgatgaaggggagggagagagtcaagcacacaataagagtgacaaacagtgccaaatcagcccacagtattaagttttcacatatttacataaatatcacctggaatgcaatattgaaattaatgtatatcactagaataaaaaaagtaaagatttaataaatttgttttgaaataaaataagttgaaatacgaaaaagacagaaaaggttttgaaagaggttttaaagaaaagtgcaggatattcattggtaaagatgttggtgagaggcttggaagcaaaacttcaggggaaaaagacaacatatggaattgaccacaattgaatttacaagtgaagtggctttacagaggaatcaggggatgtttctgagagaggaaattcattaaattctaacttgaatattttctgtttgcctttaagtcagagcaaaggctttgagtcccagcttcccagtttgtgaccttgagcaattgcttaacttttccaaagcctccaatagtcttcactctaaaataaaagataatcatatgagatattgtatgcagggtatttacaaggagcctggtacttggtgtacctaatgtatgttagttattattattaaattagaggagcaaaaatttctctagcattgactgctcctgacataatcacaccgaagaggggatacacgatgataaaaccttcctgcagtagtggctatagaaatgatgacggggagaagatctggaaaatattccaaagaaggctacagatagatacattttttccattggaattaggcaatggagttaaacagaagttacaatatggttgaaataaatgtatttttttaaaaaaagatttctctttccttaattattaaaaaatatacaattttgtagaaaattttaaacaaagtataaagaaaaaaataaaaatcattcataatcctatcaaagaagcattgttaattttttctatatatcttctttttccacgtgtatacttggaaattaaattttctaaaataattttcaggaaaaacaaattttaattaattgagcttctactaaataggactgaaaagcaaaacctggactagaattctctctcggtgtgtgtgtgtgtgtgtgtgtgtgtgtgtgtgtgtctgtgtgtacatgtgtatgtgctgtgtatacatgtgtatgtggtgtagcgttcccctgattcttaacttattaccagtggacaaccaccgtggaactagagtctagtcattcttaacctttttgggggaatcacagtctcttttttgaatctgatgaaaatcaaggaccgtttttacagaaacgttctcatctgtgcatacatgagacattttgcattgcatagaatttccgagggttcacagatactttgaagcccaaaagtgatccacagaccccagattgagaactcctccgctatgccatgcttaagcttatttctgtgtatcttctttctgaggagcaggcagatgggtcatctttacaatgtgaagttcttggcatttttattttgttttgtttttctgcactacgatggagcaagcaacactggaggcaactggctaaatgcaaactcatgaagcaagaccaaaatggctggatagatagatgctgtttggttttgacaacctagaaataaccttgaagaaatcctatggagaagtcttaaagaggaagattggattttgtagactcaaagaatgtgtcatggtttggcttaatctaagccatttttattcttcttttcttgtgtttgggtctattatctgtctgtagaatttatacagtgagactgctggggaaagtcttatgtctaattatttgctgtgctgtgtggagtgtactgcagacagtcaataaacaatcaatagtaattgtagcctgcctcagagacaggagttagaaacttcaactggcttaggtgcatggtatttttcattaattttcttctgctagtttttttctctaatttaaagcctaaatttaaagattaaatagaaaagctttctttgcttatgagcacaagtaggcactgtttttaaaagaaggaatatataatcccaggtgttttacctctgttaatgagaaagatgtctgtttgcttcagattgaatgagcaaagaagaggacaaggatatttgcatggttaaatgcctatgagcccttccttcagaaagtaatattcccctgatgtcaattacttttatacggacatctggatgtttatcatgagagtgtacagatgtcaactttttcagtattatagctggaaatgtggtgataacttgactttgatttgagtaaacataaaatatctaacatttaaagtcagaagttcacttcaggaaggggtttaaactgacatttattaaaaagaatggttccttggaaaaaacatcagaaccatccctaaagatacagtcactctgataaagtaaacagagtcccagttatgctctgtgtaacaaataacagaacttgaacatgacatttatctgttccttaaacttacagaagctggctctgaagatattgacatacttcccaatggtctggctttttttagtgtggtgagtgtcttcttccttccccaaattcagcagaggagatacaagggtatttgatgagggctgcagaacagtaagttgcttttaaaattcattttccaaaatgcattctgaagaaaagagaggtcaaacaagatcttggaaaacttcctccagcttttctaaatgtagagatgaagactctttgcccattgagatagtgttctttatttccccattgcattgcactaaaatattccaatgcaatctgtgttttgttttgttttttcttttttaattttttttattttttgagacggagtcttgttctggttgccccggctggagtgcagtggcatgatctcagcttactgcaacctccgcctcccgggttcaagcaattcttttgcctcagcctcccgagtagctgggattacaggcgcccgccaccatgcccggctaatttttgtatttttagtagagatggggtttcgccgtgttggccaggctggtctcaaacacctgacctcaggtgatcgcctgcctcagcctcccaaagtgctggcattacgggagtgagccaccacgcccagcgcaatctgtgttttaaatgtgcactattaagagggatatttgaggtcttactgtggatactcaatactaacattatactattttaaatacagcatctactcatctttctattactattcaacttgaagcaaatattcttgccattattatttattttcaaatattataccaaccttgcccttttgctttctttcttttttcccctgaatagccaatcataagtggaaagtcattgagtttatttacacccttcattttgccttgattcttgtaagctgaaaaacaatatcctttctgggtatacaatagaaagactttaaaaacaattggcttgtgaatattgttgtgaatattgttgaaactagcttgtaacaatgtccattctaattggaaatccagataaggggacagatgaggaggttctgaccacctacctccctggcttgggcagacataggagttcttggcatcttcataggtccagtttttctggaggaagaagtaaccaactctgacacctgactgtaattattccatttcctctcaacatccattattttcaggctctgagactcaagagggatgtgaaatactgggagatacttagaagggagtcaccacactaataaaatagttgttagacttatgagaaaggtgagagaactcaggttggagtagaatgagaattagaacactcttcaggttcctgatggtttttatgtgaaagacagtgagcagctggttattaccactgaggcaataaagagatactgtgggctttagcagaaacaccagtatatgtatttagtttttaaaataaggttttaaaaggaatgttttatttaattgcctacacagaatgaataaagtgatatttatagtaggactctgggtttgtttaggagcacatgcttgcacatgtgtggcttaggaaaaaccactgggaccactagtctaaaatattcataagtaaagatgcaaacattctgaataaagtagaaggcagttgcattgatttttttatttgtttatttgtgttttttgttgttgttttgcaaggatgtgttcttggagatttttataatctagaattcacctatttcaagatttctctccagcccccatagtaataaatctgaagtaggagggatgaggtctccaaacacataaatctacagccattttagcttgggggcatgttatagttacaaagatcttatagccatatcaatagaactttttctgctttttttctgttaccctcctttgctcatttgactttttttaaaatttagaaacattcccagtttgctgctgtttttcatttacttggcattgtctctaataaaacctagagtgtactctcttctaaataaagaggtcctacattgtggaggttgttcattcttcttcctagcattttagctcatctaacccaacctattttacagttatgggttgagggtcacctcaaaactaatgtcacacttcatgaagaattggatgacatagaataaaatataaaaaatgtaaacaatgtgagtgtgcttaacaccactgaactgtacacttaaaaatggtgaaagtgatgaatgttgtatgtattttatcataattaaaaataaatttttaaaaagagaaaaaatacttaaataaataaggagtgcgaacataaccatgactagttatcaccatctgatagtgcttcctttgcatgtaaatcatgcttttgttttggggacattcataaagaatagggattaactgaagtggcactgccatgtaacaatagcataattccagtttgttctacttaccaggcttgccctccatgaaaatatacaattgtagataatcttttttaattggagagatttcctcttatgtccaattttatacataaagtaagacttttttattgtgtgcctaaatttgtgtaaatatgactgcatcgtattagtaaactgaattaggtagtgcattcacataaaatttaacatcaccaagaaggctttaccttaagaatgtaatgatgaatcaccattttagatagactgataggtaatttattaactgatttaaaagagaaaagacctatatcatctcagtgagtaccaaaaagcatttaataaaattcaatactcattcctaaagttccaagcaaactagaaagataaggaaaattcccacaaaactacagcaaacatcattcttgatggtgaagcattggctgcatttgcattaatgctcagaacaggaagaaaatacccaacaccacaaccatcagtaatctactagagttcttagtaattcagtaaaacgagaaaaagaaatgtgagatagaaaagaaaaagacaaaactgtcattagagaagcagggactggctcaattgcccaggctgatgtgcagtagtgcaatcatagctcactgcagcctgaactcctaaactcctgcgctcaagaggtccttccacctcagccttccgagcagctaggactacaagtgctcaccataacactcagctaatttttttttttttttttttttttttttttgtagagacagagtcttgctatgttgcccaggctggtctcaaactgctggcctcaagcagtcctcccacgtcagcctcccaaagtgctggaattataggcatgagccaccaggcctgacctaaagctgtagtaatttaaaaagtgttatattggcacaggaatagacatgagacattaaaataacaaaacagagagtccctaaatagaccaatatgtaaatgtcagagatctagcacatgataaaggtgatattttgaatcagtgggagaaggatggactgtatgccaggcactgttccaggcactgggatctagcagtgaacaaatttccacagtcagtatgtagatgtcacttttctccaccctcagctctccctggaatcacctagtccaccaaccttctgattactctctgaagagaataaatccctgatcttcttttcagttattttcaggctttcagtattccacctccccgttattattttttctgttatcttttctctgttttttgagtttttgtggctttatgccactactttaaccacaatctctatttatccttcatgtacagttcccatgttagtccataaaaatacttaagcttttgtatttaacatttttcaccgttttggaaagggtctaaaattcccaggactccacagctttgcaccagataagcctggaggaatactaatgatggatctaaaagaagaaaaaccaagggcacgggaattaagaatcagtcgtgggtttgatttggcctcattcaatccacatggcatcagcactttcatagacaacggtaagagccaatgggctaccaacatttagtaacgtgtgatggttcacaaatgactgtgaaaaatagatttggatcatatttctaggaagagaagaacaattaactcatgagtgatttctgtattcttcattacaaagaacttgttcatttgcctcttcagctggcagtaagttatgctacattttgaaattcctaacaggtaacacctgaaagaatgtttagatttcataatcttttcatatacctacgatcatcacatttaaaaaagaactgtatttttgaattaaagtagaaacagattatgcatgaattctgtatatggagtaggaaacactttcttaaaggtcagggagccaatgatcagaaataacaccagacggacagcaataggaaagacagagaatgatctgttaggtcgtctaacagcttatacattcaacctttccttgcctgtggtatttaaatgtcagtgcctgcccagaggtcccgtagttatgtcttgtaaattaactctgttctttcaattctttagatgacacagtttatctctttgttgtaaaccacccagaattcaagaatacagtggaaatttttaaatttgaagaagcagaaaattctctgttgcatctgaaaacagtcaaacatgagcttcttccaaggtacttcctcattttgttccttctctaatttatccccagcatttgcaaacaatccctatggtgggttgtcctgtcatcttttataagcgctaatgtatatattagctaatatgtaagagctaaagagcttatatttccttatttataaatgtgtgtgtatagtttccttataaaccagggcaagcatggcatatgaaagttgatgtcactcatactattcactgttctatgcggactcctttgagaaatgatgaagtgcccgactacagggtgatactcttcaggcccatcttgagggtagaaggcaaaccctaacattttttcctgctgtcaccctccatcttagatgactcatcacccagatgagtgtcttgccaaggaagaatggcctgttttttattgggtttgtatgctttgcatgggactttataccaatcgctttcatagggttagtgatggttgcatgctagtaatcccacagaattagagccactcaagttgagagtgagtcattacacttcaagaacataaagctggttgaaaatgtggctaagagagaatcatgtgtacccccacccccagttcagtgtgtattagcctactgcttcttttagtttaaacttgatgaatatttttaatttctaatgaaatttcatttctaatgaaattaaaaatattgcctatctagggcctatctatgcctatctagggcataagcatgtaacttccaatcattccttccaaaaatgcacttgataaaaaaaaataggagcataaataccatccaagcattatggtgctctttcagaaaaatgagacctaccttccctgtagctctatatttttcatttagcaaagaataaagcagctctttcagaaatttttgcatagagtaattggaatttaaatttaataacaccctcacctaactggtcttaaaatgaaattgtttttagcatataaatctctcacctgaagcattgtactatggcaattttatcatccatctctctgcaagtgtttattgagtgcctgttcattctcggcatgtcagctttgtgaagcaggtagaaattgaacagtcaaccttagtttgactaataactaagccagggaaattagaaaaatccaggaactgagtaaatggaagctaggtaaatgttactgactgcctaaccagctcaccagccaatcaggctctctccagctctgtactgtggacagctctgtccttacgtataattgttaaaccctacatttcttgctgtcaaaaaacatgccctgatggcactaagttctttcttctcttatggtaatcctgccataattgctaaatgacctgtgttcagattacctggtaccatacaaaattgttctctggcaacaatattatagtatattgtatatgactatagtcgtgatttttagctcgtcttttcctcttaccaaaaatttaaagcacatgttgcataaatcttatgagtacttaatatttaatatggagaccaacaggccttttgtttcctctcacatgctatttttctttttcagtgtgaatgacatcacagctgttggaccggcacatttctatgccacaaatgaccactacttctctgatcctttcttaaagtatttagaaacatacttgaacttacactgggcaaatgttgtttactacagtccaaatgaagttaaagtggtagcagaaggatttgattcagcaaatgggatcaatatttcacctgatgataagtatggccccttatagaatatcttcatttttcttcagttgtggtgctggccaaattctttactttgctttctttgtcaatgtgaaaatagttttcttgacatttatggtatattatacatataatatatagatacactatatatataattatatatgttttgtatatatatttacatatacttagtcacatgtatttatatgcaaatacaataccatatttaagtaaactatataatacagtaatatatatgtatttatatataatatataaagtttggaatacatcattgtcaaatttaattttataaatataaattttaaagtgtgatcatactgatgcatacatattgaagtatcaggtatttccttttaaataaatgtattatttttattggctatacattattccattataaggatgatcttaaactaatttaaccaattctctattgatggatatgtgtataggggtggggagttctacataaaaaatattttatacttcttatttaccatggaattttaaacaagtattttttttaaagaaaaagtccctaggagagtgttttttttttgttttgttttttggagatggagtctcactccgtcgcccaggctggagtgcaatggcatgatctcagctcacctcaacctccgcctcctgggttcaagtgattctcctgcctcagcctcccaagtagctgggattataggcatgcgccaccatgcttggctaattttgtatttttagtagagatgaggtttctccatgttggtcaggctagtcttgaacctccaacctcaggtgatccgcccacctcagcctcccgaagtgctgggattacaggcatatgccaccacacctggctctaagagagtattataacataatggttaaacttgcagattttggactcatacaggcctgggttcaaatcccacccagggcactggctaaatggttctatgagctacttttctgtagaacagacccctagaaatagaactatttgctcaaacagtgtgattcttttaaatgttaactttaatagatattgccaaattgtcctccagaattatctcattatttttatatgcacaaccacaacctataagagaagatattaaattcttgatagctttcttatctactgcctcagcacactgaaaaatttaaactactacaaatacaacataaaataaatttggcactccttgacaactaaatgcccttatttttgtaatccaatttctcctcctttcttgttgactatagaaaaagaatgtagaatcatttaatttaaattgtctctaactgacctgatccaacctctgcagccaaatctgtttttcactcttatatttccattatgagagtcaaactttccaatcacccaagctaacaaaaaaataacaataatgaaaagggagaatcagcttttactcctctttcaccattcctatccagcctgtaggcaggtcctgttggttctacctgtgcctccttcctctacccccaaactcctttccctttgagtgagacctgcctaatttaggttgtcatcctctctgactagcatatgagactttcttccaatttgttttctgtctacttggatttttttcactcttgccaattttgtctgtctatctctattagccttgaagggctccccaaagagggaactctgtcttcctcacctttgactccttatgccagtacagtgccaggcacaaagcaaatgctcaggaattgtggaacagaactgaccatttgttgccactttattattctaagatttcagtggaatccaattgcttatcaaatcaaggcagggtaaagggttggactttgtttaacaggccacctccaacctcccttttctactatttccatgctttctatgctttagacaaagaactcattgttttaaacattccttcctcttcttgctcctgtgattctgctcttgtgcttgcttctgcctgggaagtgcctcctccgtcctcatctcaaatctcatctctctttacacagccactgcagatgccccttccttggtgagcctttctgtgtcctcggaagttagctatttctagacctgaactatttctcatgcttattaggtgtttaatgtgtacaaaccagtgagatttgttccaacacactataaactttcaaggagagaggctgtgtcttcttcatgtttatatctgctgcaacactgagttcatggcttttcacacataattgctcaacagagcaggtgccatggaaagtcaattcaatgagtaaaattacctcaaaatagtctgttaattcactcacctttgaagtagacagattattctgcattgatacttatctcttactcttaaaattcgctatgtattaataaatattttattgaatattaaggaatgatcactattttaataagatgttctttaccatatatttctatatgtacatgataattagaagtatcaaattatattgtggaatgtaaaagcttttcttctgaagccaagcatttgttttattgtcatttcagtggcaaatatggacttcatattcaaaatgatgttctatattatttttccttacaagctttttgaaaaacaatttaataattccatgattgttgtagcaccactgaattgattctgaaagcttactttttaaataaaaattgacctttatcaagcattccttgagggcccatgattgattaacttcttggcaggttattaagacttattctttcacactgtattaatgaagctttatattggcatggagctctaaccactgtgtcctttctgcaaaggtatatctatgttgctgacatattggctcatgaaattcatgttttggaaaaacacactaatatgaatttaactcagttgaaggtaaaatatttatttttacatatagacagtaatctattatgctttgcaatgacatagtttttctataagagtaccacacgtagaacaaaatatggatgccagtgtagctattctgggtttttaaatactccctacaactagagaaagctcctgtttccagcgatctcaagaactgaccatgattacatgcagcagcaggttgagagtgatattcatcagatttagggcccattccatgaagtattgatggcagtggaagaattccaataagaattttcacaattgaaaatactaatagatgaattctcaaatgaaggtttatgcacagtgtcagttctttcaataatacatgaaggtagaaattgggttccacaccattattattttcttcctactcaacaacacatattttaggttgattaagaatttcctatcttgctttgattgagttccttgagctaactgatcattgtgcatcttttaaaggaaaaggagttcagtttttaagatagatttttacagagaccgattatcaccctaactttcttaatttcagggaagaagaaaagtggctccaaaccagtttttaatacattccttttaagcaatattggtgttagaaggtggaagcagggcgatgtgtaatttcctcacatgcatagaggcaggaaggttacctctaaattatttaatcaagtttctcatgtcatttagattttgacaatttctcatttggaaggtacttgagctggatacactggtggataatttatctattgatccttcctcgggggacatctgggtaggctgtcatcctaatggccagaagctcttcgtgtatgacccgaacaatcctccctcgtcagaggtttttatattttcagttttttaaacttaattattcaagtccttttgaactaataatacaataaattgtcacagggatgatttgtttagttattttaaagcaataatataataagcttatgtcgtggttttgtaattgcgttaagccaataattggcagaatgttacattgttcaaatactttaagaaaggtaatcttttgatgtattaaattatggtggaaactagtcaaaaggcatttttataaagacatgtgcccttcttgggtggtatactggcaatttttaaaatatctgatttattgtcagctcaccacatgatgtgatatttgttcatgttgaagtagtgtgaaagtaggcacattagtatgaaagtatttctattaaagctgaattgctataataacactaaatcctgtgttggcatggaataactagatggttttaagaaagtactttctttgaagattggagaaagtactttaatttaaacattaaaaagattggtaactgctattttcaacagcatgtccccttaatcagtgtgtcattgtggaaaacagggcttattgatgattgagtgacatgcatgtacggtggtcttatattcatactttgtatcccctgaataggttctccgcatccagaacattctatctgagaagcctacagtgactacagtttatgccaacaatgggtctgttctccaaggaagttctgtagcctcagtgtatgatgggaagctgctcataggcactttataccacagagccttgtattgtgaactctaaattgtacttttggcatgaaagtgcgataacttaacaattaattttctatgaattgctaattctgagggaatttaaccagcaacattgacccagaaatgtatggcatgtgtagttaattttattccagtaaggaacggcccttttagttcttagagcacttttaacaaaaaaggaaaatgaacaggttctttaaaatgccaagcaagggacagaaaagaaagctgctttcgaataaagtgaatacattttgcacaaagtaagcctcacctttgccttccaactgccagaacatggattccactgaaatagagtgaattatatttccttaaaatgtgagtgacctcacttctggcactgtgactactatggctgtttagaactactgataacgtattttgatgttttgtacttacatctttgtttaccattaaaaagttggagttatattaaagactaactaaaatccca

SEQ ID NO: 1239 - DNA, 47590 bp, Homo sapiens
agctttccagttctgctttaggacccgccccccagcacgctcctcgacgctgcgaggtcccgccccgcgtgctggccgcggtaaaagtggtagcagcggaggcgagcggagggtttcccgcggcgggtgaggcgctgggtatgctgggaaggtggggtcgctttggggttctgtgtgcagcgagcatggtgtccttggcaccagggtttcggcagaggagcctagcgtgggcctacttggactcctccgcgtggggcagctcgggacacccgggcctgcaggagagcggggttctaggctggccccggctctgcagtgcagccgggtgcctgccactcgcggggctctgtcgcagtactcgtgcctggcgcctcccctcagccacagagaccgcagtagctccaaccatcgcacccctaactgggccacgagttctctgattgccagacctgttgtctttgccactcactgttctgagtaattggagagtcgtgtattcactacacgccaaccagagtggtcctgtaaaagcgtaagcctagtgtagatacgcttctgcttaaaactcttgagtggctcccagtgcttttagaacaaaatccaaacgcctttccgaagtcgacaaggcccagcttgattgagcagaagatgtgataggagatgaggagcggggggcttctgcaaaagtgcttcggtcgctcaggcttttggcacattttgcttatgcaacctagttctttctaccttagggccttttcttgggaaagttggggtaaggattcctgacctgtaaaaactcttccccaacttttatcccggtctgtcttgtagatctcaaatgctagtttcctcagagtccttctgtaaccttggttttctctttctacaacgctctgtgtatttcttgcattcatgtagtctgtaatttgtattactctctcattagagtctaagctcttggagggcaagggtcttctctagcttgtggtggtggctccagtccctaatatagtgcctggcacatagaaggtatttaataaattttgttattttattttttcgagacagagtctcactctgctgcctaggctgagtgcagtggtgtgatcgaggcgcactgcagccttgacctcctgggctcaagcgatcctcacctcggcctaccgagtagctgggactacaggcacgcgccactacactcgggtaatttttaattttaatatatgtatatttatatatatatatatatatatatatttttttttttaagacagggtctcactctgtcacccaggctggagttcagtggcgccatctctgctcactgcaacctctgcctcccgggctcaagtgattcccctacctcagcctcccgagtagctgggagtaactgggactacaggcacaggccaccgcgcccggctaatttttttaaaaattttttgtagagaacggggtctcactatgttgcgcaggctggtctggaactcccagactcgatatccttgcgtctcggcccctcacagtgctgggatcacaggtgtgagccaccaccgcctagcaaatacattttgaatgaatgtagtggaccatctgctctgcagtctgacggctaatacaattagggcttggcatggtggtttctatttcctccttgtaaatggccatgcaagtttacaactcttggagaatgaggaggggttcagagaatatctcctgaatctgtagtgtagactgcttctgggagagaacaaataataatggatgagggcattcagccagagaaggtgtgtagtgcccaccagaagaggttcatgccttcataaaattgttaacacaagacatagttccaggtttgtttgtttgtttgagatacagtcttgctctgttgcccaggctggagtgcagtggcgcgatcttggctcactgcaacctctgcctcccaggttcaagcaattctcctgcctcagcctcccaagtagcagggattacaggcacctgccaccatgctggctaattttttgtatttttagtagagacggggtttcgccatgttggccaggctggtctcgaactcctgacctcaggtgatccacctgctttggtctcccaaagtgctgggattataggcgtgagtcaccgtgcctgggctgttccaggttttgaaaagacactgtggtcctggttttagactcagcaacatcacagacaagaaaggaatcctatggattaaagttcttcactataagttttttttttcctccagttcaaatgggtaacgtgccaatgtagtaaaggtttgagggaggcacgtctgacacaggcacatgaacacccagtcatcacgcttatgaactacaaaacgatgactcttaaccttgaagtgacttcagaattgattccacatggaccacaggattagtatttcaggactctaccatatggatcctattgatatgtttgacacctggtccagttttacttcactaaactgattgatataatgtgcatgattgtctaagcctttctaattggatgaaatgccttctccgtccacaaccccctccttctcctcctgcctcagctgaatccaccttttaagccttccttgaacattcagtcagatatggccatttctttctctactccaacatttgttggacacagttttctaatgcacattacagattctgacagttctagatattctgtctgtaaaataaatgttagtacatgagataaagtggattatagcaatgttgttaaactgctggttgcaacccattgatgggtcctgaccagcaagtaaaagtgcagctgggtgccgtggtgcatgccggtagtctagctacttgggaggctgacgtaggaggatcgcttgagtccaggagtttaaggctgtagagtgtaatgatcatgcctgtgaatagccactgtgatccaacctggacagcagggagatcccatctcttaaaaacaataaaaatgaaatagagcatatcagagggccttgttcgtaggaagtcagtattgttttgtggaacatttagttgtatgcgtacatgcaggtatgtgtattgagtctcattttaaagtatatttcttactggggttatcagaaagtttgaaaatcattagactaggggataggtatgctgagattttagtagtagagttttacctggacaaattgtctactttgaacctgactgccggcctgagtttgttcagggaagattgtttctaatctatttgctttttgtttgtttgttttggtgacggagtcttactctgttgcccaggctggagtgcagtggtgcggtctcagctcactgcaacctccgcctcctggattcaagtgattctcctgcctcagcctcctgagtagctgggaatacagacgtgcgccaccatgtctggctaatttttgtatttttagtagagacgagggtttcgccatgttggcaaggctggtcttgaactcctgacctcaggtgatccgcctgccttggcctcccaaagtgctgggattacaggtgtgagccaccgtgcccagcctgtttctcatctatttgtgtaagaattccatgtttacttactctagataacttcaaaagaaaaaaaactctggccaataaaatgccataggaatgtttagggatatgtggagtaggcattctttctaagttttcctgaagatgcaccaatgtttaacaagaaaggaagggcagtgtagaacacctattgctttctgcatggtaagagggatgggtattgggagagcccacacctgctgaggagtgcctttagactttgagcggtggtgtttctctccctcccagaaatagatctctttggggagacaggccatacaagacgtgaatctggtgacattttacttgtttgaagcaaaatttttttagatgatggagggtttttaaaaattgcttttaaaattaaaatttgaatagataagaagtaatcactataaaaaataatgaagcataaggaatgctagtattagctgggtgtggggcactcacttgtagtcccaactactggagaggctgaggcaggaagaatgcttgagcccaggagtttgagtccagcctgggcaacataacgagaccccatcttttaaaaaaaaaaaaaaagaaaaagaatgctaatatcgtgaacatttatgttcccaccacccaatttaagaaaaagaacaatacttttgaagtccactgcgtacccctccttgatcccatctctttcccttctcttttaggagttaactatcctgattccttgctatgctttttagtgtgatccctgaagaacgtatcactccattttgcatagctataaatttcatagaaatggaatcgtattgcatgtgttgtgtgatttgctgtttttgctcatcattatattcctgggattatccatttttaggtttatgtgtgactgtaatttattgtttagatgaaagttttcctggtttgacttgctctatcttcatatttttccttaagctaagggttcagcatacgaaggcagtattggtggcacttctttaacagtaccccatctcttctcctagccttgagggctgcacctagatgaacttgtgaggctcatttgaaccttttggaagcaccgaagcctgctgaagtttccagacatctgtatgaatctgttgtagttttttaatgttatatgctgaatataaaaccaagtaactcctgctggaaacatttacaatatcgattaacaaatactatcagtggctttgacatttttgtcagtttcttgatttttttccccgcttttgtctccccttcccccctccacattttggggcattgtgctgttaatagattttttttctgttcgtttgtttatatacctcctgtttccttctgatgttaatagatttctgacagtcagacttgtccacaagaactcaactggcaaggctgcttttctgtgctaaaactggggagctagtgggcaccatgaagatcttctgcagtcgggccaatccgaccacggggtctgtggagtggctggaggaggatgaacactatgattaccaccaggagattgcaaggtactgggttggtttacagcaggctgcagctgggtggggcacttgatctcaaagcagatgccttgggctccagtctgagcgtgggctaggctgtcacccagtgcttatgatgagggctggtgttggtcctgagcaggtctgctcagccaggtaggtatatgtagcagttaggcaaaatcatgcctgtttggagagtcagacattatgtagcagccttagcagagcctcagcatctgtttaacggagcaaagaaaacccaagcctcagtagtgttgatgaagttgaatcatttacttgccttactgaaatggtgacatgttcatcatatggttaaattcttttgaatgaaaaaaatgaaaatggttttttttttcccttagaagaaatatttaaaagtatgtgagttgttggccaggcgcagtggctcacgcctctaatcctagcactttgggaggccgaggtggccagatcacctgaggtcaggagttcgagaccagcctgaccaacatggagaaaccccgtttctactaaaaatacaaaattagctgggcatggtggctcatgcctgtaatcccagcttacttgagaggctgaggcaggagaatcacttgagcctgggaggcagaggttgtgttgagccgagatcgagccattgcactccagcctgggcaacaagagcgaaactctgtctcaaaaaaaaagtatgtgagttgttatgtagcaatcattaagtgcattcagtgtgccagcattgtgctaaggctgtggataccagatgaagaagatcctgttctcatcttcaaggaccatgcagttttgtggaagagacaggcacatacaaaattacagcacaaaagccaggcacggtggctcatgcccgtaatcccagcactttgggaggcaaagggcgggcgggcgggcggtggagggggtggtggcggctgatcacttgagggtcaggagttcgagaccagcctggccaacacggtgaaaccccgtctctataaaaaaaaattagctgggagtggtggtgggcgcctgtaatcccaggtactcgggaggctgaggcaggaaaatcacttgaactcgggaggtggaggttgcagtgagccaaggttgtgccactgcactccagcctgggtaacagagtgagactctgtctcaaaaaaaaaaaaaaaaaaattacagcacagtgagataaaggcacaagaggtcatggaagcagcaagaaccagctgaacttggggtgggaggtaatgtttgaataatttctcagttctaaaggaagagaaggtgaagtttgagcagcagggattacaggtaagctttcagatgagccagattgtggctgggtgcagtggcctacacctgtagtcccagctacttgggaggccaaggcaggaggattgcttatgcccacgagttcaacatagtaaaacactgtctcacaaacaaacaaagaccaaaaacaggctgggcacagtggctcatgcctgtaatcccagcactttgggagaccaaggcgggcggatcacctgaggtcgggagttcgagaccagcctgaccaacatggagaaaccctgtctctactaaaaatacaaaattagccaggtgtggtggcgcatgcatgcctgtaatcccagctgctcgggaggctgaggcaggagaatcacttgaacctgggaggcggaggttgccatgagccgagatcgtgccattgcattccagcctgggcaacaagagctaaactctgtctcaaaaaaaaaaaaagaaaaaaaaccacacacacacagatgggctattctggggagcagctagcagtttagtgcagctggagtgtggtacaaaagtactatggtaagagaggctgccgaaagcatacgcggggtcattttgtaaagggtggtagcaaaatgcaggaagaggaacatgagtttaagtccaagctttgccacttctttactctcttggccaagttacttctctgagccttaatataaaataatatatacttcaatatagtaatacattatctcacagtataatacaattatcttagaattgtttgatgattaaatgtaatacagtatctggtgcagaattagggcttaaaatatttacttttttttctttttttttttttgagacagagtctcgctctgtttcccaggctaaagtgcagtggcacgatctctgctcactgcaagctccgcctcctgggttcacgccattctcccgcctcagcctcttgagtagctgggactacaggtgcccgctgccacgcccggctaattttttgtatttttaatagagacggggtttcaccgtgttagccaggatgatcttgatctcctgaccttgtgatccgcccgcctcggcctcccaaagagctgggattacaggcgtgagccactgcacctgcccaggtcttaaaatatttctaaacattttggacattattttcttgttttattgttcagatggagtcttactctgttgccttggctggagtgcagtggcgcagtctcggctcactgcaatctctgcctcccaggttcaagggattctcttgcctcagcctcttaggtaactgggattacaggcatctgccaccacacctggctaatatttgtgtttttagtagagacttggtttcacctgttggccaggctggtcttgaacttctgacctcaggtgatccacctgcctctgcctcccaaagtgctgggattacaggtgtgagccacagtgtcaggcctggacgttattttctgagtgatatattaaacaggagagaaagaggattggattgcattttggaacactcactgagagcggtgtggagaggagagcatttggggatattgtagtcccagagctgcatagtcccagaggagacagctcgggggaacttgagtttggtaactcactggatatgatggagggagagagaagattcaagaagcaccaagacttctggttagaatgacaaagtggatggggcctgcaagggaggaatgggtggtgtggggaggggaacacgatggagattaggcgtttaggtttggacatccacatagagatgccaatggcagatagaattttgggtctggagacagaatttgtagttgttggaactgaaactgggagaggttgcagtctctcaagggggtgtggaatgtgaaaggtagagggctgaagaaggaatcccggaatagctgaggaggcaaagaagggcaagggagatagccagcatggaaaggaagaaagagggagtgtgtctagcaaggtcagaggcactgggaagtcccagatactgatgactgacatcagctgcaggagtgagctggtggtggttaccgagagtgatgtcagtggagtggtgggcagtaagtgtgaagaggccaggaaggtggtgagtgagatgccttttaaatagtgagcagaggtagaaaggactacatttcagctaagcatccatagctggcttcagatataaaaccttgatgtgccattaaaaaaaaaaaaaaaagaacccccttctttcagtgcaccgctcttcaaagtgtggaatgtggaccacctgtggcacaattgcctggagcacattagcccagccttctcaataagagtgagagtgtgtgtgtgtgtgtgtgtgtgtgtgtgttctgggactctgcatttcaggtaagctttctagtgattctagtgttgacccaaggctggagggcctctgttttaatgtgagctccttagctgtccccttgaattcccagaaagcgtggcagggcctgcctagttctgggtgctcatcccgaccccgcctgagggttttcagtgtgtgaattactgcagtaggaaatatggagaagtgattctcctccctttactacggtattggtgaactctttagttttccctgatgatgttaagtgaacgtgcccagtggggtacctgtcacatatacagtgggtgtatgtgagtgcttctctttccccggctgctctccctaataccgcatcagtggttatctccaggcagagatgtaggccaggttaggtcaagtattaggcagattgagtctgagtttttcctgaggaggaaaatgtgtagtgtatagcaagatcaagatgctagtggctgtggaattactgtgacagggctaactgccgagaccagctcggtcgtggagaccctaacccagtggcgctagaggaattaaagacacacacacagaaatatagagtgcagagtgggaattggggggctgacagccttcagagctgacagccacgaacagaactttacctacatatttattgacagcaagccagtgataagcattgttcctatagattatagattaaaacgggaaacaaagggatgggctctggctagttatttgcagcaggaacatgtccttaaggcacagatcactcatgctattgtttgtggttcaggaacgccttaagcgaaagccgccctgggtgggccaggtattccttgccctcattccagtaaacccacgaccttcagtgtgggcatcatagccatcaacgagcatgtcacagtgctgcagagatttgtttatgaccagttttggggcctgtttttggccagatttgggggcctgttcccagcagctaactactggagcatttttaggtctgagaacatctttctctgagacttttttctgcagcactagagaataacagcttgaaactctattaaaataaagtggccaggtgcagcgacggatgcttgtattgtagttctgctgaggcaagaggatctcttgagctaaggagttcaaggctgcagtgcccaatgattgaggctgttcatagccactgcactacagcctgggtgacataacgagaccctgtttctaaaaataaacaaaaaaataggccaggcgcagtagctcacacctgtaatcccagcactttaggaggccaaggtgggcggatcagttgaggtcaggagttcgagaacagcctggccaacatagtgaaaccccatctctaatgtaaatacaaaaattagccaggcgtggtggtgagcacctgtaatcccagctacctgggaggctgaggcatgagaatcacttgaacttgggaggcagaggttgcagtgagctgagattgcaccactgtactccagcctgggtgatggggtgagaccctgtctcaaaaaaaaaaaaataaataaagataaaagacaaccaaaaaatagtttaaaatagatgacacgtttgttctatctgtttagcaatgtgtttatatatgtgaatactcttgtgtgttgatgtgtatcatgcaaaggttactgacttttttgttttttaggtcatcttatgcagatatgctacatgacaaagacagagtaagtgtaaaaggaaactattatcttgatgtggggtgttttgaagtcttggattacaagaaggttaagaatccctgggggtcatgatgttaaatgatactgagaggcgtatggtgtagaagtcaggaaatcagttgggagactgggtcctacttctggctctatttttgttgtttaatctcccagctttatcaagatagaactgacaaataaaaatggtctatgtttatggtaatacaatgtgatgaatatatgtgtatggtgtaaaatgattgaatcaagctaattaacaaatctaccgcctcatacttttttgtgtgtggtgagaacatttaagatctactcgcttagtaatttttaagtgtacattattaactatagctcacaatgccgtacagcagatctccacaacttattcatcctatctgactgaaacatcagatcctctcccttagcaggtaccattctctgggcttctgagttcaacatttttttttttttttgagacagaatctcgctctgtcactcaggctagagtacaggggcgagatctcggctcactgcagcctcagtctcccgagttcaagcgattctcctgcctcaacctgcctaagtgttgggattgtacctagtattgggataatactattattatactattatacctagtattgggattataacttgggattacaggtgcgtgccatgacacctggccttcactgtagttttaatttccatttttaattttaattttatttttttgagactgggtctctgttgcccagtgcagtggtgtgatctcggctgcactgcagcctagacttcttgggcttaagcgatcccccaacctcagccttcccagtagctgggactacaggcatgccaccatgcctggctaatttttgtatgttttgtagaggcagagtttcgctgtattgcccaggctggtcttgatcccctgaggtcaagtgatccacccgccttggtctcccaaagtgctgggattatgggcatgagctactgcgcccggccatcgtgtgcttgtttaccatgtgtatatctttgttctagtctagggttatgaacataggtgtgattcttgatagacactgccacattgccttcaaaaagggttccagattcactgtaatatcttcaaaactgggtcattaaaaagtgacagctaatttaatggcatcgttaaagtgaaggctgtgccatccctggtttacaattgaggacgctgttcatcaattttttttaacttaaaaaataaataaaacaaggccaggcacggtggctcatgcctgtaatcccagcactttgggaagccgaggcaggcagatcacggggtcaggagatcgagaccatcctggctaacatggtgaaaccccgtccctactaaaaatacaaaaaaaagccgagcgtggtggcgggcagggcctgtaatcccagctactcaggaggctgatgcgggagaatggcgtgaatctgggaggcggagcttgcagtgagccgagattgcaccactgcactccagcctgggcgacagggagactccgtctcaaaaaaaaaaattgtggtaaaaacacataacataaacggtcatactgattgtatctaagacataaatgcacttactttgacaatgaaatagttctatatttctgtgaaaaattatttcacccagactaaacatttttgtgctttacctcagaggcaacgtcatttcttttttttcttttttctttctttctttttttttttttaacaagaatgagtctccctctgttgccaggctttagtgcagtggtgtgatcttagctcactgcaacctccacctcccgagttcaagtgattctcctgccttagcctcccaagtagctggggttacaggcatgcgccaccatgcctggctaattttttgtatctttagtagagatggggtttcaccatgttggccaggttggtctccaactcctgacctcaagtgatccacccgcctcagcctcccaaagtgctgggattacagatgtgagtcactgcacccggcctggtaattctaaagaatattcagttctagatattttctaattccagtctgatttagtcttttgcctatcagtttagaagtgtgtttcttaatgtatgaaaaattttttttcttcagttgtgtttctgatattaagatttttgacttgttttgcattgtggtcagaggatatcacccttttgatgccagttctgtattagctgtctaatgttatttaacaaattaccttaaattttaatagcctcttaatatttcttactaacttggcaggtcatcagtctatttaaaagatttgcacatattttttccatcatctttagttattttcaacagaagggtcactgtgcctattgagtcagaccgttatagatgaaagatgtatgtgtttactaaagacagaagtaaaaatcttcaagatgcaaagaagttattttctgatggggaaaatactttttagtgaagctctctgagttagagtcggtaaaggaaaacaagccatacatattgcagcagagcggctttaacacaaggagctggctacccagctgtgggagggctagaaagcaaatgggaacgctgagtaacctaacagtagagattgcagggagcagttaccttgcctagggctgagaaactaaacgagaagattaggatttccagaagccacaagcattgaggagagatcctgtggaccactgtccaagtacggctgcagctctgaggggcccaaggagctggttatgggatcattgggaaaagttggagtctgcaatcaactgcccctaccgagaggaccctgatgagaacagcagcatgcagaaaggagcaagcctgctctgtcctcctaccttccagtcgccctcttggtcccccttttggctgtacctaacagttggaaaaaggagaacatggtttgcagggctctggcatcacttagtagaggatagaagagtgagtgtggagcagggacagtcgcttaataaagggcaaggggctgactcacaagacctgcccaactcagccagagctgttctgccaggggccagaaaggccatagggccctgacttgcactgccactgccagctgtgactctagaactttgcaaagcacctttccacttacttataataactggtagtaagtgacggccatgtcttccttagaatgtaaaatactaccaaggtatccgggctgccgtgagcagggtgaaggacagaggacagaaggccttggttctcgacattggcactggcacgggactcttgtcaatgatggcggtcacagcaggtgccgacttctgctatgccatcgaggtaagccattcccttcaggtgtgtgtcctgcatcttgcatgggaaatcccctatgctcttgcactttccccgtctgttccttcacaaacattcatggagtgctcactctgtgccaagcacagagccaggctctgagcgtatagagatgagtcagacacagttccttcctccaggagctaattttctcctctgtcagcctaggctgcacatcagaatcactaggagctttagaaaatacttacaggctgggcacagtggctcacgcctgtaatcccagcacttcgggagggtgaggcaagacaattgcttgagcccaggagtttgagaccagcctgggcaacatagtgagatcccatctctacagaaaaacttttaaatattagctgggcatggtggcatgtgcctgtgttccagctattcttgaggctgagatgggaagatctcttgagcccggaaagtcaaggctgcagtgagccatgatttggacttcatgtaagaaagcaaaaaattacttctaccttgtttaagccagttattgtgggactttgttgtttccaactaatcagtatatgaactcagttttgtaggggaaagtatttaaatacatgcccccacaccaccacactccagcctgggtgacagagtgagactttatctcaaaaaaatcaaaacgaaacaaaggctgggcacagtgtctcacccctgtaatcccagcactttgggaggccgaggcttggatcatgaggtcaggagttcaagaccagcctgaccaacatggtgaaactccatctttactaaaaatacaaaaattagccgggtgtggtgatgcgcgcctgtaatcccagctactcaggaggctgaggcgagagaatcgcttgaacccaggaggcagaggttacagtgagccgagattgcgccactgcactccagcctgggcgacagagtgagactccatctcaaaacaaaacaaaacaaaaaaaccttatgcctagtccccagccctaacagattttgatttaacttttctggggtgaggcctgagccttgggacttgggaatgtgcggcaaggttgagaaccactaccttaaatgtccctatggagtcagctctcttatgtttaccaatttgtcatttctttaataaaacattaaacagcttgagcccacagagcaagaaaaattaaaaaccaaacaaaattaaaaattaaacatgttatttttctcataaaacaaataatgcatattattataggaaatttggtaaataccaaataaaaatagtatgttgacccaaagttaagtactgttaacattttggtgtatattcttccaagttttgggggcaggcagggagcatgtatataaatactttccctacaaaattgggttcatgtagtgattgagttggaaataacaaagcctcaaaatcactgtggtttaaggtagagtagttttttgctatctttttcgtggcgtgatctctattcaccgcaacctccgcctcctgggttcaagcaattctcttttctcagcctcccaaatagctgggattacaggtatgtaccactgcacctggctaatttttatatttttagtagagatagggtttcgccatgttggccaggctggtcttgaattcctgatctcaggggatccccccacctcagcctcccaaagtgttgggattacaggtgtgaatcactgcgccctgccttgttcctcttttttaaaagtaagaataactttcccaggaatttctattatagcaaacctctccttgggtaccatcggctagaatgaggttaaatctcatttcttatctctggcaagagggattcagttactcttagctcagacaagtgcaccactgcaaaggtcagttccccacgctgcaccctcacctgatttcaggggagaggaggacacagaatggatgtcgggaggtcatcttcagtgtccactcctggtagtgttttgggtgagatcttgagcttcttgatgggctgaggagaaggaggtgtgaaggtaccagcttgcaggttcagggagaggtgactgatgagtcagaaggcagcaggggtgagggacgacactggctttggatattgtcagggtggaggcaaagtgattggtgagaactagggtttaaggccctcaaaccacatctaaaaacatcaaggcaaatcctagaaataatttgaaatagatgatgaagatttttctaggagaacatgtgtgtgtattccatgtaaatactgcgcgctaatcaattgcacaactggagctgctcacgtaagtactctttacgaaaggatacagcatttgtcccttgattatagtaaaaaatatagtattcatggtagaaaatgtgggaaatacagaaaaggatttagaaaaaaggaaaatcttatcaggaacagtctcggtatcattttgtggtttccacttcgtgtgtagggccacacgtgagtctgtttgttttacatgctagagctcttggggctgtggaatctagactggataagttgaaaacaaagagttggaggtgcttatttatgttcagggaaactcgaagagttcagggaagacttctggatgggggattcatgctgccctgggaagtggggtttgatttggcaggtggggccaggatagggaaggctcagtgatcatgagatcattgtggctggagtgttggttgttgggggaatgggggaggaagactgggaaggtaagggagggcctccaaagcagtagtttccccttatctatggtttcacttttcgtgatttcagttacctgtggtcaactgaggtccaaaaatactaaatggagccaggtgcggtggctcacgcctgtaatcccagcactttgggtggctgagacaggtggaaaccttgagtcccagagttggagaccagcctgggcaacatggcaaaaccccgcctctacaaaaagtagctgggcatggtgatctacgcctgtagtcccagctacttgggagattgaggtgggaaattgcttgagcctgggaggtggaagctgcagtgatcatgccactggactccagcctggacaatagagtgagacccttctcaaaaaaaaaaaaaagaaaaattaaatggaaaattccagaaattatttataagttgtaagttgtgtaccattctgagtattattacataattgttctatttttagttattgttaatttataaattattatttatatttattattgtgcctaatttataaattaaacctggtcataggtaagcttggaggctgaagcagctccactgtgaatgctaatcctccacgctgacttctgaccaaccccagcttcaggaatgcctctaaaatttccgctctcatgcactttgatgtaaatcctgccctcaggtcagaacaactttgatgttatcataaatacatacttaccgtaaatcctgcccttcgtcaaattccctgtggtatgtaagccctgcgtctgagccataacagtgtgggggcccagtttctcactgcccgagacaaggcttctgtttgtatgtctctataaagtgtgtctttctgagaagctggatttgccagtctttcctcagcctctcagctcccgtggcctgttggggtaggtttgcatagagctgcccaccatggaacagtatgtatgtatagcaaaaaaaaaaaaaaaaaaaaaatggtatacataagggtcagtactgtctgaggtttcaagcatccaccaagggtcttaaaatgtatcccccatggacaagaggcactgctgcaccataagaaaatagaggctgtgttctgccaacagtggggatttgggacaattttgagcccagaggatgacctacttactcacacctacagtctgctctcctctggagggcacagcacgcctcccaggttcgtgaggcaagtccctttcctggctttttggcgtcctcttgtgcggtactgacacctactgctcttactaagtagtgcagcctcctcaggatccccggcatccccgctgtgcctggcacggaatgagagtccctaatcacaagttaaagccagctgaatctcagccctttttcatgatgcacatttggagaataaagtatttaagttacatatcttaggaccagaatcaaggaatagcttgctcaccttaaaggtcagactactgtttaatttattgctcatttttccttgggtttcggctctattttctaggttttcaagcctatggctgatgctgctgtgaagattgtggagaaaaatggctttagtgataagattaaggttatcaacaagcattccaccgaggtgactgtaggtccaggtgagatttacacaccctgtgttgaaagctttgcttgctcttgtgtgagagaggaaaagggttattccagttacctggaacaaatccaggtcatagcatagaagtgggacctctctgtgtggagctctgacagtaaggacttggtttctcttgatgtttattttcctgctagttaaaactagtcaacaaggagtagactagagctagtcaggtccagcaatggagacgcaaacaaaacctacatttgctttaagcaaattggaattcttatggggctcaactcttgagtttcaactaccaataattacgccttggataaacctcattggctacgatactgccactgctcaaagctcaactctgagtttcatcaggcagaaagtacttagttcttttatttatttatttttttgagagagagtctcactctgtcgcccaggctggagtgcagtggcgctatcttgcctcactgcaagctctgcctcctgggttcacccatcctggctaacacggtgaaactctatctctactaaaaatacaaaaaattagccaggcatggtggtgggcacctgtagtcccagctactggagaggctgaggcaggagaatggcgagagtagttctgacattctgcttctgcatacaacatgaacaattttcctgtatagcattgtctcttaaggtttccagaatatgtatatgtacacacacacacacacacacacatattttttttttgagacggaatctcactgtgtcacccaggctgcattgcagtggtgcaatcttggctcactgcatcctccacctcctgggtacaagtgattctcctgcctcagcctcccaagtagcggtgattacaggtgcctgccaccacacctggctgctttttgtatttttagcagagacggggtttcaccatgttggccaggctggtcttgaacccctgacctcaggtgatccgcctgcctcagcctcccaaagtgctaggattataagcgtgagccaccatgcctggcctccagaatattttttatagtctagaactttgtttcagtctttgaaaatttcacatgccactgacacttagagaacatagttgaaagatttgcaaaggaaaaactgtggtgaagttatggataacaccatgggttttttctaattttttgtggagatagggtcttactatgttgcccaggctggactcaaactcttatgctaaagtgatcctcccatctcagcgacccaagtacctgggactacaggtgtgcactactgcacctggctttttcaccacggttttggagaatgcagtatcattctgaattgaagcttctacctaaggtcaacattattctcccatttaacaatttttttttaatggagaatctgaaacatgtacaaaagaagtgggtactatcttatttatttatttatttgagacagagtctcactctgttgcccaggctggagtgcaatggcaggatctcagctcactgcaacctctgcctcccatgttcaagcgattctcctgcttcagcctcatgagtagctgggattacaggcgtgcaccaccatgcctggctaatttttgtatttttagtggagacggggtttcaccgtgttggccaggctagtcccgaactcctgacctcaggtgaccagcctgcctcggcctccgaaagtgctgggattacaggtgtgagccaccgcgcccggcctatcttttttatttttaaaatatacaatagagtgctcaaatcattccatttacaatcaacgttattgaagtatgatttacattaaatgaatatccattttcattatggatatttgacaaatataaacacacttgtaaccaccatcaccataatgaagataatagaacatctccatcatgcccaaagagattcctcataaccctttctatcagtccccccatatcctggtcctaggcacccactcatagacttcattatagattagatttgcctgtctaggatttcaaggaagtggaatcaaagaagtgtggactcttctgtgtgtgtgctctcttttttatagcgtgatgctggtaagattcttccacactgttcatgtcttgggggtccgttcttttgtgttactgagcagcactctattagatagatgtaccataacttgtttatctctctacctgttgatggacagggatttcttggataggtctttagattcactgatcttttcttttgcagcatctaatatgctgttaagtatatttagtaaacttttcatttctctttctttgttgttcttttttttttttttttgagacaggatcttgacctgtcccccaggctggagtgcaggggtgtgagcatggcttattgcagctttgacctcctgggctcaagcagtcctcctgcttcagcctcctgtgtagctgggaccacaggctcatgccaccatgcctggctaacttaaaaaaaatttttttttgtagagatgggatctcagtttgttgcttaggctggtctcaaactcctgggctcaagcgattctcccacctcagcatcccaaagtcctaggattacaggcgtgggccgctgtgcctggcctcatttttgatattgtattttttaatctctgaaagttccacttgattctttttcataacttccatttttctcatgttcatagttttctataagcacatttattttagctttttgaacatccttatcttctgttcccaccatctttgttttttctgggtttgttctcttgactcatttttatccttattctgggtcacattttccttcttcacatgtctaaccatttttgtttggatgctgtggctatttggaattccccattgttgagtgctagacttcgttggttttgctttttaaactttggcatgcagttgggttacttgcagttcagattgatcctttcagggcttgtttaagctttctttggagtggggttagagtagctttaagtcaggccttctcaacagtagtgctgtgacgttttggcattctccaactatgtgacattttgataattctttgttgtggaccctgtcctttgcattgtaggatgtttagcagtgtccctggcctcttcccagtggatgtcagtagcactcccctcctcccaccattcttgccaactaaaaatgtctccagactgccacgtcttccttggtctcgagtgtgtaaaattgccacctgttgagaaccactgctctaaggctgtttagccagacagttactgtaacctttctggagtgtctgctgagagctctaggtgctcagcagggtttcccttgtctggctgatcagaacttgaatgtttcccaggcctctgagagctccggagattgttatcactcatgcaacctttgctcggcttcacagagtattaccctgtgtgtgtgtgaatgtattaacacagaccctagaggaaccctgtgcagcattctgaaggctttttttctgtgtaatttcctctctgattctctgcctggcaagttccagctgcttccacttccctgaactcgtttcctgtctgtttaactcagcaagactgccgtgctctgtgtcacctcttaccctatactgtggtctggaaagggtctcctggctgatagccagagcagggtaagggttacttggtttgtttcccttcttagggagcaaactgtgttgcctcttgctcaacatctgaaaacacttgtttcatatattttgcccagttttctagttgataacagccggagggtaagcctgatcccacttattccactatggccagagtggagattgattcatttatttatttttttttgagacagtctcactctgttgcctaggctggagtacagtgatgcgaacacagctcactgcagcctcgacttctgggctcaagtgatcctcctgcctcagcctcctgagtagctgggaccacaggcaggcgccaccatacccaactaatttttttgtttttttaaatttttattagaaactaagtcttgcggctgggtgcagtggcttatgcctgtaatcctagcactttgggaggccgaggctggcggatcacctgaggttgggagtagcaaccagcctgaccaacttggagaaacctgtctctactaaaaatacaaaattagtcaggtgtggtggtgcatgcctgtaatcccagctactgaggagattgaggcaggagaattgcttgaacctgggaggcaaaggttgcggtgagccgagattgcgctattgcacttcagcctgggcaacaagagcaaaattctggctcaaaaaaaaaaaaaaagaaaagaaaagaaactaggtctcgctttgtttcacaggctggtcttgaacgccaggcctcacacagtccttctgcctcagcctcccaaagtgctgggatcacagatgggagccactgtacctggcgagatcatttattcttgaaaatttatccattttgacggcagggagactgatctgcagggcagccttggccatgaagtatgctgactctgcctccaggcagcattgttcacacacacctcagcttaggccaggcccctcatatgatttcttattaaaaaaaaaaattttttttagatagagtggctctgtcgcccaggctggagtgcagtggcatgacctcggctcactgcaacctccacctcccggattcaagtgatccttccacgtcagcctcctaagtagctgatattacaggcatgcaccaccacctggctaatttttgtatttttagtagagatggggtttcactatgttggccaagctggtcttgaactcatgacctcaagcgatctgcctgccttggcctcccaaaatgctgggattacaggcatgaaccaccacgcctggccaatttcgtaatacttttcttcatagcgcttaccactgcaatcattaaatcattatgtagttatgtatttaatgtctgtatccccacccagctgaggcatcctgaggtcatgcactgcgtgggttgtattaactattccattccgttatttgctccgggcctgtcatgtaaaggagttaggtaatttttgtaaagtgagtagattgtcagttgtgcttcatccataatcccttgtaaatgtgactttgtttccgatcctcagcctgacaagtggcttcctcattgccaagttgggtggtctttcctctgcttttcctctctaaccactgccgctttggtacttctgccattccttccttcttgaaactctccctggaccttagtgacatctcttcatcttggttctcctgtgttgctttctttctgctccagatgtatactttccaaggttctgctctcagccctttttaaaagtggcatctgaagttgcctgttccccagagctgggttacatgctgaggcttgtggagagccaacccagggagcagcgtgtgttcatccgtccattttgttcatttggaaagggcttaggaagctcctggggtggctacctgcttcagactcccccaccccgtgcccttatacattagcagtcacactcaaaataccaggccctcaagaagtacttgttaaaatgcactggaccataaagcttgaattttttttttttaatttttattattttttgagacagtctcactgtatcacccaagatggagtatggtggggcaatttcagctcactacaacatctgcctcccgggttcaggcaattctcatgcctcagcctcctgagtagctgggactacaggcgcgtgctactacacccggctaatttttgtatttttagtagagacaaggtttcaccacattggccaggctggtatcgaactcctggcctcaagtgatcagcccagcttggcctctcaaagtgctggaattacaggtgtgagtcactgtgcctggctcttgatttttattttaatgaagcaatttggactataaagcattttaagttatataattggtttaaacattcaggagatagaattggcagagtgggtgatcagtgggttgtagggtgacagaaatcaataatttatctaatgtgtgttgactgttacggggcactagaccttgtgggtgctggggtacagtagtggacaggcagtcagcggtcctgctgtcctggaactagtaaatgatgcccagattcctggactatgtgactcattgattgattgaggcagaaaccctggagggaggagcaggcgtgttagctggggtgggtgggatgagttttggacagtgtattccagttggagtttgatgtgacatcagagaggatgggcagggcttctcgggagggtggtctctgtggcagaagacagaagtttcttcttaagctcctccacgtgatactgtcatggagcacaggtgagcttcataggaagtgtgcttttttttttttatcttcatcatcccgaccaccaccacatgagacagagcccattcacccgttttactgatgaggcaactgatggtcagaacggagggctcagggataggaagtgagatccaggccaggctccagcctcgagctcgaggttcacgctgtctctgttgtgctcttctatcagctgctctctttcttttttttttttttttgaaatggagtctcactctggcccagattagagtgcagtggcgtgatctcggctcactgcaacctctgcctcccaggtttaagtgattctcctgcctcagcctctcaagtagctgggattacaggcacccatcaccacgcctggctaatttttgtattcttagtagagacagggtttcaccacgttggccaggttggtttcaaacttctgacctcaggtgatctgcccatctcagcctcccaaagtgctgggattacaggcgggagccaccgcgcccggcccctgtcagctgctttcatgcttctcttttccttgtgtcatctgtgagacttgtgctctgtgtaggggaaatgagtgggctttgtcagattataattcatgaggcattaaaagtgtttacagttaattctccctgatgaatagccccttccaaagtctattttggctcttggctcattaaaaattataattgtagaagtagcagtacattactgaggtttagaaaacagttaacagaagatccctcccaaatcctactcttctctaaaatcctactgtcctaaaacaactgttatttaagagattgtttggtgacaaggcgctttcattaagggaatttgccatagtgatctggggattctaagtcatggatctcaattttggctgccagagcctaactcacagtagctggaagatcatcagagaaccttgttgtcttgctttggctttccctccctctccctgcaacctagaagtatttgacataccagcattctgtttttgcttttcaaataatttttctaatttagtggttaatagtttaattgttaatttatatctctctaattgctaatagggatgaaaaagttttcataagtttgatttctgttttgaattttctgtttatatttttacctggtttctttttgggtgtgtgttttttttgtttgtttgagacagagtctcactctgtcgcgcaggctggatcactctgtcgcgcaggctggagtacagtggcacaatttcggctcactgcaacctctgcctcccaggttcaagtgattctcatgcctcagcctcctgggtagctggggttacaggcgtgtgccatcacacctggctaatttttgtatttttagtagagatggggtttcgccatgatggccaggctggtcttgaactcctggcttcaagtgatcctcctgccttggcctcccaaagtgctaggattacaggcgtgagccaccatgcctggctaatttttgtattttttgtggaaatggggttttgtcatgtttcccaggctgatctcaaactcctgaactcaatccattgggtatttatagttttcttatcattttttgcagtctccctcccaatattaagcatacagaatagctgtaagagcagtacagtaaacacttatgatcccttaccctagatttatcaattagcgttttgtcatacatttacatatggattttttttttttcctgaaccattggcaagtcagttgcagacatcctgacacttctgaatacctcagcatgtatatgtgcttttagcgtgatggccccttaaccacttatctttcccatatttgctgtaaatatttttcctagtctgttgcttatgtccaactctgttttcttgtgtttttcagagggtgacatgccatgccgtgccaacatcctggtcacagagttgtttgacacagagctgatcggggagggggcgctgccctcctatgagcacgcacacaggcatctcgtggaggtagtagacggagggctccctcagacgtgtctgtggtctcagccagctcacatagcactcactcatgcaccgtgtcccacacagcccaagccctcagcacctctgatacacctgggacacccctccattcctgggggggctctggttctcctcacttaaaactttcatgtcccttgaatgccaaatcttaataggttagagttgaaaagcaagaaactatattcaaattcagttaagttcagcaaatattctcaggaaggcgatgcttgagctgtcagtcttgagaagtgatcaggtgttggcctggcagatggaatatttctggtagaggagagcagcacgtgctagacgtgagactgaatcggtgcggtggctccggagcctgctttggattttgtgctgtgtgggaggcaggagagatgggcttagcaactgaggctagagagctgggcaggggctagatggagtggggtttgggggccatgcccagagggtagctgtcattagaaggtggggtggcatcacaggagggtttgaagcagaggattgacagcagacttatgcaggcagatgtgtggagggcagttggggtatagggctggaggttgcgggtgggttaaaaggctgtggaatcgtccagacgctgtggtacagtgggcctcagctaaggctgtagacagaggcctgataggtggtcccaggagttggtggtcccttaggtgtagagatatcgatgctagggtttgggcacctggattggatggtggtgcttcctgttgacggggagtgcaggaagaggggtagccttgggaaggttgggaagtggtgagggcgattcttctggtttacacagagtttgagctctctaaaggtcagccaagcaaagaggcccagagatgcatggatttactcagtgaagagggcatggttgaggtcactgtggagagtgtggagggagacagtccggaccagggagtccccttgtgaggtggggcggaggaagcacagcctggggaaggcagcgggagtgagtccagttagagcagcatttgtctaccagagcaaggttgggagatgcttcgcagggaggccagttattctgctagccttttaccatgcccagagcaacccctacagcagagaatcatttggcccaagaggccagtggtgtcctggtggtgaaagccatgtgggtagcagctgtgagtgtgctcttgccgggtccctattgcctggtgcatggaggacgtggagtggatgcaagaggtaggaggagagccggacaaggagccggagccggagccacagccctaggggctgagtgtgcagcagtgcccagcggcgctagagggctgggcagctgagggggcaccgtggtccacagggctttgccacaaggaggctcttgttttggtgctgggcaggagcggcactgaagggacactgagcccagagccaggatcaccacccagcagcaggacgtgaagcatttaagagtgccaggtagccaggaacttagctgacagaagtcattttaggcacagtgtgtgttctttttgaaatgtagtaccctttttttcccttttccaagggcatagggctgaaaacagttcactattctaatagtataaggtgttgggcattactgaaccaacctaatgttaaggaataaacctcttttgatcaatgggaattactgtgggtctaagcatctgatttttgtttggttttgtttttaatataaacttaggaaaattgtgaggccgtgccccacagagccaccgtctatgcacagctggtggagtccgggaggatgtggtcgtggaacaagctatttcccatccacgtgcagaccagcctcggagagcaggtcatcgtccctcccgttgacgtggagagctgccctggcgcaccctctgtctgtgacattcagctgaaccaggtgtcaccagccgactttacagtcctcagcgatgtgctgcccatgttcaggtaccaaggagccaccataggtgatggcgctttgagacatttgatggaagttgggtattaggaggttctttttgagtgggaaggaaatctagctgctgtcacctgcctcgaaggcaagagtcctttgcagccaaatgtcattgccagtgaagtcactgtaaaagcttaaaaaatggagtgtgtgaggttaaactctgcttacattcttgaatattattcctcagcatagacttcagcaagcaagtcagtagctcagcagcctgccatagcaggcggtttgaacctctgacatctggccgagctcaggtggttctctcgtggtgggacattgaaatggaccctgaggggaagatcaagtgcaccatggcccccttctgggcacactcagacccagaggagatgcaggtaagaggcaggagcctagcatgtgccctgtcaggaaacttgtccactgctgttcatgggaaagtaacagttgagccttggacccaggagaatttagagacaggagggctgtgtcagaatcaaagacaaaagtttttaaaaagcaagcaaaggctagctgtagtaacgtagccttcccagggtgagctcatggtgagcactcatggacacagtgaggaacagagaagttggctttcctctcccgcctcatcatgatgcagccacccttagataccacccctcatcccctgagtaatcccagggggctcccatcagcttggaatagagaactacagcctcaccttctgtggcctcaaaatctcctttctccaccccgatagaaagtaggcagaggacatgaaacacagaaaaggaaatacagatgatggggatagttgcccactgtccctcataataagagaaatgcagttttagctgctcacagcacctatgctcccagcctctcaggagactgaggcaggagggttgcttgaacccaggaagttgaggctgcagtgagtcgggactgcattactgcactcccgcctgggcaataagatgagaacctgtctctaaaaaaaaaaaaaaagagaaatgcaactttaaactgcaatgagatctcattttcacctactagtgaataaagtttaaacagtttgcaagcacactgttggggaagctcagggaaaaagcaggaaagcgagtcatcagaacgtttcaggtagaaagcaatgctgctttcagacatggggctgtggctggatttgcgtctgtgcagaatagatgtgtgcagccctggtttagtagaaaaaggccaacctaaaggccactagcagggatcaagtccattatcctttcagtgggtgaggtagctctctgtgcactgatgtgggacaagcttcagggtggattattacctgacacaaaaataaaggtgcagaatggtgtgttgtgtggcagcactggtgttagtaaaaataggaatatatgtgtttgtgagtggatagtcatgtgtggtgtacatataaggaggtctttggaagaattcccagaaattcgtaaaactgactgcatctgggaatggggactggaggttaggggtggaaaggaaacatattttttactatgcgtccttgtataccttttgaattttctctcatgtgcttgtgttatttacacccccatccaccctctctcactctcacactcaaaggaaaagaaagtgggaaaggtgtgtcggaattgcctgatgggttcttcccacccactgttcagacaaaaccaattcgctgacaccatggcattgcaataaagactttaattgacacgaagccagccacaccacgtgggggagagatttgttactcaaatcagtctccctgaaaattcacaggctacggttttttgtttgtttgttttgagatggagtttcgttcttgttggtcaggctggagtgcaatggcgcgatctcagctcactgcaacctctacctcccgggttcaagcaattctcctgcctcagccccctgagtagctgggattacgggcatgcgccaccatgcctggctaattttgtatttttagtagagatggggtttctccacgttggccaggctggtctcaaattcccgacctcaggtgacctgccccaccggcctcccaaagtgctgggattacaggcgtgagccgctatgcccggctcaggctagggtttttcaaggatagtttggcaggcgagggagtccacttctgggtggagtcatcagacagaaacgtaaaaacccgaaaagacatttcaaagggtcaatcttagtttctgcaaggtggtgttatctgcaggaggaatcagggaaggttgcagatcttgtgacctaacaatggcttcaccttagcagaattcagcctcctctcatcctcctaacctgatgatctttcattcagtttaagtttaattttggggaaggacggttatcatttaaagtattaaccagctgggtgtggtggctcacgcctgtaatcccaacactttgggagccccaggtgggtggatcatttgaggtcaggagttcgagaccagcctggccaacatggagaaaccccacttctactaaaaatacaaaaattacccggatgtggtggtgcgtgcctgtaattccagctactcgggaggctgaggcaggagaattgcttgaacccaggaggtggaaattgaagtgagctgaggtcacaccactgcactcaaacctgggtggcagagcgagactctgtctcaaaaaataataagaacaaaaaataaactgttaaccaaatgtctcccaaagttagcttggcccggacccaggaatgattaagggcagtttggacattaaagcaaaatgggggttggttagatgagatctctttcactgtcataattttctcactttttcgcaaaggcagttttggtttcaggaccaagaaatagaacctgtctctacccaggagcgcctcaggcaccatcctttgtccatggtccagcctgcctggccttaacccctggctttgtgttgaatgctcacctgctggttctaggtgtccacaacattatggaaggccttagcagcttcacctaccccattcccagagttactgtttaggccgaagggttgtgactgctggggaattgctgtcaatcagcgtacccataccgacagcagcatgtgagactaagaagtatgtgagcttcctagtctcccctccaccttccaggtgcctggccccgggtgtgtgtgtgtccagccagggcctgccagcatccctctgcaggctgtgtgtgtgtcactctgaattcacccacagagttgagattggcaccgcgtcacattcttcctaagactgtgttgcagaattagcataagaatagcattaaaatgttagtacttttggccggtggctcactcctataatcccagcacttgggaggccaaggcaggtggatcacctgaggtcaggagttcaagaccagcctggctaacatgttgaaaccctgtctctactaaaaatacaaagaaaattagccgggcatggtggcaggcgcctgtaatcccagctacagggctgaggcaggagaatcacttcaacctgggaggtggaggttgcagtaagctgagactgcaccattgccctccagcctgggcaacaagagcgaaactccgtctcaaaaaaaaaaaaagttagtacttttaatttgcatatcttcggagcgctactatgtattttttctccttgaatcctcttagtagacaaacaaggtaaccacaaccatagccaacccgggactcagcaggctccagggattggagcggggccttgtgtccaggagcagtagagtgggtcctgcccctggtctcttgactgtgggtcttgtgttgtttctctaccagcgttgacttttggattggaaatttgaaagctgctaatgaatctccctcatgaattcatgtaactgctttgatcctaagtatatttagtctgtcccaccttggcacagtgggttctgtcaccagctcctcaacgttaggacccaggaggtccctgtggtaggtagtatgggaaggacatgatgacagggcagtgccatgggagcctaggaggggtcgggaaagggttctcctgtcttcttcacatgcatttgcatagtgtgggaatgaataaaaggtttaaaagaacctgtgttattcctgttactatttatttttccagaacatatctggtcagattttcattttctagtttttatgttcaagtaagcgtcttaagcgtgtgggaatgtcattctcctgcctttttgttaaattaaagaccaggtgggtgggcacattccttacctgtgctcttggagtcccacagggccaagtttttcttagttcctgaaggtgacagaatgagcaggcagtcgtctcatcagagttgagccaggcatctcctgtttttgtttgttagagacagggtcttgctttattgctcaggttggattgtggtggcacctcttagctcactgcaactgtgaactcctgggcacaagcgatcctcccacctcagcctcctgagtagctgggactacaggcacttgccactatgcatggctaatcttgtgttttttgtagaaatgggtgtcactggtatgttacccaggctggtcccgtacacctggcctcaaacgatttgccagcctcggcctcccaaattgttgggattacaggcatgagccaccgtgtccagctggcatctactttttagggcagttcttcctttttcaaaaagaggcttaacaattatgagcgaaataaacctcattatataaaataaaaatatcactcatggtcctccctttcactcaaaatagctccctttgtttggtctctctccaaacgcgtgggtgtcatcggtgctcatctctgttccgggccccgtggccttcagcagcagcgtttaagatgtctgtccgtattctgcacgagggtttatatcccgttctgagtgctggccatttgggtgggttccagtttttgctggtataaataattctgtgatttgcatttttatgtgaatataacttttttttttcttttggggttttcttaggatagaaacctgtatgtggggtttgtagtaaggactagcacagcttattaaaaattgaccgtggatcattgtcaaccatgtttcacaatttagaatattcagttatttaaatacttcaatttaattcaaagaataagccaaaacctttttgtattttcccacctttttattttgaaaaattatatatccacagaataagtgaaaatgaacactgatggtcgctttattaatttaaatttaccagttgttaacgtttgccacatctgctttatctttgtctttctgcctcccttcctgcatctctacacacacacacacacacacacacgggcatgcacattttttttttttattgctaaatcatttgaaagtaagttgcagacatctgacactttacttttaaatacttcaacacttatctcccaagaatgaaaacagtctgcaacataaatgaaacacatgatcacacctaagaaaaacagtggttccatagtatcgtctaacatatggttcaaaataaaatttgtctccagaagtccttgatagcttttgtttcctcagtctacgatccagttaggtttagtgcattgagtctgactgttttgtaaattccgagtacgttaaagcctttggaatgcgtgccatggactgttctgaaaaggttccccttaaaccactaggtttaaaccaatttttttccttcaaaggaaacattcagcacagctctacgtgttgaagagagagctttggtgctactctgatggggtggggactggagcctgcacttgtcccctcccctgagccactctggcagattgctgctcttggccacattgtgtcttcctaaagccagcagggttcccgcaaacttttgggccactggcctctgagtttagagtttatttatctccttggccacaatagccagctgtagtctacattgtggacgtcctgaaaactggcagttctctggcatttggctcctggattagaagcattgctcatactgcagctcgttgacagctgactctgttctccgtttcagtggcgggaccactggatgcagtgtgtgtacttcctgccacaagaggagcctgtggtgcagggctcagcgctctatctggtagcccaccacgatgactactgcgtatggtacagcctgcagaggaccaggtacgtcgagcctcgtgggggtggaggatgagcctctgagacttgtatgtaaattccccatttacagatcctctggaggtgccagtgggttgatttgtgtctggacagaataacataagaacaaagatttgtgaccagtgtgtcagtgcccattcgtgtgtacccaggagaggctgtcatgggttgctggaatctgtttagagcagatgcgtaggaaaagtctggaattagcgggtgctctaagccctcatgcctactggagaccagtgtccagattcatgccctctggagacctgtggaggcgctcacagcccacgtctgtttgttcatctcctggcctagccctgaaaagaatgagagagtccgccagatgcgccccgtgtgtgactgccaggctcacctgctctggaaccggcctcggtttggagagatcaatgaccaggacagaactgatcgatacgtccaggctctgaggaccgtaagtgtccagccccttggcttgttgtggggaaaagggagaaagaagtttgtcccatgaaccccagcactttgcttatgatttgctgtttctttcctgtgtcctcttgtctatgagtggcttcagcgagcgcctcctgggtgggcactggagcagaaagcgggagagcctggggctggacttcctgagggcttgctctctgctctactgggagagcctctggctgggctcctgctggacacctttgccttgtcagacacagtcattgctgtgggtggtcacggtggattaggccaccccctcttttcatgtgttgtcacctttctaaaattttctaagatgtaaatctgatcatgtcgctctcctgcctgaaaacctttgctccctgctacctgtagcaggggactcggcttggggattacagatggggcttagagggagggtctcttgaggcccttgggggtgtgtacagaaataggtgtgaatgtgtgcattttgggggatggggggaggatccaagccatcctgagtttctctcagaggggtctgtcacccagaaaggcatccttgcctttgggcagtcaattgtgaacactcaagccttggaggctctcagctgtctgtgctctaaccagacagggaagaagcctgttgtcatggactggaaggtggcctgcaggtggtgcaggccttcagcggggcctctaggctgggttgaggggtgtctttcctgacactggggacaggtggggagatgtgagcaaggcgggcatgtttgtggctgggggtggttactgcatgaggacgcagggggatggtctgaggtctgggcaagtggagtgagaagggaagtatttctgacagcttgccagcaggaatcttctggcaaactggaggaagccctgtgctgagcttgcctgttccccgcaggtgctgaagccagacagcgtgtgcctgtgtgtcagcgatggcagcctgctctccgtgctggcccatcacctgggggtggagcaggtactgacatgcacccttgtcagcctcctgatgtgggcttgtgagttagagcattgcgtggtccgggtgcacaattctgtgatcaaggctctttgcaaaggccactgttgtgggcacagcatgctcgggtcaggggctggggggtttattgcctgtgcgtgcaggcaggcgtcaggcctcagagctggtgttcaggctgccccagggagggaatgagggcagggagggttgttcaggtgtgtcctctgtcttaggatggtcttgtcgcattttaatctttaatttcttctctgttaagtgaatatcttacaactaatagcgtggtgttccctctaggtgtttacagtcgagagttcagcagcttctcacaaactgttgagaaaagtaagtgagaattgttgttgctgaaatagtgagaggacctgtggggtctgggttgatggctttgaagtggcattggccccaggggaacaaaggagtggtggctcgcttgcacccctgtgttgtcttggttgctgcctggagagcagccagaggccttgggagctgtcactgaaatagaggcaggcatttgcactctgctttgtttttttgtgtctgaagaagtttaggcttttttcctcacttcacataagctactgttgcggtagaattaaatgtaggatgtgtttctgggacatcagtgctgagggagccagtgctcacagcctgatgggagatggcatttctctccctggccagtaactggtttgatttcctctccaaaggggaactcccttcaccagaactgcaggctcgcactgagtcctggtgtgcacatgcgggagaaatttcttttgcttttatcacattgtgctcctgatctcatccgtggtctataggatgccccccaaggagaggatttttccacaaagcagataaaagtggtgttccagaaccatttgccggaaaattcaaagcggagaatgcaactttgagagatttttttttcctgacaaacacaatactttagtatgaatacagtaattttacggttttctttctaagatcttcaaggctaaccacttggaagataaaattaacatcatagagaaacggccggaattattaacaaatgaggacctacagggcagaaaggtgagtagcgggagccttttggccacgctgggctgtgttagggtggtcagcacggcactgaagtagcccaggccccaccctgtccctggagtctcacagtgggtcctccacatgcaaccttacctcctacgagctcccaccatcaagggtgtggtgaagctttcatggagctgcccggtgagcagatggttgcactgctcttttttttttttttttttttttttttttgaaaatggggtctcgcgctgtcgtccaggctggagtgcagtggcacgatcttggcttactgcagcctcgaccttccagcctcaagcgatcctcccacctctcccgagtagctgggactgtaggcatgtgccattatgcctggctaatttttgtattttttgtagagtcagcgtttcatcatgtggcccaggctggtcttgaactcctgggctcatgcgatctgccagtctcagcctcccaaagtgtcggggttacaggcatgagccaccacacctggctgtactgctcttagctcagcctcatctctgctccttcaggtcaggacagagcagctctcttggggttcctaggagcagagcatgtcctttcctctccaccgcactcctgtcttcattccccgtccacggcttcctgctgcagtcaggcttccgggccctgaaactgcttctgccagcaacctcgtcgttactcccacggtctccctgcaggcttcatctgctctacccgcttgtccttgtgacccgggacttctgcctgtgctggggaggtcgctttcccctcaccttcctggctgctccttaccttgcactgctccgtggcactctccccgtgtcccccgcttcccctactgcatcctctctggtaatcacgttccttctcatgtgtgaatcagtgaccatcagagccggccttcactctttactattttggattcaaatctcatgtccagctgccatcctgtcacctttccttgaatatgccacaaactggactcacccaacgcggagctatcatctttcatctttcctgccagtctttttttaaataacagctttattgagatgtagttgacataccacaaaattaatgcatttcaattgtacagttgagtgatttttttaagtaaatatatggagttagccgtcacccagtctcatttagaacatttccaggcccgacatggtggcacatgtctgtaatcccagaacttcggaaggccaaggtgggaggatcgcttggacccaggagttcaagaccaatctgagtaacatagggagaccctgtctctataaaaacaaaaaaaattaaccgagtgtggtggcacgtgcctgtagtcccaggaggctgaggtgggtgaggtgggaggatcgcctgagcccaggagttggaggctgcagggagccgtgcttgtggcagagcactacagcatggctgacagagtgataccttgtctctaaaaaaaatgggaatgaaaagagaacatttctgttacctcccaaattcctgggagcctgttgatagtctgcatccccatgccccaggcctggcagccactggtctggtttgtgtctccagtatgtgcctcttctggcatatctcaaaagtgaggtacgcagtgtgtggtcttgtgagtctggctcctttcgctgagcataatgtctttgagattcacccatttcgttcttttgaaggctgtgtagcattccacggtgtggctatccattcatgtgcttatggacgtttggattgtgtccagtttttggccactttgaataaggcttctgtgaacatggattcactggtcttagagaggatgtatgtcctcagtctcttatgcagatgccttggtgtggattgctgggtcatgtggtagttacgatcgactttttaagaagctgctgaactgttggttgaagtggctgtccttttgacatccccatcggtaacatctgagggtccaggttctcggatcctcaccagcacctggcattggctttttttttttagcataaccatattaatgggagtgtggtgatgtctccacatagttttaatttgtatttgcccaatgactgatgatggtgaacatcatttcgtgtgcttgtcttgcttggtgaaatgtctattcaagccttttgcccatttaaaaaaataacagttttattgagatataattcacataccttacgattcactcagtgatttttgtatattcataaggttgtgtaaccatcaccacatcagtttaagaaccctttcattacccattggcagtcatgcaccatttgtccgcagtcccccagccctgggcacccactcttctcctttctgtctttagcttgcccattctgggcatcttgtgtgaatggaatcagacaagtgtgtggtctttcgtggctggcctctcatgtggcttcatgttttcgggctcatccatgtcgtagcctgaatcaatacctcatttctctttcttgctgaataagattccattgtgtggatagaccatgttatttatctgtttctcagctgatggacatttgggtggctcctacttttgggctgttgtgagtaatgctgctataaatattcatccacaagtcgccttttttctccctcatagatgagggcataggagatgattctgaaagccactgtgtggtgtaccggtagaccggggtcacattgaattggagtggtgggagcgggcgttcttgccatgttcctgatgctgtgtggggaggcgaggaagcactcagggcagccccttctgtctgccagcatttcctgctgcatctccatcatctctgactggccccactttggtgcctgactgcttgggcctgcccagggtcggctacctccttaccctctgccactccttccactcctcccacccctcccaccctgtagtctccgtttcttacccggactctttctgcactctcccaggtcgcctccgtccccagcacctgcaggttcccttccacacttcgtggtcctcagcagcatcttctaaatcacattccttctgattttgaaccctgatgaaaacttctagtgacatccaccacccccactgccgcctccgggatgagtccagcccctcaccctgtcctggctgccttgggctgggctggcttctgtccagctccacaccctcaccttggggggccttgctgtctcccggcctcactcttgcccctgctgcccctccctcggccgttcaggctcctcgctgtgcacgtgttcatttactcacaaatgttcacagaacatctggtcacggcactggcccactgctgggggatgctgggccaccagtccctgctcttgtggtgctcagagcctggggagggagacggagacaagccccggtaagtcctgagataaagcgtccagtgggggttgacaggatgccactctggaagccccgtctggcacgtttatttctgggctccctccatgacccccttccttgcttttttctatcacatggggtcagccccactttgtctgcttccctcttctgctctgctctcctgagcacgggactcatgtctggttgtaatctttacagcctccagggcaggtacagagcaccttgctgccttgcttgtttgttgactgagggagggagggactgatgagggagggagggaatgagtgagtgactgagtgagggagggagagggagggagtgagggagtgacttgagtgactgagtggcctgttgcttccgtgttcctgttaacactcctggaccgagccctactgacacctgggccctgcttctcgcccattcaccaggtctctctcctcctgggcgagccgttcttcactaccagcctgctgccgtggcacaacctctacttctggtacgtgcggaccgctgtggaccagcacctggggccaggtgccatggtgatgccccaggcagcctcgctgcacgctgtggttgtggagttcagggtaggccacccaggggatgttggagaaaaaagcagaggaggcgggtggggaaccttgttttcttgcaggaaccttgggtgcctgtagagcggctcaggccttgatgatttgagcttgtgttttctttctgtgtcagcacactgtggggttgaatagaagatgcttgccttttaaaaaatgcgataatttgacatacgaaatggaaatggctgagtgttgtcattttacaattgtggcttatcagaataatttaaaaatataaattaagcgtttcagaagccatgccgtgtggcctgctctgctctcattaatagccgaggcttcgattgttaaaggcattttgagatgggagagtcagctgctttgtgcaagaaaaaatggaaaagcttccttttaattttctcatcaaagcagaaccatagtcacaaagtcattttgggaagggcatttttattaaaaggatttgaaaagctttaccctggatggagagtgtatctcatttgatgagagtggttttctctcctagcttagtggctccatcactgaaagtctgggcatttctcctgtgttacttgtttacctaatcagatttccacatgaattctggttttcatggccaaagaggggatgtcacgatccatgcgtgcgtgtgaccaggaggaagggagggaaggctgtgtggcctgagtgtcctctgggttcctcttggcagggcctttttctctccccagcatcctcatgaactggagatgatgctggggagagaattggcttacagatttcttcccaaagaaatgatgttcaggatggcccggataggagtgtgcagcccccagcctaggagctctggccgactgtcccttataggagaggactcaggtgtcacgtcagagcttgcaggttcccgcccagcccagtctgttacagaaaccgttgtggatctttgttctctctgagccccttcatacttgggggtctctttcaggtgtgcagggaacagcaagatgtgcctcttgttcttgctgccacgcttccctgtgtcctggcgggcgggtgtggacggggctgctccttcctcacaggacctgtggcggatccggagcccctgtggtgactgcgaaggcttcgacgtgcacatcatggacgacatgattaaggtaggcagggccacactctgcatagtacccccgacctgctcctgtatcgcaggcctctcacagggtcccagcttgggcagcacaggctcttctgttgggggcagtgaggtcaggtgctgccattttgtgtggttcaacatgagcattgcttggtaccagccctgttcttggctccgtgctgtcaccctgtgtcagaatctccactgggcctgcacgtcctgtcattgcaactgcccctgccagtgcccacagcttcttttctagtggggctgactttccagaggccatctgggaaccttcttaggcagccatttccatggtgggggctccattcccgggaggggtacctgaggagattcccacaggttatttacatggtaggggttagcaactgggcctacgttctccagaaccatgggctgtcctgacagcgccagtggtccttggattcatgaggactgaagctgagagtcgtgttccatccacatgagaggggcagggtgaggagcatgggccgtgctgtgtattaaggaaatgcacgtggctcctgcttgtcatcccagcactctgggaacctgaggctggtggattgcttgagcccagacgtttgagaccagcttgggcaatatagcaagaccctgtctcgacaaaaaataacaaaaaattagccaggcatggtagtgcacacctgtattcccagctactcaggaggctgaggtgggaggatggctttagcctgggaggtcgaggctgcagtgagctgcgtttgtgccactgcctccaggctgggtgacagagcaagaccttgtctcaaaaaaagaaatctcatggacaccagaggagcgggaagcagcggtggccccgcagcagcagctatgcatcgggaggtggggcttttctgcttctgctcacctttctgctctcattttcccatagtgaacatggattgcctgtgtgtgaacacttttttaagtaaattaaaccttgtggatattttcagtttgtatcttatctgcccctcacagcagaccattgactgttcgatgcttttagaaatctccttcgtgctgagccctgcgtgctctggacccatgcgctctacgcctcctctgggcccctgctcatggcctgcccaccctggctgtccctgtcccctcttgctgatacggttctgctactctggtcctgggccagtgtctgtctctcgtgtgctaaggcagatggccgagagtggtgggtatcccacagtggggtgccaggcatttttacttctatgctttccaaatccacctgcccttccccacccttagcctggcccttccagtgccctgtcttagacctggcgccacttcacacgaccagccaggcccagggccccgggcatcctccctggcaagtcctcccatcccctgccattggtcttcgtgctcctggtgagcctccgacccaggctgtcccctgactgctgccgtcctggtttgagcccctcctgctctggccgtcctccacacggagcccacatgaacttgtagatctgagtctggccacatccccactgcaggaatgccctagctggctccccacaccacacctgcagagtggcccggctggcctgggtgccctggcctgctctcctgacttagctctatcctcaaggccccctctggcccttctcctgccggctcccatttgaccgtcacctcccctcctccaggtagctttctgcatccctcctggatgcaggtgcccccagcctgccgccaggcaccggggctgtactgtcacgcatttatccctccctgtggcccggggcccacctgtcggggccacacagctgtggtggtcaccaagtttctaggtgctgggtgttctcaccagtgatgtagatatgtggtcctcagaaggcttgagacaggcagcaccaccccatcttaaaaatccggagagcgaggctcagagccagcggtgcctggggagccactgatgagagagaagtggcagagagggggcgccgctggtctgctgggcgctcggcatctttatgggagaacgcacaccccttgtgactgcagtcagtgggagccaagccggggagcggtacctctgtctagctgccggcctgtctctgcagcccccaggcccccttctgttcgcagcgtgccctggacttcagggagagcagggaagctgagccccacccgctgtgggagtacccatgccgcagcctctccgagccctggcagatcctgacctttgacttccagcagccggtgcccctgcagcccctgtgtgccgagggcaccgtggagctcagaaggtgggtgcagagagggctggggggcagggaggggctgctgcttgcccttggagttctcacccccgtggtgagcacagctggcctgggagacgctgacacgtggagggggtattcgtcctccccacaaccttgcccttccctgtcagagtggccctgcgcgtgtggtggttcccacggtcctgtgtgtgccactggtggaggagccaggaagggctctgctccccctctacagctgaggctcccttgttggatcacagctcaggaagatgggagcttacttcctgtggtcaccgatgcaccattttcctgaaccctcctgggagctgaagcaggtcagggtcagcaagtgctgcttgcgtccagggacgggcagccctgtcctgctccggccctcaccccaccctcgcccgaggagtgacttctcctggaagcacctcccaactcggggcaggcagccaggcagggcgggcgccatcacctgagctcccagggttgctgtctggggcatcagaggggccttccggccttcagtgccaggctgtgcctcaagctcccccagaccctgcagccacaccggccctgccccatgtgtggcccggctgcagggctcgggttggctcaggtgggggcttggctgcggctcttctggctggggtttttctgaggaacgtttatgtaactgcagcactaggaactcccggcagggcaggaaggaagtggggaagaccacaggtttctggaaagccgcaggagctgcagctgttcccccgctgcctcttgtgtgactacttctgctgggcccccctctccttgacaggcccgggcagagccacgcagcggtgctatggatggagtaccacctgaccccggagtgcacgctcagcactggcctcctggagcctgcagaccccgaggtagtgcctgcgcaccgggcccagtgtgcgtgcagaccctgagagcaggcgccgcctggggaggcctccctgcccccatgctctgggtgtttctgtcacaagttcttcgggccagatgatgacccctcagtggtcctgggccatctggcccctgagcagcttctctctgctgcgagctgcctgggctggaggctggctaggaaggaggctcaggtgccagggagccctcaccatcttcctgctcttcttcctacaggggggctgctgctggaacccccactgcaagcaggccgtctacttcttcagccctgccccagatcccagagcactgctgggtggcccacggactgtcagctatgcagtggagtttcaccccgacacaggcgacatcatcatggagttcaggcatgcagataccccagactgaccactcttgagcaataaagtggcctgagggctggggttctgagtggctcatggctttctagcggggaaggctgaaggccctcctctcctctctgggagctgctcggcctcagggatgggaaagactgcgccgtgttgcatcttgttgcatctttgcactgctggcctctggctccagctgtggcaggaagcatgagagggtgactgaatttggagccctggaggggctgggaagacccccctgcttgtgcttctgaggtgctgagaatgctccaacacagagacatctctccccagctgggaagggagtggaagcacagggagcttgtggggctggccggtggggttgtccacgccgcccttggcgagcagtccccgtggcgggagcctgtcctgtctgtctcactctcgaggatctccgggtccctgctcttctggcttctgctaggagggtggagatgctgagttgtggctgggtctctggggcttgaagaccctggctgggcccgggctgagaggcctgggttctggccctttcacctgacaggtaacttcaagccacatccataggtgtctggcctcagtgctgcaccagctggtggcctgccaggacctgagactggacacaaggcagctgtcccagagcagttcctgagatgcaggcccaggaaagtggctgtcaggggagctgggaggcagccctgttccctgcacctccctcagattggaaagcccctcctgcaggtggggtatggcagggagcagcccctgcccagcgccgcttcaccaggaaggtcagtaggtgccgtggccttgcttctctcacacactaacccccctttggttatgtcccagctctcagaggtaacagcagacaccacgtgagagaacccagtggcctctggctcgcagcttagaaggtgaggcttgtgccaggccagccgagccgcctgtatgagcagagttccggtgtcctcggattcagggcagacttgggcagtgcctgtcctgcagttgggggcaggaactccctcccctgcccccaggcgtgcccctgaggcctggccccagcttgtcgctgaaataagtggagaacaccagccttgagcctcacagttttattttctcctcgttatccatccttcctttcagcaccagtaaggaaaaagaacacctctcttcgcaaaatattttatcaggtgtaaagacttgtttttcttctagggaagaaccgtctggatatatatttgataatgtttttaccaaaaccataggtgtgcttaccatagaaaacccctaatgtcccatgaagatacaatacagaaaaaaatacagaaatt

SEQ ID NO: 1240 - DNA, 23777 bp, Homo sapiens
ggtctcactctgttgctgtcttcacggagagcaggagcagaggctttgagaagccagtgggccttggcctcagccctgccggcagagggtccccaccatgcagctgaagtgccagggtgcttgtgaagtctaagcccttgtctggcatttgtcaggaatatagggtgaggcctctgggaccgagcggggcggggcggggcggggcggggcggggcgggaccaacagcgcacacttaagcggcccgggcgggtaccgccgtcccgccatggctctgaggcgcgccctgcccgcgctgcgcccctgcattccccgcttcgtcccgctgtccacggcgccggcctcccgcgagcagcccgcagcgggcccagcggccgtgccaggaggtgggtcggccacggcagtgcggccgccggtgcccgccgtggacttcggcaacgcgcaggaggcgtaccgcagccggcgaacctgggagctggcgcggagcctgctggtgctgcgcttgtgcgcctggcccgcgctgctggcgcgccacgagcaggtgcgcggggtgcaggcgggggcgcgggggcttctgccggtcccgggagcctttacggagcttcctggcctgaaacgggtgcctcccaagcatctcctggagcaagggaagccaggaagggaggcgtttcctgcagtccctctcggacctcgcaaattttcctatttgtcgatgtctaccaactaaaaacaatggtcgttttcatatttacgatatataccacttgtgggaatacagagttatcacttggaatttaaaatggagtattcttcatgttgagacaagagaatcctggtgtagggctcatagcctggaaccccggaattcaaaccccgggacccagcagcttcccagacacggccactctgagaacactgttggggaaaaatgggaagcccctcaaacgcccagctttgaactcacccatggtagctttaaaaagtgtcagggcttttggtggcggtggtggggggcaacaagcagaacactgttttagccgcatcagcctaggggtactagagatgacggttatctccaggtgaccctgggaagagtttgcaaggttccgctttttggcgccagggtatctggtggtgttgatttctcaggtgagactgtacagaggtcgggggctgcacccctggcctcaacaggaggcgggggaaggcgggggacggtgtcagatgagaagcaccgagccacagttgagcttaggtgaggcctcggcgggtgcgaggtgagggcagggatccacgaactcagagtcagatgctgttggcccgaatcccatggggagcgccaaggtcagcctaggacccgtggtggcgggagtgcggaggatggtggaggaagaaggagctgaactggacagatggagggctctgggagggcattgctgtgtgtgcacacaaggatgtcttaaggtcaagttttggtcatagagagccccggccaaggagacaggagggcgagaagggacatcccaggtagaggaactggcaaggtgagggacggcgatgtggaggctttggggagtgcccacatctaaggggcatcccaaaagaggagccagtgctggtggtgctgcaataggaggaggaggcagcagggcagaaatgccaggggagggagtggccagccacaggtccctgcccagggcaaggacgggcatgctaggtggcagctggggccagtcgtgcagaagccatgcccaccttgtggccgggatggagtggggactaggaaggcaccaggtcaggtttctgtaggcacagccctaagcatggctgggatggggagggggctaggaaggcaccaggtcaggtttctgtaggcacagccctaaggtttcttgtctagattcaagacaagttgttgcacagagaagccagcagagctgggtgtggggtttggtgcccagtctgctgcggggaatgccaggtgctgttccgtgactgtgggaggaaactgttggctccgctgtcccttgggtgccttcttgaggcaagtgccagggctcagggatggtgctgtgagtacctggaagaggcagggcatccagaggtgacctctcccaggctcccctagggtcccacctgtgccctgggaagtccctcagtggggtctgtactgttgtcttgctagtggtcccatgggtgtcggcagcctcagcactggaagaaggcagaggccaggtcctgggcttgtgagctgctcactagaacctggtcctgtgagcgggccagaggggagttccttccctcaccctctgggctgtggggagattccttctgctgagccagcacaggtctgtgaggcacccgggcagtgaggccacatctgccacaggcgtgtcaggttgtagtagctgatctttgagctgctgccttggatggggacagcagtggggcccgcccttgcctgaaagccagacttattgaggagggtttaggaaagtcccaggatttccatgacaacagcactgaggttgggtgtgcgccctcacagaagggacaggacccgtggtgacagtggttccctgagtggggggaggggagagaaccggctctaccagtgttactctgcacacatttggttgagtctttcacagggggtacaagtgtatgtgttactggtgcaggtttctaaatcctcgaaggatctcctcacctgaagaagatgtggggctgccctggtctcaggtagtgccatgcggggacatcagtgacaccaggatggtgttaaagtggttgctttgctgtggagtcagctttaaaattacaagccctaggctcatgcctaggcatggtggctcatgcctgtaattctagcacttaaggaggtcaaggcaggaggatcatttaaggctaggagttcaagaccagcctgagcaacatcgtgaaaccctgtctctacaaaatatttttaaaagttagctggggccaggtgcggtggctcatgcctgtcatcccagcactttgggtggccgaggcgggtggatcacctgaagtcaggagtttgagaccagcctggccaacatggagaaaccccatctctactaaaaatataaaaattagctgggcatggtggtgtgcgcctgtaatctctgctacttgggaggctgaggcgggagaatcgcttgaacctgggaggtggaggttgcagtgagccgagattgtgctactgcactccagcctgggcaacaagagcaaaactctgcctcaaaaaaaagaaaaaataaaagttagctgagtgtggtggtgcatgcctgtagtcccaactactctggaggccgagataggagtgtcgcttgagcccaggagtgagaccctgcctctaaaaataaataaataaaaaacttgccagccctgcctgtgtgcttctgcagccctgtgcagggagcttccaccctcagcccgggcccagtcccccagccccccatctttgtgaataagcatccctggagtcagtgcagcctgggctcccgccccttcatttagtgctggccgtgcggaggcgagcagttaggtagagggagactgcgtggccccgtgcggcagtcgacagttgcccaccctccctcctgttgttttctgatggttctctcagagcggatgtggataagcccagtgatggtgttcaggtccccagttctgccccgcctgccacttgggtgatctttgatatgtttcagacccatcctgttctcccaactatccctgggtgctgccagcaggaatgaggcctggctcaggctcagtgggagacggagaacatgtcagcctgttcattttccagtttctaatcctcttgataaaagaacaaaatgccttaaagtcagattctgcttggaggctgcaggaaggcaggggtgagtgcctgggaaaccctggtccttggggctgccccatggcgtgcccaggggtgatggtcaggaggcgtctccatggggcaccaatgttcagggtaaggctgtggggctatgtctgcctgtgggcaggcgtgtgggtgctcagggctggcttgggtgtaagtgtttgactcgctaatggttttgcttagactagaagttgttcctgaaactacggtctcaagagatgctccccacataaaaggagttctagtatccattgggtttgagaaaccccaggctcttcctgtgttggggctgagtcggcaggggcagcagacacaacgcggaggtgtgcttctgagcatcacactcggccctcctctccaagtagcctctcgttgtccctgtcctttctgccctggctgtcccccgtgctggagctcccacagttgtccatgccatctcctcgccttggcaagccccactcctggatctgggttagtaaacacccctgccctaccctgcaggcactgccccatccccctgtcctgagtcataggcagagtccctccttcccctttggggttcctttaccaccaggatgtgagatcctggtcggtttcctttggttgtttccagtctataaaaggtgcttggtgcatggcagcttgggacatctgaatgagcgacgtggtgaaatatgattggaggagacagacagttcccgggcagcatctgtcagagtggctggtcagccccagatgaccctgcagagcgcatgggtcctggggtgggagtcatctcacaggcccctgtggactgtcatctagctcattgtccttgttgccagggcatgcctccctccagctgggcgcagactcagcctgagtttcacacgtttgttatttagcatccattcgggggctggcctcatgccagtcacactgtttaagggacttgggataagagggaacaaaacattgaaaaatctgggcactcaagtactagaaagtcaagttagatcctcctcttccgcagcagaactaccaaggtgtggatacagaggatggtctcaaaatgccggctgtcatccccagggaggctggccattctcctttttatccaccaagcagtggtcaggcacccactgtgtgctgctggagtgactcatgggtggggccctgaaggggcagagtccaggtgggaacagtgtcctcaggccaagcaggcagcacctcctgtggtctctctgccctggatgggaactggagtgatggacagggtggagaagcaagcggctttagctggtcttcaccatgaaactgaccctgaaagcccagtcgccaagagaccatatcgaggccccatggctggggtgaagtgtggtcggggatgagcagcggtgccttgctgggaaaggagagttcaggcagcccaggacagcggcttccctttgcctttcagctgctgtatgtttccaggaaacttctaggacagaggctattcaacaagctcatgaagatgaccttctatgggcattttgtagccggggaggaccaggagtccatccagcccctgcttcggcactacagggccttcggtgtcagcgccatcctggactatggagtggaggaggacctgagccccgaggaggcagagcacaaggagatggagtaaggcctgcccggtgtctgcgggctttctgatcatgaccctggagcacccagtgggagcaggtgggatgtatccagctgctgggcttcagcctcagctgggcagaggccaaggctaggagagcttggtcagcccaactaccgatgaccctcctgggctctgcctggagttcttgcatttttgtttcatgcggtggacagctctgggctttcatgggaggcctggtgtgcgtgaggcctgaggaagcagagtacagaatggcccttggccctatctagtccaccgcctggaggagcacaggcaccagcatatgaaccaagcactctgcaaagaatggttggtctcgcctggatctcacatgagccagggactgctccaggaagtggagggaaacgtggtcttgttgttctgtcctgatgccctgcccaggagggcgggtcagggtggtaccaactgccctctacactcactgcccagggaaggggccttgtatcagcttagtggcctccaggagctgactccaggccggcctgctacactgctcctggcttcaattcccttctccactgacaatggggcaggggccaggcctgggaggttccacaactgcagggcaggctgaggccaggcaagggtcgggcagtgggacctgcctgcgggtcaggaatccctgcaaaagagaggctgtagcagagcctcctccatcaggtcagcaagtttgtgtaaacagccaggtagcacagactctcagtcgggccacaccctccctgccacaacggcttcactctgcctcagtagggccatagtaattagaatttcatataattttcttgtgtcacaaaatattattcttgttttgatttctttcaaccagtttttttaaagtagggtcttgctctgttgcccaggctagagtgcagtggtgccattgttcactgcagccaaccttctgggctcaagtgatcctcccatctgagccccctaagtagctgggaccacaggcacgcaccaccatacctggctaagttttaatttttttttgtaaagatgggatctccctatgtcttcctatgtatttgggtcccctgcaccctgacagcagccgggcctgacccacataaggcttgggacagtccctctgtggacctggtcaggccttggtggttgttcctgcccctcccctggtggctggcctgggaaggggagggaaaggcagtcacatgaggcctccagccctgggaacggaatgtctgaggcttgcctcagcatgtcggctgccagctgcctggagaggattggccaggggagcccagcccctgccttgcgattggctgttttgaaggtggggtactacagccccagcaccccactgtgttcctagcaggccccgtgggccttgcagctgcctgagctcttggctgcagcctttgctgagctgcctgttgaataaccaatggcctgtgtgttctcagaaggagtctgggtggggacttggtttcacaatgggattttcctctcaggcgcctctggtatgaaaagactcctttcccagggtggtcctgcctggcttcctccctgccctgcaggctgagtgtctggaggtggactggcctgcactctgccagggggctgggcacctgtgtccttaggagcttgagtcctttgccctgcaagggattcacctgtcttgctgctggtggctgctgtctgcaggggtcctgctccagctctgggaagtgaacagggttccctcctgtcctcacaggggtgcatgctgaggacacctaccgagctcagctgctttgtgctttcagaggggcctgagccatgggggtagggctgggtctgcaagcactggtctgatgtccacactgcagcatggcctgcttggccaggagtgaccagtcacgcagaccctagtgcagggaactgcttagagatctgccttcctaacctaccctcctgtcacaagggccatgggctctactctggggagagacactgaggccaccgccccaaattaaggccatggcaagtggtgctggccgtgagaggcccagggaggatggaggcgtctgagtgcatggcaaagtgagtcccagcagtgctcccgagaaagaaagaggaggtgggagcctggaggtgcaggagggcaatgcccacccggggggggggtggaccatgcttcccagaggccagggccccacccaaccccaggagaggagtcccagggatccccgaagcaggctgagggcttggggatggggaaggggccaaggcatcttcctgatgattgggctgtgagggaacacctagggggtggatgggggcattggtctggctgtgcaggcccagggctggctggaggcaggatatgtgtgcagtgagtgtcctgagcgaggggctggggaggcagagggttggggagctggggaggggggtacaggtaggaagcggcttgccaggcttccctccaggagagagttggacaagggcggggtgtggacccccatgctctgcttgtttcaataggcatcacgtccccagggacagccacccagagctgaggtggaggctgagggggtggtcagggtcttcctgctgtctctgaagaccccctggggacacgtgcttgtcctcctctgccctatgtccccttgtcgctcttccctcctctgttgtcccaggtcgtgcccatgtgtgcgatcatgtgcccttcaacagactatgccctgggcatgatgaggggtgggactgggggagcacgaggcaggtcctggctttaaggaggcattgggatgtggtccccaccctgatcagggccccacatccactggttcacccttcctcctctaacaccccacagctgccagtgccatgtgcccccctcttccctgtggtgccttgagccaggacgtggcaacgtcccaggtggcgaaagccagatttcctgtgtggcacccgcagttctgaatcagctgctcccagggtgctttcttcctcttctccagtggaaataggacccctgacctgcctgggaaccaccatttgtgtctccttgtgacttatccatgatgcctgttggagagtgtggccctgtccttgctgcgtagccatccactctgagacctggctgcccctctggccactgcacgtgctgtgtggtcatcttggccactgcttggctgtgtcagcctggtctgtgctctggaagttcacggagaggagcagcggtagcctatggtgttctgcctctgagtgtgtcagagcaggagagggagcagccctggcttccccagcctctcctgccaggcccacctcagaggatgaacacagcagctgtgggaatgctgagcgggaactcatctgcctggggacctgtcagataatgatcctgtttcatgaaggtgagctgcctcacaggcagacacctgtgtggttaagtcccgtgttatccaaactgtgggctgtgtggtttcaggatgggaccttctcttcagggtcatggaggcccctgaggccctgtccccactgtctgctgttacttgccatgagggtttctgccctgggcagggccctggctgccaccccggccttaacatagacagtgagtcccccttggggatggcttttcctggctgtacctaagccttggcgtgaaggtcttagggctgatctcatgactggtcttgaggtgcccaagccaggggcccaggagctccctgtctcaggcaggggttcacgtgctgcctgcctgttccctagtcacatggtgacattccaccctcttctgtcacatctctgtcagcataaggtggccagagcatatctgcctgccagctcccatcactgggctgcagcctcaggggccctggcagcacatgtggagtccctggcccatgtggggctgcccaggagtgggtgggagggaaggcctcctggcgggggctcctggcccagggcttgctccttgagcagccaggtggaaagtgggcagctgaggccccttgacatggaggcctctgggatgcggctcactgaccactgctctgcctttccccttcccggcatctgagggggaccctctcctttcctgtgagtgtgggcagagctgcccctgagggtccgagcgcctctggggagcttcaggaaggctctgggtgctgttggtcatgcagctgagctctctccgtggtcactgacttgatcaggtttgaatataaagtcaggtgaccctcagagctgctccgggggccagggagaccatggtcgctttgtcacagcagacttaacggccgcagcaactcttgctagcctggatgacacagcactgaaaccaagtgccagaagcagattgtggctgtggggaggaggaggaagaagaggaggctctggcaggggtgcagggctggtgggggaggggagccaggtaccctagagaagggaggggccagggggaatgggggtgctggccaggcggggatggagaggcttctgcaggaaggacaggggcttggctgagcagagtgtggccagcctagcgggggacagcctgcatcctggcctcactggtcttgaggtgcccaagccaggggcccaggactttgggcattactaggaaatgatgggaaccctgggtggggtggcgtgaaacaagatgagatggtaagatctgctttcactttaaaggaacatttctggttgttgcttggaaaagaagtgtcggggcaagaatgctacaggagggccggcctggaggacagggcgggactgcagggctggctgtgcgggggcaggagcctgtgcttgcatcagagctgcctgggagaccctggctctggggtggaggcctgagtaagggggcctcgctggggatttggggacctctgtgtgctggtgccttcccgcctccgttcctctcagccctgactggctctgtcttggaaccaggtaactacctttatttgagaacctgctgcaagccctgggctgttctgagagctcaggaatatcgttctgatttctccacccacaaggagccccgggcttcctgagcccttgggacacagcagccccataaactgctgcccctcccaggcccaagtgttccaccccaggctaggggtggggctggggctgcaccttggaatctaccctccaccggggttgtggtggggccctccgtgcagcctcagtgggaacgtgcctgtcacctgaggctcaggtggcgtgaccctgacctttgctctccccctccttcccacaggtcctgcacctcagctgcggagagggatggcagtggtgagtgagaggctgccgcgcaggaacagactccctcccgactccgcacaccccttggtggctcaggagagtctaggctggggcacaagtgggccttggggtgacgtcggagcccgggctcctccctatgtccagggcacctgccctgtcgctctgggctctgacatactcgcaagtgtctggggagacgccctgctcctttttcatggcctcctggtggacctaggcctttgttaaggagactgccgtcctggcctcatgaggaggcttagccagggggatgcagcactccaggtggaagagccgcggtgtagacaggagggtgggcttggggatgggaaccatggggcagtgcagtgccagggccaggctggcaaggccactatgcttggagccctcctgagggcaggggccctgggctattggtgtgtgggtgctgggggtgggtgtttggagctgtgctcaggccgtgcattcgctattccaggcacgaataagcgggacaagcaataccaggcccactgggccttcggggaccgcaggaatggtgtcatcagtgcccgcacctacttctacgccaatgaggccaagtgcgacagccacatggagacattcttgcgctgcatcgaagcctcaggtggggccccctctttgctggctatacccctgccatgtcccagcctgagcggacccctgggctcatggaggtgccggtgggtgaacactaagctggggcaggagccagagggctgggttctgaccacacttgggtccctcactgttcagccccttcctgaggggccccactgcctcccagaaggcatctcctctcctgccccagctccctgttccctgatcccgcctcatgccccccacccttctccctggctcagggccaggatcgggagctgcaggaagttggtccatgtcagctgccgagccacacttagcccagggtggaggttccattcagggagctggtgccgcatcttctgtccttccctgacacagcctctgggggccagcggtgggggcagcaggtgtttccagggatagagaagccagaggtcagcaaggcccaatgtccttcagtgttagaaacatccgacctgcacagccccatgctggccccagcagccctccgtcaggggcagcgggtcccaggcctgtttatgtttttgtttgtttgcttcaaatgagactggatcttgctctgtcacccaggctggagtgctcacgcctctaatcccagcaatttgggaggccaaggcgggtggattgcctgagctcagttcaagaccagcctgggcaacatggtgaaactccgtctccactaaaatacaaaaaattagccgggcgtggcagcaggcgcttgtaatcccagctacttgggaggctgagacaggagaatcacttgaatccaggaggcggaggttgcagtgagccaagattgcgccactgcactccagcctgggcgacagagtgagactccatctcaaaaaaaaaaaaaaaaaatgaggtctcactatgttgccctggttggcctggaactcctgggctcaagtgatccctccaccttggcctcccaaagtgctgggattacaggcacacactaccacacccagctaattttcatattttttgtagagatggtgtttcaccatgttgcccaggctggtctcaaactcctggcctcaagcgaaccttacactttggcctcccaaagtgctgggattataggtgcatgccgctgcacctggcacttctgagcagtgcttggaagccgcctcctgatgggggctgagggtcagagtggccagctgaatgctgggccatcagggtgaggggcgtcttctcctcgtccattgcctgttctcccagggcaggtggaaggggaaggccctgcattggggtggcgtgaaacaagatgagatggtaagatctgctttcactttaaaggaacatttctggttgttgcttggaaagaagtgtcaggggcaagaatgctgcaggagggctggcctggaggacagggtgggactgcgggctggctgcacgggggcaggagcctgcgcttgcgtcagaggttcctgagagactcggtctctggggcagaggcctgagcaaggggacctcgctggggtgtctctgtcttagccacgctcggtgtttctgggtcctgtgacccacgtgtgagcagcctgtggtgctggtggcacagggaaggaaaccgaggcagggagcctgtgggggctgcttggcaggggacaggcagctcctgtgcccactgctgtcccacacctgcatggaaacagaaaccccgccacggagccccctcccatctccacagggcctctagagcgccatgtgcaaggacttcatgggcggggtggggtggggtcaggagcctgctgtgggctggccaggccctggccctccctgtcgcaccctgcgctgcctccatgcacctctcagggctgtcatggcttttcctgtggcttctgacaggtagagtcagcgatgacggcttcatagccattaagctcacagcactggggagaccccagtttctggtaagtgctagaaccttccacctgcagagtctggtgctgtgcgagatctcagggcagctgtgggcatccaccaaaaacacaggtgcccatgccttagaggcctgagctggccacaggggctgtgtgggggactggggtgggcaggggcgtgtgcagatggcattcaggcctgcgtttgcagctgcagttctcagaggtgctggccaagtggaggtgcttctttcaccaaatggctgtggagcaagggcaggcgggcctggctgccatggacaccaagctggaggtggcggtgctgcaggtggggcagccttccccttccccactcctgtggcttgtgagggggtgggcaccgtggggtcacacggggcatggtgggcagtggtcggaggtggttttgggaactcacccagggcatgtggctcactctgcagctgctggggttggcctggtggggaggaggaggtcagagggactctgaacagagaggggagatgctggcaggagggctggagacccagccctgcagggcgtgggcgtgcatcagcagcggggtgggaatagacctgtctatgcagtagaaacaaaccagacatggatcctgttcttactaacgatgtaataaagccagaaacagcaccagaggccaatgggtggggggaaggataaaatatgagtgaatggggctgatccaggccttctcacttctcaaggaaagtgtcgcaaagttgggcatcgcatccagggctgagattgaggactggttcacggcagagaccctgggagtgtctgggtgagagcagcccccaggctgagaggacacgagcatcagccatggttccagccaagccccagtgacgtctcccagtcctggctgccctgcctgagagggtgggccctgggatgacagtgctgaaggaactgcttttcacacagcaggacttgatggcttcaggagtccctgaggctggggctgggctgggcaggggagacacagggccagcacagaccccatagagggctctttatagaattatctgggtccagagcaaaggtggcactctcagccctccctggagtccacgccggcaggtgaaggatcagagccccatgccccatccttggagccaggggctgggacccagatcaccaggagcctccagttgaagtggggaggtgactggggtggtgcagtagtgagccatcccctcacacactgccagccttgcccactgtgtcctccctggccgcccggagctgtgtccgcctcctgcctggctgcctgtgctcggcccctccacaagcccaaaacagcctagggtactcagtgttttcagagccgcctagatgcaggactgtttgtgttttggttttaaatttatttaattaatttattttttatagagaccaggtctcaccatgttgcccaggctggtttcaaacccctgggctcaagtgacctgcccgccgcagcccccaaagtgctgggattataagtttgagcccccgcatgccactggttttaaatttttaaacagaaaacaatatttatatttcctctgtcttttaaaactgaacaccgaggtgggttttgtggtgggtggtgaacggacaggtttgggcctcgatcccccacccgaccctagcacccacaggtgggggtgccccctctgctgatgcgcctcctccctcagcaccatggacctgctggactggagcagcctcatcgacagcaggaccaagctgtccaagcacttggtagtccccaacgcacaggtaacacctccgctcctcagtgaggcccagctcagcagggcgctgcgctaagaagggaattcagcctgccacgtgtgtctcttgttgcctaccctgggaacttaacatgaccaaaatcactgcacactatggccccacagaccccctgtggtccagggggaagaagacaagcccactagtgtccacagagtgcttggcgggacagagacccacgcggagccttaagacaccacaaggagagggggtctgggggccttccccaagtcatctgtcttgtgcatcaggtcaccccaaacttcagaggcctgaaacggcagcagccactctgcttctgcctcatggttctggggttgacagggctcagctgggcagtcctcccctggggtctcctgggtagctgtactcacagagtggtggcgctgggacctgggggaggcacccattcacatgtctgggagttggtgctggctgtggcttgggctttttcccaacatggcagctgggctctaagggccagtgtcacctgagacgtgagagccaggcagaagctgggtgaccttttcctgcctcgcctcagaagtcacacggtgtcttttctggcaagttctgtttgttagaagcatgtcaccaggccagcctgtatacagcggggagaggaatgagactcatctgcctgtgggaggggggcccaggacctggcagactgcttgaaaccacagcttaaactgggattcaaagaaagaacagaagcaccttcagaaaacatcctgcagaggcagctttccatgacacatctagccccagtccactaagggcccagcctcaaacttagagcccccgacccagagcctcggggcgcagtgcgtacagtgtggctgtgcaccaaggccaccagctgttggagactttagcatggtgtagcaagggatagagtggtactgtttgtgcccagtgaggcaaggctgctggggccagcaaaggggtgagcgggaggccctgcgggatgggtccccacggcctctgagcaccagcaacttgaaggcctcatcctggtggttgccctggtccctggctacgtgtcagcacgtgctgcacaactgccctgtctgcctgtagccaggggtcttcctcctgggccctctgcctgctccgggtggagcccttctgtttgacgattgggtgatcagtgttcacttgttcaatgtcacatgggagttgcagggggctctcccacaacggtggggcctctgtgggaactggggagtacacacttcggagtgcaggcctggactgagcctggggcccactgacatgggcactgagctccctcgtggtacccctaggccccgcatagggcagtgcactggctgcgttggaggttcaggggcactgtgctgcttgtccaggtggccctccctcccagccctgcacagacgggtgagagggttcctgtgggctgggaatactgagagaggtttagcctgggcctcagggtggcactttcccgcccttgctgtggcctgaccgcgtgttgcacccccagacaggacagctggagcccctgctgtcccggttcactgaggaggaggagctacagatgaccaggatgctacagcggatggatgtcctggccaaggtgagctgtcccgctcgggcagagggtacctgggactcgtggagaagagggcacctgcctcacttgagcaacagttgctcccactctcccaccccctgcgcctctcagaaagccacagagatgggcgtgcggctgatggtggatgccgagcagacctacttccagccggccatcagccgcctgacgctggagatgcagcggaagttcaatgtggagaagccgctcatcttcaacacataccagtgctacctcaaggcaagcccccgctcagcccctccctgcctgccctggggcttggagaccccacaggaggggctcctctcatctgagctccctggcatttggctggttttacactcagcacccaccagggagctcatgggatggaggagggagtgggccgtgcccccaaggggttgttggggtcttctgcagcacagctcacccagcgggccccagggtccaggaaagagccccttaggtggtggccacagccaggcctgcagaggaggctgaggccagggtgactgcctcagagtagcaagaaagacccgctgcccgcaacctctcccctggttctcagaaccagccaagagtgtctaaggagcaggaggaagacaacaatctttatgagggtccactagatgtacccgacaccccaaacttggaaggtgtcacatgaccatttcctccagcgtgttttcagttcagcgcccctaagaacctcctgaaagctttgggccctccccggaaagactcacccaggatgtcacatgtattcagggagcccaccctagcctttgggccccaaactgctcagggatgttagcaggtccagagctctcaggggtgagccggatgcccagaggacacagggtggcatggggaggggtccaggcaggagcatgcagtatgcacccctcccggtcggcctgggagtctggagcacatgatggctgctggcgcctgggctgcacccacagggccgtccacaggccacacaggaagttgcagacgtccccactgccattgctccttggggacagaggttggaggcccatcctcacccacacctgctccaggtgccctgagctgcacctccccaggcagctgctgcccagccctggtgactgcacctgggcccaggaaggccccatcctgctgtcacttgggcttgcccaggctccctgtgacttttggccctggccccacaggatgcctatgacaatgtgaccctggacgtggagctggctcgccgtgagggctggtgttttggggccaagctggtgcggggcgcatacctggcccaggagcgagcccgtgcggcagagatcggctatgaggaccccatcaaccccacgtacgaggccaccaacgccatgtaccacaggtgcgcagctctcccacccctctgtcttctcagggcagggcgccaagaaaccaggcctgagggagaggcttggagactgaacttgtcagccacatgtgtccccaggtcagaactggtatttcctcagcttttatgtcatgtgttactttttcaaaagcattaaggttattcttttataaatatagaaaagcctattgaacaaagcaaaattggccacagttccctgagcttgctcctgcagacacttagatccagagatgtgcatgaacacccggtcctccccaccctgcaggctcagcctgtttgcttttcagttcacacagtgggatcgcccatcagctgttctgcacctgcttttactgctctagtttcttggtgatcttttcatgtagcacaggctggccaaccatgggcttttcctcttagaggcgtgtgtgcatgctgcaaattcagagagaccccaagtgtctcctggttggctccagctcccctcctgcagccgctgtgcatgtcgtgccacagcgcacacatctccgccattgttttttgcgttgtagcgtgtcctctgcccgatgtgtttttcatttcgcgttccatctgggtcctcttgtgtgggcttgcagagtggtgctgtcaacagccagcatggagtgcccggggctatgtgtccagcatctttgatcttattggtttttagtctggttattgtaatggactcgctggacataccgtcaccctctgtggtacacacgggccgtcaggggttttgtgtctgaggatgcagctgtcctaggttgctggaaatggaattgctgggtcagagagaacgtgcgtgtggtcaagcctgctgagtgacctcgctgcaggagggccgtactgctcgggcttcctggtgcaccgggatgcccacccccactgtgccctacagggacctgcttcccttttatttccttgcagggccaggggtgcactgtacgatccctccccagaagcaaagctgtgtctgtcatgaggctcatgggcatgtttgggctggtccccagagtcacagcacgtttgatgcagggactctgcccccacagctggttctgcgtgaattgtctggtcccagacatcgcttttgcttggttgctggtctttctttttcatgaggtgctgggaggggcagatgctgctcctgttcctcctgatcctgtggatacccttggaaagagccagctcaatggatggatctgggtctgccctcggcctcctctctgtgcagctggtaatgagaggtgcaggcagccacaggcctggaactgggctcacatggcactctccacaggtgcctggactacgtgttggaggagctgaagcacaacgccaaggccaaggtgatggtggcctcccacaatgaggacacagtgcgctttgcactgcgcaggtaggtgtgccccaccctgcaccgaaaccccaacctgagccgttgtctcctccggctggggagaggtggcagcagcgcagagctcagggtgggcagagcgacctgctgggtggtcgggcatttgtggggaaaggctggtgaaatgagctggagggtggcttcagtgggcaggcccaggcccgctggcgttctggacatcggactgtgagagcacaatggctttttgcagttacgttggtttttaaaattaacttttttctttttttgagatagaatctcgctctgtcacctatgctggagtgcagtggcgtggtctcggctcactgcaacctccgcttcccaagttcaagcaattcttcatgcctcagcctcccaagtagctgggattacaggcatgtgccaccacgcctggctaatgttttgtatttttagcagagacagggtttcaccgtgttggccagactggtctcaaactcctggcctcaagtgatcctcccttcttggcctcccaaagtgctgggattacaagcatcagccactgtacccagacttttaaaaattaacatctgacttattaaacttcacaattaaaaaactaaatttcatcagggtattcggatggctcctgaaaggtacaaatgcagtgttggaggccagtccctcaggaggcctccacagtgccacctcattaatacgcccttaacattttaactacatctggaatgtaacggtttgttttctctttaaacatttgtcccatggagcacaacttcggtagaattctaacaagtcaaatgcagaagttaggtgaagtcagttcttggatactcctgtactgtcaccctggtcttatctcatgccttagtccaagctatgcacacaatggggtcctaggtccccctcccctcccagattccgccttcccagggatgggaccccctagaaccctcgggggcctgggcagtggcctcgctggctctcgccttcctaggagctgagcaggagctccactctcagcagggcagggtgccccagatccagggcttgtggcacgagggggctccccaagaagctgtgaagccacagggccaggcttggggccagggctgcagccaacaggacacatcctggtgctgctcgggagctgactcacggctctgaaatcattcagtgatgtccacattcagcctttgtttacgatgctgctactttttcatggcctgaaattgcagcacacccatttttgtgccctgatcctctgctaattgtcatagatgtgtcggtgatgggacagactcactttctccacacgcacaggcctggtggccagcactgcccagcactcgggagctggtgggggttcctctcagcttgtaatcaggactcccagcctctgggtggactctcaatgctggtggactcacagcctgactagacacatcaccatccaactccgaaaggacagcctgccctcagcagggcttcctctctccagcttccgcccggcacctgtctgtccctactatcttgctgtggcagtggcttccccagtggacacagcttccccctcccctgagtggcagccgggctctctcctcttggccccaagggccctgtgccaggctcccccagtaccacgctcacatccctgcctgagaggctggacccctgcaggcttcagctctgcccctgctgtgggtggttggggagctctggggagctggggtcccctcccatgggtaagtggttctagactatggcagctgctctgtcctgtgctgggcccagactgccacaccacccaccctcaaacaatcggagttggctttggccaaggaacaaaccagccccaaacttagaggctggaacagtggcatgttctgtaggccaggggtgggctggctcagctgatgcttctgctgctggctgtgcctgtgtccctcctgcgtctgtgatctggggccggtggggcctaatgagctcattcatggctggggcagtaaaggagactgcatcccgggtccagcgtcccacaggccagcccaggcttgagcacgtggtgggctcaggcttccagaaggcctggagagggcaagcctctgcttgtgtcacctttggtacctccctgctggccaaagtgcctcacgaggccaagcccagatgccaggtggagtgagccactgtcctgtgctgggaggagccgcagtcacatggcagaggctgtgcacaccagcaggggagggggcagccagcagtggcacccggctctcgggttcatgtcctggggttgaggaagacacaagatggaagccagggcgatgtggcagagatgggtgcctgctttagactgggtggtcccgggtgatgcgtgagcagcaggcggaactcaccccagggtggggaccccagtgctttgcagaccagcgaagtcgggatacctggatatagtaagctggagatgaaacttgagaactgccactgcgtggatatttcagaccctgagaatctttgtaagacgctatacggggtggtgtgaagacaggacagagtggaggccccaccccagtatctgagcagtgctaatagatatataatgcaagccacatctgtaatttaaaatttagtagctacgttaaaggaaaaagataaaatgaatttcaagaataattttaattaacccaaaatattcaaaatattacttcaaattgtattccagttgcttttagaaaagcaacgcggcatcgtgcattatttttctacaaagtctcctaaatcccgtgtgtatttgacatttgcaacacatctcgattcagagcagccgccttccgaggactcgggggctggtggcagctgtgtgggacacagcagctgtggggatggggcagggcagcagcccacagagggcgagggcaggggccggagaccagtcataccacagaaccctggaggggcttgaggaagggatggcaggagagctgaggagcttctctgccctgtggggcaggctgctgggtgggtcagggcccgaggaagggctgcacctccaagaagggagctagaggagaggtgagagaggagaggggagggaaagcaggtgggaggccttgttggccaagggctgaggcctccccagggagacgagtagggcagcccagcagagtcctgctgggaagaggcctcactggggcagggccaggcagagcccataccccagccccaccttgcaggggatgaagtctggagagtgcagatggggcacctgggatggcaggacaggctcagagctgggacaggagccctgtatccctgcactggggacagtgtcctggaactggccctcagttcctggcttcacctgcacaggatggaggagctgggcctgcatcctgctgaccaccgggtgtactttggacagctgctaggcatgtgtgaccagatcagcttcccgctgggtgagtggggccctccctggtgcgatggggtacggtgctgggcctgggcctcatggtgtatctgcccccatgcaggccaggccggctaccccgtgtacaagtacgtgccctatggccccgtgatggaggtgctgccctacttgtcccgccgtgccctggagaacagcagcctcatgaagggcacccatcgggagcggcagctgctgtggctggagctcttgaggcggctccgaactggcaacctcttccatcgccctgcctagcacccgccagcacacccttagcctccagcaccccccgcccccgcccaggccatcaccacagctgcagccaaccccatcctcacacagattcaccttttttcaccccacacttgcagagctgctggaggtgaggtcaggtgcctcccagccctgcccagagtatgggcactcaggtgtgggccgaacctgatacctgcctgggacagccactggaaacttttgggaactctcctcgaatgtgtgggcccaaggcccccacctctgtgacccccatgtccttggacctagaggattgtccaccttctgccaaggccagcccacacagcccgagccccttggggagcagtggccgggctggggaggcctgcctggtcaataaaccactgttcctgcagctg

SEQ ID NO: 1241 - DNA, 31755 bp, Homo sapiens
gacagcggcgtggcggcggcggtggcggtagcgacggcacgccgtagggcggtcagaaggtttccggttccggtgtaacgttcgggctccgtctcaggggctgaagtttgtgaggtgagtagtggccccgggcccacagagggtaattccagtccgcgccactgtggccggggactcagtccaaggggaggaccgaagcgggagggttcagcgggaaggagtgtgaaaggagtacctggtttggtgggagaagaggttggaatgagattgttgagaggaaaagggcgggggcgggaaggagaccgggttgggagaccagctctggggtgaggagtttaggtagaacaaggtagagtaagagactggttggagtgacggagagagtaaaaatgaagattagcgggggagtggggggctgcagagggaaactcaggttgtagcaaacaagagcacggagtaaggaattccttctgaagactggatttggattctgctgcctgctcattgagaggagagatcattgtacctcgctttccttccgcacccccactacccccgcacctcgcagttattgttgagcatttgattagtgacaaggctaattaccgtttgaaacttttttatccattggctgtttagtttgcacgtcatcttatggaggtaacagtggcacctcatttattgctttgggctttcaaattgcttatactttctagcctatcattcaattctagtggaatataagacccgttaaggtgaggactcttgttagttttgctcactgttttatgtatccaccgcacctagtacattgcttgacacttagtagttactcaataaatatttattgaatgaattaggatgtaaatatggcagtactcattttgtaagatggtaaactgtggctccaaagaattacttaacttgcccaagggcttgtaaatggtggggctcagtgtcccaactgtttctgtgtgaactcttgttttcactttctatggcatctggatatgccgcttttgtgcaatacatgtgtaatatgtagaaattggtacgctgtatgtctactcattgtggggtaatagaaccaccatagaattactcacgtaacttgtcactgaggcagaaaatctttcagtcttagtttcatcacttcaatctactagcttcctttggatataccaaaagtgagtctatttggcatcaagtcttatagactctagtatagaggctaaacttaccaagaatgtagaagttaatcagactggattttttggagaaaagatgtcttaaaacatcttgaaagatgattcccagatctttgataagtggcactgctgggaatagctgagcttggaaattgaggtcagtcaatttattgactcccatttagacaccttttttttttttccccgggacggagtcttgctctgtcgcccaggctggagtgcagtggtgcgatctcggctcactgcaacctccgccttccatgttcaagggattctcctgtctcagcctccagagtagctgggattacaggtgcaggtcaccacgcccagctaatatttgtatttttaatagggatgcggtttcaccatgttggccaggctggtctcgaactcctgacgtcagataatccacccgccttggcctcccaaagtgttgggattacaggcgtgagccaccgcacctggcttttttttttttttttttttttttggagacacagtttcactctgtcgctcaggctggagtgcacatgattttggctcaccgcaacctccgcctcctgggttcaagtgattttcctgcctctgcctcataagtagctgggattacaggtgcccaccacctcacctggctaatttttgtatttttagtagagacaggtgcagtgggtcacgcctgtaatcccagaactttcggaggtcaaggtgggcagatcacttgaggtaaggcattacctggccgatatggtgaaaccgtgtctttattaaaactacgaaattggccaggcgtggtggtgcatgcctgtagtcccagctacttgggaggctgaggcaggagaatcaagtgaacccaggagatggaggttgcagtgaaccaagattacgccactgcactccagcctgggcgacggagtgagactctgtctcaaaataaaaatgagggtattcttttctgagctgaaggatcatcaagtcagctgatggagaccctgtagattgaacatgataattacctgtatgcagaattcccactgggatgaatatgaccacagagaaatgtgacagaacattctttttttttttttttgagacggagtcttactctgttgcccaggctggagtgcagtggcgcgatcttggctcactgcaacctctgctgcctgggttcaagtgattctcttgtctcagcctcccgagtagctgggattacaggcgcctgccaccatgcccagctaaatttttttgtagtttttagtagagatggggtttcaccatcttggccaggctggtcttgaactcctgacctcgtgatccacctgcctcagcctcccaaagtgctgggattacaggcgtgagccaccgcgcccggccagaacattcttaaagatcatgagatttaatttaatatctaagatgactgacctggataaaccctcttttacttgcataccttaaaagaagggaatcctacataagtcagggttgggttagggaatgcctgcctggaagtaggaagaatggaaaagctggcctctggatgggcttttttagttctgttttagtgttactaggtttgcaagtccttgttgatatgacaggatcaagaaagaagctagaactaatttctcagacttagcttattcacagagtttgtttattccgcagatttcattgatcaacttaagagttagaattaaaaatcaaatgggatctctttctgctttgagatatggttcttggggaaaatatttgccttcaaatgagttggaaaaacttgtctagggattgagaatagggctggggaatgcattcctgatgtactaaccatttccctggatcactttagtcttttttttttttgtagagagagtcttgctttgtcgcccaggctggagtgcagtggtgcgattttgacttgttgcaagctctacctccctggttattcccctgcctcagcctcccaagtagctgggattacaggcacatgccaccacgcccagctaatttttttgtatttttagtagaggcagggtttcaccatgttggccagactggtctcgaactcttgaccccaggcagtccatccaccttggcctcccaaagtgctgggattacaggcatgagccactgcacccagcccactttagtcttttcttattctctaacttgtctcttttttttttttaggtgtagtattgagtcctgtttgagctattgttctctttttcctgaaaaatggcactgtcaaagagggagctggatgagctgaaaccatggatagagaagacagtgaagagggtcctgggtttctcagagcctacggtggtcacagcagcattgaactgtgtggggaagggcatggacaagaagaaggcagccggtatgtacctttctgcatcttttatcttaacatatagggtgaccccaaacactgctttgaacttcctcaaaattctctctgttgggaacatctaaaaaaatggcaggccatattttattttcacctgtattatagtgaaaataggctaaataataatttgctttttctcttaattgcttattttttatgttatttatgatagattttaaatcttcgtttggctaccatactgagtcacctaagttagatttacttaggaagtatgcttaagtcagataggcatattcagattcagactgaacatctcaacatacaaaaatctttatgaaatacatgaaaaagcttgaaggaggtagattttgttaatggtaggcttctacaacttgctatttgggaaaggtgagggtggttattcatctcaaacttgatgttcaaggtaaacaggttgctctaactgcaccacttcccacgccaaaaaattataactattttcacctcacagggcaaggtcatttagtgtaagagagatgggaatcctacaaaaaacttaaaatttgtttcactcctgggaataaaattccagtgttggtacctgttataggcctagtattagactgtgtactcttacctttccaaccctaccaccgcctttcttcctgtcagatcatctgaaaccttttcttgatgattctactctccgatttgtggacaaactgtttgaggctgtggaggaaggccgaagctctaggcattccaagtctagcagtgacaggagcagaaaacgagagctaaaggtaggttacaatttactgtctaatgagctcaggactgttttgaatggtaacagagttgctgagcttaccagttcacacgttgatatcctctatttagagcagcaaatgttcaagagaggtacttagacattagagtaggagagatgaattagtgtcatcaccatctgaactacctctaagttcatgggttgaaatatccaaagaaataattggcagctttgtctttttttagataacaggagttttgattctcatgtttctccatatttcctttttttccttcttactgttacttataaactgattgctctaagattttatctttgatttatttgaggcctaataagttgttttagaatgtgactccactggtacctgagctgtacacctcattgttgcctctttgtagaggtttctctgcaatgcacttgtagatagaataccaaaaaataactattatttattatattcttgagagcttaccatttgctctatggcatattgctggtcctctgctgccatgagtgaaacacttggaggagttgtcagtacccccttaactactacactttttattctgtagttgccgactgatcctggcctctttcagtattagcagtatcaagtagcctatttttctactcatttcccagtatctctctttaggagaaaaaaaaaagttctgtgactcctatcaaaccttccaaagttcttctgataccttggctatcccattacttttcctgagggaaaagagtgaataagtaatgtctgcttggtcccctggccaggctatggaactaaaaaaaaaagcagagagatttgtgccctttgtgtttggagcattgtagggtggtcagagaaggagagatagtccttgccttaaaacaatttgtaatttgtcaggcagtgtggcatgtgcctgtaatcctagctacttgggaagctgaggcaagaggatctcttgagcccaggagttacaatttagaagaggcaggggtatcacaaaatatatattcacgtattataaaatctaagtagcagtttcatgtaaattttagggttggttatagaatttcagacctatgttgaattttgttatatttaaggtggaatgattgatccacagtatacacagatctgtacagtgaagattatgtcacgatagggcatacttctttttttttttcctttttttttttctaagggtgagtctcactctgtcgcccaggctggagtacagtagcgcaatcttgactcactgcaacttccacctcccaggttcaagtgattctcctgcctcagcctcctgagtagctgggattacaggcacatgccaccatgcctggctaatttttgtatttttagtagagacggggtttcatcatgttgatcaggttggtctcgaactcctgacctcaagatctgctcgcctcggcctcccaaagtgctggaattacaggcatgagccactgcgcctggccagtagggcatacttctgtatgagtgctgagggcatgctgtgaatgaagtgactacattgggtgggattaataaaaatggcttcttgaaggaggtgtctagatagccttgggatacgggtcccatttttggtccattcaggtccccaccccacacaatatattatgggagagtcctttttcttgaactgtaggagttccaggaagcgctcgcccctggccgaggatatgtccttgcaaaacacgagccctcctagtgaagaggggatgtcacccaaagcctaccaccggtgtgtacatttgctttttcccattgtcccttccagttggccactctcggtcctgttaaattcaccttgcaaattagtcatcatatttgagtttccattgtttgatgaaaacaaagtgttaatggggattactgaagaagaaagagaaagcccctgtcctggaagagcttagacttagttgggaaaactatactaacattgaaatacttaacacttggcaaacagaatatcaacaatgtaatttaacctaatatgaaccaagctcttacacgctaagagaatgtgaaacaaaagtttaatcagagtgggataggttataatgaggaaaacttcttggaggaggtgagttttaggcaggatttggaacaggggttgtggaaaagttgagagaaatcattataaatgtgagcagtagcatttgcaaagaccttgagatgggaacatttataagaacatgggaatgaaatttgtttgactggattaggagaatgttgaagttgggtgagatggagagtctagtagaccctgcttctggcaggtggctatttgcaaggttgtgtcatattcccctgggaatagccagaaaatgctggtaggggctaggataattcttcccttctccccacggggagggatacagcttttctttcatcttgggttcccttaggaggtgtttggtgatgactctgagatctctaaagaatcatcaggagtaaagaagcgacgaataccccgttttgaggaggtggaagaagagccagaggtgatccctgggcctccatcagagagccctggcatgctgactaagctccaggttagtgattagggactggaagcaaagtggttttgtgagttgaagaagcaaaaggtgcatgggtctgtatttattgtggaattttttttttttttttttttttgaggtggagttttgctcttgtcacccaggctggaatacagtggcgcgatctcagctcactgcaacctccgcctcccgggttcaagcaaatctcctgtctcagcctactgagtagctgggattagaggcacccaccaccaagcctggctaatttttgtatttttagtagagatggggtttcaccatgttggccaggctggtcttgaactcctgatgtcaggtgatgcactcaccttggcctctcagagtgctagaattacaggagcgagccactgcgcccggctaattttttgtatttcttttagtagagacagggtttcaccatgttgggcaggctggtcttcaacttctgacctcaggtcatctgcccaccttcgcctcccagagtgctgggattataggcgtgagccagcgtgcctcgccttattgtgatcttgatttgaattagtgtttagcatttggggtaaacttttttttttgagatagagtttcactctgttgcccatgctggagtgtagtggcgtgatctcagctcacggcaacctccacctcccaggttcaagcgattctcctgcctaagcctccggagtagctgggactacatgcgaacaccactacgcctggctaatttttgtatttttagtacagatggtattttgtcatgttggccaggctgctctggaactcctggcctcaagtgatctgccacctcagccgcccaaatggctgggattacaggtgtgagccaccatgccaggccagcatttgggaaaattttatttcctgctttatgttttagcgttctttgatttgaccaggagtattctaggtaagggtattgaaattgccatttactgtggcaagcaaagtgtgttatgtacattatttgcctaattacctatgtcgttgagtcattgagaaaattaaatgaaatgatcagaactcatcttaatgacagaggagactctccaaacataatgcaaagaagatataatccactgataaataattttaagttgactttatttttttttaacaggaagtatttgtgttttttcaattggcattgttaaataataccacataagtgtttcttttaccatttaatatttgaggggggtaatagaacatatacagaaatatgggtgggtggatttgcatatatgtgatatttacagaaggaaagaaatggattttttttgtgtgtgtgtgtgagatgttctctctgtcactcaggctggagcgcagtggtgcgatctcggttcactgcagcctctgcctcccaggttcaagtgattctcctgcctcagcctcctaagtagctgggattataggcatgtgccaccacgcacggctaatttttgtatttttagtagagacagggtttcaccatgttgaccaggctggtctggaactcctgacctcaagtgatctgcctaccttggcctcccaaattgctgggattataggcgtgagccaccgtacctagcctgtttttgtttttcaggcaaggtctcacttttttgtccaggctggagttcagtggcgagatcttggcttactgcaacctctgcctcccgggcttgagtgatcctcccaccttggcttcccaagtagctgggactacaggtcaccatgcctggctgatttttgtattttttttaaagattgagttccaccatgttgcccaggctggtcttgaactcctgggctgaaatgatcctcctgcctcagcctcccaaagtgctggacttacaggcgtgagctaccacgcccagccaattattttcttttttggggggtgggggatggagtcttgctctgtcacttaggctggagtacggtggcgcgttctcggctcactgcaacctctgcctcccgggttcacgccattctcctgcctcagcctcctgagtagctgggactacaggtatgtaccaccatgcccgactaattttttgtatttttagtagagatggggtttcaccatgttagccaggatggtcttgatctcctgacctcgtgatccacccgcctcggcctcccaaagtgctgggattacaggcatgagccaccgtgccaggcccaatgatgttttttatggagaatggggatggacgtattcacaacatatccttttgttatgtttctttcttttttttttttgagacggagtctcactctgtcgcccagagtggagtgtaatggcgctatctcggctcactgcaacctccgcctcccgggttcaagctattcttctgcctcagtcccttgagtagctgggattacaggcacgcgccaccacgcctagctaatttttttgtatgtttagtagagacggggtttcaccatgttggtcaggctggtctcgaactcctgacctcgtgatccgcccggctcggcctcccaaagtgctgggattacagacgtgagctgccaggcccagcctgtaatttttcattttattttattttattttttgagacggagtctcgctcttgcactgttgcctaggctggagtgcaatgccgtgatctcagctcactgcaacgtccgcctcctgggttccagcagttctcctgcctcagcctcctgagtagctgagattacagaacgtgcatcaccatgtccagctaatttttgtatttttagtagagatggggtttcaccctgttagccaggatggtctcgatctcctgacctcgtgatccacctgcctcagcctcccaaagtattgggattacaggcgtgagccaccacgcccagccctgtaatttttaatttttttattttctttctttctttacttatttagagatggagtctccccctgttgtccaggctggagtgcagtggcatgatcttggctcactgtaacctccaccttctggattcaagcgcttctcctgcctcagcctcctgagtagctggcattacaggcgcccaccaccacacccggctaatttttgtatttttactagagacggtgtttcaccatgttagccaggctggtcttcagctcctgacctcaagtgattcgcccacctcagcctctcaaagtgctgggattacaggcgtgagccaccatgcctgacccttccgtaatttttgaattttgaatatatcacctattcaagaaaaaatgttaaagacaaatgtttaaaaatatcttgaagcagtttaagaacaggtctgttttgcaaaatgtaagaggagttgtttggccataccctcaaagcttatcattctgaacttctttaggacagaaggggtttatagagactagggagcaggtctttgcaccatcgtctcttgtttcccaaactagtagttcaagtactaatatcatgattttttaaaaaaaattaagtataggctgggtgcggtggctcacacctgtaatcccagcactttgagaggccgaggtgggcggatcacgaggtcaggagatcgagaccatcctggctaacagggtgaaaccccatctctactaaaaatacaaaaaattagccgggcgtggtggtgggcgcctatagtcccagctactcgggatgctgaggcaggagaatggcatgaacccgggaggcagagcttgcagtgagccaagatcgcaccactgcactccagcctgagtgacagagcgagactccatctcaaaaaaaaaaaagaaaattaagtataatattttgtgtaggttctgttaggtttgcatgcattatttaagtggttaacactagacctgtaaggtaggtactgttttcttcccccttctagacacttaggaggtttagagactaagttccttatccaagataacaaaggcattaagtggcagagttaagattcaaactcaggtttctctgactccagagtctcaatcatcacactatattactacctaatatgctaatcttgctttaggaacatgggttgaaaaattccagtgctcacttatcttgactaaattttttgcactgtggtgcaggcagaatgtggtatagtcattcaaaacattttaagtgtctagacctgagagccttgtgggtttaaaaacctgaatgggagaagtaagaaggagaaattaacagtttttcaatttttttcctggagagcagatcaaacagatgatggaggcagcaacacgacaaatcgaggagaggaaaaaacagctgagcttcattagcccccctacacctcaggtattgtgtctagattactctgaacagaataatctttggcacagaatttcttgccatccactcaaaatgagagactagaagaggtgactacatgtttcacttcataatcatctgctacagtctaccatgatgtgtgtgtatatctgtgtgtatgtatgtgtgtttgtctgcctgtcttaattcctctgatttctttttctctatctcacagccaaagactccttcttcctcccaaccagaacgacttcctattggcaacactattcagccctcccaggctgccactttcatgaatgatgccattgagaaggcaaggaaagcagctgaactgcaagctcgaatccaagcccagctggcactgaagccaggactcatcggcaatgccaacatggtgggcctggctaatctccatgccatgggcattgctcccccgtgagtgtctatttcatggaataccttttcatttctgaagtttgagaagcaataaatacctttgaatgttactgatctggctgggcgcagtgcctcaggcctgtaatcgtagcactttgggaggctgaggtaggtggatcacctgaggtcaggagtcaggagttcgagaccagcctggccaatatggtgaaaacccatctctactaaaaatacaaaaattagccaggcgtggtggtgcatgcctgtaatcccagctactcgggaggctgaggcaggagaatcgcttgaacacaggaggcagaggttgcagtgagctgagatcgtgccactgcgtgggtgacagagggagactccggctcaaagaaaacaacaaacaaaatattactgatcctctttttccacagaacctagatcatttctcacagtttcatatttcttaggtgtgattgattaaccagttgaattttttctcgtcttccctgttggagggtttattatcttcttatgatttatataactgagattaaggttattcatctaatgttggagctaggagtatagccaggtttccttcctggtttcaaactcagatttatccattaaaccacattgtgtgagactagatctgaggttcctctgcaactggtcaaagatgttacattttttttagcatctacagttggtctggcatcccatgagtgacataagaattcagggataaggaaagataggattataaattcatataatttataaactcatttcatttggttgtcctgtatactgaaatatccactttgatatttttaatcaagatactattggcagggcgcggtggctcacacctgtaatcccagcactttgggaggccgagactggcagattgcttgagctcaggagttcaagaccagcctaggcaacatggcaaaaccccatctctctaaaatatacaaaaattagccaggcatggtagagcatgcgtgtagttccagctacttaggaggctgaggtgggagaatttctttgggcctgggaggttgaggttgcaatgagctgtgattgtgccactgtactttagcctgggcagcagagtgagaccatgtctcaaaaaaaaagatggtattgctcactgatgagattgttccctagaattattttattgtcctttttgttgttgttgttgttgagagggagtctcactctgtcacccaggctggagtgcagtgatctcggctccctgcaacctctgcctcccaggttcagtagctgggactacaagtgcccgtctaaattttgtattttttgtagagatggggtttcactgtgttgccaaggctggtcttgaactcctgggctcaagccatccacccgcctcagcctcccaaagtgctgggattacagtgtgagccaccacacccgtccatccaaataactcttatagagaaggcactgcagcctcaacttcctgggctcaagtgatcctcctcaacctcctgagtaggtgggaccacaggtatatgccaccgcacccagctaattttaaattttttgttgagatgcagtctccttgtgttggccagactggtctttaactcctgggctcaagtgatccctctgccttggcctcccaaaatgctgtggttccaggcttgagccaccacgcctggctttattttgttttttgcttgccttaatgttccatacaggatttatttctttgcgggctatttttcaggaaggtggagttaaaagaccaaacgaaacctacaccactgatcctggatgagcaagggcgcactgtagatgcaacaggcaaggagattgagctgacacaccgcatgcctactctgaaagccaatattcgtgctgtgaagagggaacaattcaagcaacaactaaaggaaaagccatcagaagacatggaatccaataccttttttgacccccgagtctccattgccccttcccagcgccagagacgcacttttaaattccatgacaagggcaaatttgagaagattgctcagcgattacggacaaaggtatctggcttagagtataacacagaatttggaaaaagttaagaagctgacaagaaaacattgttaaatctctgtgttctaggaaattagataaataggtcatttaaagcagcagtcctcaacctttttggcaccagggacttgtttcatggaagataatttttcccctggagtaaggatggtttcgtgatggttcaagcacatagcatttattgtgtactttattattattatttttttcgagatggagtgtcgctcttgttgcccaggctggagtgcaatggggcgatctcggcttgctgcaacctttgcctcccaggttcaagtgattctcctgcctcagcctcccgagtagctgggatcacaggcatgtgccaccacgcctggctaattttgtatttttggtggagacggggtttctccgtgttggtcaggctggtctcgaactcctgacctcaggtgatctgcccactttgtcctcccaaagtgctgggattacaggcgtgagccaccgcccccgccttttttttttttgggcggggagggggatggagtcttgcactgttacctgggctggagtgcagtggtacagtctcagctcactgcaacctctgcctcctgggttcaagcaattctcctgcctcagcctcctgagtagctgggactgcaggcatgcgccgccatgcctgacgaattttttgtatttttagtagagacagggtttcactatgttggcccggctggtcttaaactcctgaccttgtgatctgcctgccttgacctcccaaagtgctgggattataggcgtgagccactgtgctggcctatttctattattattttattgtaatatatgatgaaataattatataactcaccataatataaaatcactgggagccttgagcttgttttcctgctgaaatggtcccatttgggtgtgatgggagacagtgacagatcatcaggcattagattctcataaggaatgtgcaacatagccccctcacatgtacagttcacaatagggttcgcgctcctctgagaatctcatgccaccgatgatctgacaggaggtggagctcaggccataatgcaggtaatagggagcaatcgtaagtacagatgagactgttggcttgcctgctgctcacctcctgttgtgcagcccagttcctaaaagactgttgggttggggacccctgatttaaagcaatgaatactttgaaaaatgtgctggacaagatggctcaagcctgtaatcccagcgctttgggaggccgaggtgggtggatcacgaggtcaggagttcaagaccagcctgcccaacatggtgaaaccccgtctctactaaaagtacaaaaattaaccgagcgtggtggtgggtgcctgtaatcctagctacttgggaggctgagtcaggagaatcacttgaaactggaaggcagaggttgcagtgagctgagatcgcaccactgcactccagcatgggcaaaagagcgaaactccgtctcaaaaaatatatatatatatttattaatataatacataatttttttagcagattttacttcctaattcgtttctacataagtggaaatattatgaaattgagtttgaaaattctccacatacaactaagtggagggaaacaatttgaaacattctgagtgactaaggaaggcttgcctgtagttaaaatttaatgagacagtacacctggagagttgaattgattgtatattgaatgacctttgccgcctttttatcctctcaaagtgaggttttcataaaattccttttttttttttttttgagacggagtctcgctctgtcacccaggctgcagtgcagtggcacgatctcagctcactgaaagctccgccttccaggttcatgccattctcctgcctcagcctgctgagtagctgggactataggcgcccgccaccacgcccggctaatttttttgtatttttagtagagacggggtttcaccgtgttagccaggatggtctcgatctcctgacctcatgatcctcccgcctcggcctctcaaagtgctgggattacaggcgtgagccaccacacccggccataaaattctatttctgcgtatttactgcaggcatatactgtggagtgcagggaggggttgaaggtgagatctatgtatatgaactaaataaaggataaaataaagcagaacaactcctttctaagctttcagaaattatgaacttgttgcgttaggtgtaaagagttcaacggggaagtgttttaaaatttgggattcttggccgaggtgggcgaatcactaggtcaggagatcgagaccatcctggctaacatggtgaaaccacttctctactaaaaatacaaaaaaatgagccgggcgtggtgatgggcgcctgtagtcccagctactcgggaggctgagtcaggagaatggcgtgaacccgggaggtggagcttacactgcactgcactgcagcctgggtgacagagtgagactccgtctacaaaaaaaaaaaaaaatatttgggattctggccgggcacagtggctcatgcctgtaatcccatcactttgggaggccgaggcgggcagatcacctgaggtcgggagtttgagaccaggctgagcaacgtggagaaaccccatctctactaaaaatacaaaattagctgagggtggtggcacatgcctgtaatcccagctactgaggaggcttaggcaggagaatcgcttaaacctggaaggtagaggttgctgttagccaagaccatgccattgcactccagcctgggcaagaagaacgaaactccgtctcaaaaaaaaaaaaaaattgagattctacacattctgttttctatgactccaatttatctttctgtcttggattatcttgtttttaggctcaactggagaagctacaggcagagatttcacaagcagctcgaaaaacaggcatccatacttcgactaggcttgccctcattgctcctaagaaggagctaaaggaaggagatattcctgaaattgagtggtgggactcttacataatccccaatggctttgatctgtgagtttgttttagtacctttttaaaaaaacagtttttaatcagctgagtttaagactcaagttaataccttttagtaaagctatggttttagtgggaaggatggtactcattcattaattaaaatttttaaatccaagagagataagtaactgtacacaaggtcctgttattttttttttttttttttttgagagggagtctcgctctgtcacccaggctggagtgcagtggcacgatctcagctcactgcaacctccacctcccgggttcaagagattctccttgaattctccttgaatctcagcccctcaagtagctgggactacaggtgtgtgccaccatgcccatctgctttttgtatttttgatagagacagggttttgccatgttggccaggctggtctcgaactcctgacctcaggtgatccgcccaccttagcctcccaaagtgctgggattacaggcgtgagccactgcacctggccaagctcctgcatttgtaagtgatgtatcatatatataggctgtttttagcttttggggttaatgtaggataaccagggacacaatctacaaaagcaaagtctagaattctttttgctctgttacacattgttgcctgtttttagcattattttccttaattacattcttttgctacgtattataggtgtttacatttcctaaagatctcattgtgatagagcaaggattattagttggtaggtgagataatagtaaatatagcatataaggctgggctcggtggctgacacctgttattccagcactttgggaggctgagggctgaaggattgcttgagcccaggagttaaagaccagcttgggcaatatggtgagacctcgtttctacaaagattaaaaaaaaaaaaaaagtagctgggcatggtggcttgtgcctgtagtcctggctacccaggaggctgatgtgagagaatcacttgagcccaggagggtctgtgctgcagtcagctatgatcatgaccactgcactctatcctggacaacagggtgaaactctgtctcaaaaaaaaaaaggatataagacacatttgaagagctttaaatatatctgctccatccattttttttttttttttcctgagacggagtttcgctcttgttgcccaggctggagtgcagtggagcaatcttggttcaccacagcctccgcctcctgggttcaagtgattctcctgcctcagcctcccaagtagctgagattataggcatgcaccaccacgcctggctaatttttggtgtttttagtagagacgaggtttctccatgttggtcaggctggtcccaaattcccgacctcaggtgatccacccgcctcagcctcccaaagggctgggattacaggcatgagccaccacgcctggcgttttttttttttttttttttttttaagacagagtctcactctgttgcacaatctcggctcgctgcaacctctgtctcctgggttgaagcagttcttctagctcagcctcataagtatccgggactacaggcaaataccaccacacctggccagtttttatatttttagtagacaagagtttcactatttggccaaactggtctcaaactcctgacctcaggtgatccacctgccttcatctcccaaagtgctgggattataggcataagccacatcacctggccctgctccatcattctgatacatggctttagtagattttgtcttagcctttcgttgccccttctttgtcagccactgttccagggacttattgtcactaatgagagaacatagcgtctgtcagctgtggcatggtagaaaaaaggttgagaatgattgctgtggagagtgtgttcaaccatagagggactcagttttctcatcatgaaaattatgtgtaatttaactatatattttaggtacctaaatgctattttaggtatatcaagcacaagaacccattatagagagtgggttttttcattgtatttctgagactcctctcttagaatcatctctacccgcatatcgtgttttcttttcttcctacaattttagtacagaggaaaatcccaagagagaagattattttggaatcacaaatcttgttgaacatccagcccagctcaatcctccaggtaatgtatagattcctgaatcaagtctctagagcagcattacccattggaaatttatacagtgaggaacatgttctgtatctatgctgttcaatacaatagccactacccatgtgtaattcttttttttaattcagtttttttcctgacaatagtttgttgtttgaccagtgaacatacattttaagtgcatattcctgtgcttagaatttcatgagacagccaagcatggtggctcatgcctctaatccaaacactttcggaggccaaggcaggaggattgcttgaggccaagaattcaagaccagtctgggcaacacagtgagacccatctcaaggaaaaaaaatttggctgggtatggtggcttatgcctgtaatcactgcactttgggaggctgaggtgggcagattgcttgagctcaggagttcgagatctaggcaacatggcaaaaccccatctctacaaaaaataaaaaatcagccgggcatggtggtgtgcatctgtagtcccagcctcttgggaggctgaggtgtggaggatggcttgagcctgggaggtggaagttgcagtgagctgagatggtgctgctgcactccagcctggatgatactgccagaccttgtctcaaaaaaaaaaaaaaaaaaaaaagaagaaagaaagaaagaaaaaaacccaaaatttcatgaagctttacatttacagttccctggttgttcctaggaaagagccctcagcttgctccttttatagaaccacatgttgttgtggcatccacagctaaatgcaaatgcaagagccaaactcttgggttggtgtgttattagatgcgatatgctccactacccactgtgagggatgctaattccaaagggctttttgttagtttcccaaagttgaaactgggaaacaaagttgcttctattttttttttttttttttttttgaggaggagtttcgctcttgtggtccaggctgcagtgcaacggcatgatctcagctcaccacaacctctgcctcctgggttcaagcaattctcctgcctcagcctcctgagtagctgggattacaggcatgtgccaccacgcccagctaattttgtatttttagtagagacagggtttcaccatgtttggtcaggctggtcttgaactcctgacctcaggtgatctgccagccttggcctcccaaagtgctgggattataggtgtgagccaccgcgcccggccttttttttttttttgagttggagtttcgcttttgtcacccaggctggagtgcaatggcactatctccgttcactgcaactttcacccccctgggttgaagctattctccggccttagcctccggagtagcttggattataggtgcctgccaccacacctggctagtttttgaacttttagtagagacagggttttgccatgttggtcatgcttgtcttgaactcctgacctcaagtgatctgcccacctaggcttcccaaagtgctgggtttaccggcgtgagccaccgcacctggccctaattttgttttctacatttgccaggtatcattgaatgagggggtttaacagcttaaaggaaaacaactaagaacactacttaagaaagataagaggccaggcgaggtggctcatgcctgtaatcccagcactttgggaggccgaggcgggcagatcacgaggtcaagaaatcaacaccatcctggctaacaaggtgaaaccccgtctctactaaaaatacaaaaattagccagacgtggtggcgggtgcctgtagtcccagctactcaggaggctgaggcaggagaatggtgtgaacccaggaggcagagcttgcagtgagctgagattgcgccactgcactccagcctgggcagcagagcgagactccgtctcaacaaaaggaaagataagaatgttttttaaaaacatagccatattgccgggcaccaggcctgaactgattttaatcttactgatcccttattaacgagttttcttcattttctatttaaagtttatacacacacacacacacacacatgttttttgaaatggagtctcgctgtgttgccaggctagagtgcagtggcaagtggcacaatctcggctcactgcaacctccacctcccggattcaagtgattctcctgcctcagcctcccgagtagctgggactacaggtgcgtgccaccacgcccagctaatttttgtatttttagtggagtcagggtttcaccatgttggccaggctggtctcgatctcttgacctcgtgatctgcccacccgtgcctcccaaagtgctgggattacaggtgtgatccaccgcacctggcctcaatatattttttacataaaatgtttataatagagttgggtctcacttggttgtccaggctggtctcgaactcttgggctcacgccatcctcccaccttggcctatcaaagtgctagaattacaggcataagccactgtgtccagcctaaagtttcttttaatgatattgatatttacctaggtttctttaatatttttattgctgtccgggcctggtggctcatgcctggccaacatggtgaaaccccatctctactaaaaatacaaacattagccaggcatggtggcgtgtgcctgtaatcctagctactcgggaggctgaggcaggagaattacttgaacccaggaggcagaggctacagtgagctgagatcgtgccattgcactccaacctgggtgacagagtgagagagagaaaaaaaaaaaatatatatatatatatatgtattcttactgctttggtatactaatatctctgcctgacagttgacaatgacacaccagttactctgggagtatatcttaccaagaaggaacagaaaaaacttcggagacaaacaaggagggaagcacagaaggaactacaagaaaaagtcaggctgggcctgatgcctcctccagaacccaaaggtgcatttctcagtggcctcttctgttaaaaagagtggcaagtttatgtctttaatcctggaggaactttaacatctctgtgtttgagtgatttctgtttctaagaattattcttggggtcctttttctccaagttttctaccatcttttcatattaagataggtcaacacattcattatagaggccatttatggcttatttttaagcatactgatcatacaacactctggttttcctggaagaatacaggtcttgaaattcatggagatagtagttgcagtatttgcgtagactttttatgtacataattcttaatgttttaatttttacaatgaaagtacaggataaaaaacttgaccctgtagttacattctcgttcagcagtattttgactgagcactattatttataagctctttcactagatgctgtgatcagtgtgaaaaatatgaaaggaattaagttccacgtccttcataaattttcagataatgtaaatgcataccaatcttcaacttaattgtgtgaacttctgcaaatgctgaagtgattggatgggattttcaagataggagttattggaggaagtgagtttagagcagagatttgaaataggtaaataatatgaattggtatggaagaaataacaagttactccagctggagaagtgacttcaaagactgattgttgtcctctcttcactgcagtgagaatttctaatttgatgcgagtattaggaacagaagctgttcaagaccccacgaaggtagaagcccacgtcagagctcagatggcaaaaagacagaagtaagtgccatgggattgggtggaaacctcgggcaagtacctttcccaaactcttctggggggtccatatttggagggaggggagagttctccgttgctctctctttccctcagccctgcctctgatcttcaatgcctttctcacttgtggatgtccttcctgtcacgacagagcgcatgaagaggccaacgctgcccgaaaactcacagcagaacagagaaaggtcaagaaaattaaaaagcttaaagaagacatttcacagggggtacacatatctgtatataggtaggtgtccatactgggccaaacttccccttagaattactaaaacattttccaagtgcttgaggcagaatcattgtggcctaaaagcatacctaacaccagttcctactctcttttaatgaccctagtgtggatcaagagctagtaaatcttgtaaaatagcgagagttaatgacttatgtttatggttacccagttcttccctctcaagtcttctttttttttttaccagaatattagttctgaacaagtcaatatacttgttcaggccaagatgtgaactaaagattgtatgtcctttgagaactataaaatatcatcctatttcttttttttttcatctttttttttttaaatggtctgagtttgcttccaacatccatggaagcattacaaattttctttcctccgtagtcatatccttaccctgatgtattgctgtgtttcatcctcactccaaaatgcattttatatgttgtaaatatttttctacctttgtgttgatttaatgtttttattcttttatgttgagtacatgtgtatcttctatttttaaaatgtgcttatttctattaactagttctttattataaaagtggtacattatcacaaaaatagtgaatgcttattaagatttaaaaaattgtctgacaacacagaagaatacttactcaaaatgtctcctttctattctctgatcccttagaaccactctctttaggtaattgctattaacagtttttcacatatcctcctagaaaattttcatgcctatatagtgatcctatatatatattttatttatttatttatttattttgagacggagtttcagtcttgttgcccaggcaggagtgcaatggcgcgatctcagcgcactgcaacctctgcctcccaagttcaagcaattctcctgcctcagcctcctgagtagctaggattacaggcacgcacccccacgcccggctaatttttgtatttttagtagagatggggtttcaccatgttggccaggctggtcttaaactcctgacctcgtgatctgcccactttggcctcccaaagtgctgggattacaggcatgagccaccgcacccagccaagtaatcctatattataagagtctaagggtctagaggacaaaaagtctgtaggtctttacattgtcaagaacaatgagattgtaagtatttttggatgatagtaaatacctctccctgactcttagagtaaactttggttagtaatgtaatggttaatgtaaagtgctagactttgaagaaatgtaagagtgtggaaatatttctagactcatcaactctaccttttaagcattcatctatttgtttactccagaggcctttgtttatagagaggaaaccattttggattcatctttttacttgccactccattcaggcagctgctgatgctaaaatggaagacataactaaactttcccttctccagagttcgaaatttgagcaacccagccaagaagttcaagattgaagccaatgctgggcaactgtacctgacaggggtggtggtactgcacaaggatgtcaacgtggtagtagtggaagggggtgagtctgaaaaacttgagggagactgtccccagacaaccctaggcttagagtgattagcattgtggggagaaaggagaaaaagatcgtattttagtgccatacctgatataatatgctaggtctctgcttctgtgttttttggagtagaaggccctaagatgtggttcctgagattgcttcaactaccacattaatgtctgagctcagaggttctttctaccccatcatcttccacagttctggcaaaattattcttctctgtttccaggccccaaggcccagaagaaatttaagcgtcttatgctgcatcggataaagtgggatgaacagacatctaacacaaagggagatggtgaatgggggttagaggggattaagggggagagctatgggaggtggggatggtgcatctgtccgttcatcttatttcctccctgtgacactcttgataacactagatagtgttcaggaattttagaaagacccgtttagactttgagcctcctagacattcatacaatatttactacatgattatatgcatgaatggtaaagctatttttttgcctatcatttaaggcttttctaccagctggtttctgtgtctgtcctggatctgagtaccggttacatgaatttattcagtatttgaaaattcagcaagcagctaggcatggtggctcatgcctgtaatcctagcactttgggaggctgaggcgggcagattgcctgaggccaggagttcgagaccagcctgggcaaacaacgtggtgaaaccccatatctacaaaaagtacaaaaattagctggatgtggtggcacacacctgtattcccagctactcaggaagctgaggtgggaggatcacttgagcttggggaggtcgaggctgcagtaagctgtgatcgtgccactgcaatccagcctgggtgacagaatgagaccctgtctcaaaaaaaagaaaaagcaaatctagtaagctatacattcatgtgtacagtgtctatattatattattatttgatttttttttttttaaggattgaagccaaaaagatcttcaggtcaaaaaagctctgctttgatcaaactatttcttttgtctgatatatatatatacacacatacacatacatacacacacacacacatacatacacacatgtacacacacatacacatacacacaatacacacacatacatgtacatgtacatactcacacatatgctcttcaacttaatgatggggttagttccaataaacctgagataaattgaaaatattgttaagtcaaaaatgcatttaaggccaggcacggtggctcacacttataatctgagcactttgggaggccgaggcgagcagatcatttgaggtcaggagttcgtaacagcctggccaacatggtgaaaccccgtctctactgaaaacacaaaaattcggggcgtggtggtggacctctgtaatcccagctactcgggaggctgaggcaggagaatcgcttgaacctggcaggcggaggttgcagtaagctgtgatcgcaccactgcactgcagcctaagcgacagagcaagactccatctcaaaaaaaaaaaaatgcatttaatacatctgacctacaggacatcataacagcctagccttccttatactttctcagaatacttagattagcctacagttgggcaaaatcatctaacacaaagcctatttttatctcatgtaagagtattttactgcatattgctagcccaggaaaatctcaaaatttaaaatttgaagtacattttctactaaatatttatcactttcacactatactcaaggcaaaaaattgtaagtcaaggactgtctgtctatatttgaaggccagacattcttctggccatcatactcccattagtgttcattcttctcatctttgaacacctggattagcatttaaaatctgcagagaggcctggtgtgatggcttatgcctgtaatcccagcactttgggaggccgaggcgggtggatcacctgaggtcaggagtttgagaccagcctgacatggtgaaaccccgtctctactaaaaaatacaaaaatgagctgggcgtggcagcgtgcgcctgtaatcccagctactcgggaggcctaggcaggagaatcacttgaacccaggaagcggttgcagtgagctgagatcataccacttcactccagcctgagtgacagagcaagactccgtctcaaaaaaataaaaatataaataaaatctgcagagagttcatcttaagatacctgagaataaaaaatattttgttctacacgtgcatttttttttttttttttttgagatggagtctttgctcttttgcccaggctggagtgcagtggcaccatcttggctcactgcagcctccgcctcccaggttcaagtgattctcctgcctcggcctcctgataagctcggattacaggcacctgccaccacacctggctaatttttgtatttttagtagagatgaggtttcgccatgttggctaggctggtctcaaactcttgacctcaggtgatccactcacctcagcctcccaaagcgctaggattacaggcgtgagccaccacgctggccgataattttgatttggtatatctgccctcctcctccattgggtgaaagttttttgagagtaatatatgatgttgacatatgaagcctgcctcccaaagtgcctaggacaagtttttattcttgactgcttgtcttttatttccttattcccagtacctggtggagctcttgattcataacaagtgctatgtaaatgctaattgtatcaattaatattactgcctacttggagcttcaagtctaatttggggaaaataaagagcaacagaaaagagaacacttggtccaacacataaaaagggtgataatattttagagagtttgggtagacttgaatattatttgtttagaacctgaatctcaagtctaagtctgtaacaagatttctcttccagatgatgaggagtctgatgaggaagctgtgaagaaaaccaacaaatgtgtactagtctgggaggtaggtgatcctttgtaaaacattgtaaaactttagccaactcctgaatatttatactatttgagtggagcaatggaatgtaagatgtaatcagtgaataatgttttaaataatttatgtttctttttggaatccatttttaaatggttggcagtaaattcttcctgatcatctgtttaattaaattcgtgagtatttagtatatgctatctggggaagtgcgtggacagtgctgctggtagcaggaatacaaattctctaccgaaaattatttatttcacagtcatgaatatgagacttggaaacgggaatgaattgttgttggatttacctttggatatagtgaaggaagtactagacttaagaatataaagttaggaggctgggcagtgctgcttattagctgtgcaatctgggcaagacacttaatgtcaaattctgttgccttagctattgttctctatattgtcaagtttttgagaatgaaattagataattatgtgatagtgcttcataaaatgtgactgaatcactcttcaagtggaatattttttatggttatctagttctttaacccctgaagccttcttagagaaccagtattaaaaccagtattaatgttttcatgtttgcttttaggtatagtacatgtatatctttttttgggggcgggggggcggggggcggtatggagtttcgctcttgttgctcttgttgcccaggctggagtgcgatggcgtgatctcggctcaccgcaacctctacctcccaggttcaaacgattctcctgcctcagcctcccaagtagctgggattacaggtgcacgccaccatgcccgactaatttttgtatttatagtagagacagggtttctccatgttggtcaggctggtcttgaactcccaacctcaggtgatccgcctgcctcggcctcccaaagtgctgggattacaggcatgagccactgtgcccagcccctccatttctttttttttttttttgagagagttttgcccttgttacccaggctggagtgcaatggtgcaatctcagctcaccgcaaccaccgcctcctgggttcaagtgattctcctgcctcggcctcccgagtagctggaattacaggcatgagccaccacgcctggctaattttgtatttttagtagagacggggtttcgccatattggtcaagctggtctcgaactcctgacctgaggtccgactgccttggcctcccaaagtgctgggattacaggcatgagtcactgcgcccggccatatatcttctatttttaaaatgtgcttatttctagtatatgtgctgctgaagcgagcagtaaaatgtgcttatttctattaatgaattctttattataaaagtggtacattattacaaaagtagtaaatgtttattaagattagaaacaaattctaattatacagaagagtacttactgagacccagcacagtggctcacgcctataatcccagcactttgggaggatgaggtggttggatcacttgagctcaggagttcaagaccagcctgggcaatatggcgaaaccccgtctctacaaaaaatacaaaaattagcctggcctggtggcgtctgcctgtagtcccagctacttgagaggctgaggtgggaagattgcttcagctttggagtttgaagctgcagtgagctgtgactatgccactgcactccagcctgggcaccagagtgaaaccctgtcttaaaaaaaaaaaagaaaaagtctcaggccaggtgcagtggctcatgcctatactcccaacactttgggaggctgaggtgggcggattacgaggtcaggaattcgagactaacctggccaacatggtgaaacccagtctctactaaaaatacaaaaattagtggggcgtggtggccagtgcctataatcccagctacttgggaggctgaggcaggagaatcgcttgaatctgggaagcggaggttgcagtgagccgagatcgcaccattgcactccagcctgggtgacagtgcgagactgtgtctcaaaacaaaagtctcttcctattcgctgatctcttcagaccagtctttataggtaattgctattaatagtttttcttctgaaggagcaatcaaaaaataaaaattaaaaaaaaaggttttcatgtatcctgccttatcccagattcttcaatttatgcatacaaattagatgataataaccatagtatttgttctctgttttataagttcccacctgcatatttgttatctttttttaatcaacttttttttttagagatagggtcttgctctattgctcaggctggtgtgcagtggcgcagtcatagctcgctacagccttgaactcctagggacaagcaatcctccagtctcagcttctcaagtatctgagacctcaggtccacaccactgtgcctggctaattttttttttttttttttttttttttagaaatggatctcactatgttgcctaggcttgtcttgaactcttagccttgagtgatcctcccacctcagcctcccaaagtgctgggattataggcatgagctactgtgcccagccctaccttcacatatctcagcaccctcatctttcaattttcttctatttatctctgaagagtacttactgaaaaagtcccggcttcttagagaaccagtattaatgttgtaggaatttagttttcaggaattgtctctcatgttcagaaataagccaagttctgctccagcctccttattggagtctactccctgaacgcctcttgaggtattgctttatgactgccattgctgctggtaactttggcaagaatgccattctgcccagtactgtctttttctgttgtaattctctgctggtacctgctcttcttctgttccccgcccccagttgttctttgttgctgggccccaaagcctcctgcttatataaatagtttctggggcctttttgaaggctcagatttagtccttaaggcctggtaggagataagtttatctcattccaccttccatagttcttcctgacttgctgttccacccaggcaccagagcaaataattcctcacttcatttcaaaaaactaaaagccttatgcatatgaattcgtaaaatctcatacaaatatccaaggaggccgggcgcggtggctcacgcctataatcccagcactttgggaggctgaggcgggaggatcacgaggtcaggagatcgagaccatcctggctaacacggtgaaaccccgtctctactagaaatacaaaaaatcagctgggcgtggtagcgggcgcctgtagtcccagctactccagaggctgaggcaggagaatggtgtgaacccgggaggcggagcttgcagtgagccgagatcgtgccactgcactccagcctgggcgacagagcgagactctgtctcagaaaaacacaaatatccaaggaaatggaggtcacaatttttttttaaccataaaatcacgttcagctgggcacatgtctcacaaatgttactaggtcttcttataaaagaatattatctgatttaaataagaaattgaagtgtttttattatatatctcttttctagggtacagccaaagaccggagctttggagagatgaagtttaaacagtgtcctacagagaacatggctcgtgagcatttcaaaaagcatggggctgaacactactgggaccttgcgctgagtgaatctgtgttagagtccactgattgagactactgcaagcccttgcctctcctcccttgcctttgtctcttcagtcctctcacttattctatttcccaaccccctcccacttgtttgtgtgatctcagaactgtgccaagcagacactgggacaaagggagaatatcttgctcccctcctgagtcagcctggtgttgccctttattccccttatgtgcatatgattaaagagttatttttaaacttggtgtgatatttttcacacattcgtaagtattaga

SEQ ID NO: 1242 - DNA, 17563 bp, Homo sapiens
cagagttcagccccgagccgcgcgagtcgactcacctacctcttttcaagccggcctagccccttcccggaacctcggctcccccccaacgaaactactgctaagccaactggactacacttcccagactgcttggagcctctctctccgcagaacctcgtcttccgcgagcttttcctggaggttctaggagggatgcccctcaatgccacgacgccatttcctactacgacttccatcatgctccgcgccgctccgggggcggtgacccctcttggcccacgtcttgtcagtgacgcacttcctgtcagtgacgcacttcccctctgctgggcgcgcggtggacggtctgaaagggagtgttcgggtttcgctggggcctcgcggctccagagcccagcatggcttcctcgcgagcctcttccacggtacagagcccgggatcccagctcactctggcagggagcgctaagggggaaggggatctctgcgggaaggggccgttaaggagcgggagaaggcggtggagggctgaggaggaaggctgcgggactcagcggtgtcctacacagcggaccaccgttttcctgatccctaagcgctttcgtggactgtagcttatttgcacctctcccactacagccccaaagggcaagcatctcttccgactcatccagtaacggtgctctgaaatagggaagtgtcttggccaaggtttatgcctttggcagatctcagaattttaatgagacctactaactcctactacctcacgtctaggaacgtttgaaatgtatacacttgtaatgttgtaacttgttatcctttagcaccgcgttggttatttcatctatccttagtatttccccagtgataagcagtaatccgggaagcataaaacacgagattgaacacttccaacggaatgaagtaaacagatttcagagcaaacctttcataggaaaatacccgagagaacctcactagttttattaatcccatcaaccaaagtgagggactgaaacaccctcaccctaccttcacctcctcaaatcaatgaagagcgtcttaagtagtgtccaatttgtcctttcaattacagaggaaacaggactgtgaaactcagggtgagcttcatcctctggtgaagtccggtaaattgccaagattaaaccttagtttaatgcagatctttgatttagcaggcaaccaaaactaaagcacccgacgacttagttgctccggtcgtgaagaaaccacacatctattatggaagtttggaagagaaggagagggagcgtctggccaaaggagagtctgggattttggggaaagacggacttaaagcagggatcgaagctggaaatattaatataacctctggtaagatgcaaattgtgagcccatctttacctctttgtgtaatgaatacctttctaaacttaaataccacagttttataatgtcaaaaaattacaatttttttttttttaaacagagtctcgctctgtcgccaggctggagtgcagtggtgcgatcttggctcactgcaacctccgcctcccgggttcaagcagttctcctgcttcagcctcccgagtagctgggattacaggcgcacaccaccacgcccggctaatttttgtatatttagtagatatggggtttcaccatgttggtctggctggtctcaaactcctgaccttgtgatccgcccgcctcgtcctcctaaagtgctgggattacaggtgtgagccactgtgcccggcagaatttcaattcttaaacttgcagctataaggctgtattttgcctacccccttattatcatgcagagagcctttttcttacaatctgttatatagtttttcttctatgagtgagcagtcttatcaaaaattcagtgtacatttggattcagattgattccatttgtcttctggagatctaacatagttctggcattggtttgcagctagagtggttcatgatattctcccttttgaagttttgtaattattttttacccaaagtgaaatctttttgtgtgtgtgtgtgtgtgtgacagggtctcactctcttgcccaggctggaatgcagtggcgtaaccttggctcactgcaacctctgccttttgtgttcaagggattctcctgcctcagcctcccgattagctgagattacaggtgcccgccaccacacccagctaatttttgtatttttagtagagactgggtttcaccatgttgcccaggctggtctccaactcctgacctcaaatgatccgcccacctcggcctcccaaagtgctgggattacaggcgtgagccactgcacctgactgagctatctttttttattataaaagtaatagtggccaagcctggtggctcacacctgtaatcccagcactttgggaggctgagaagcgggagtctggcttgagcccaggaatccaagaccagcctgggcaaatagtgataccccatctctacaaaaagtagaaaattagctgggcatggtgacacgtgcctgtattcccagctaattggggttctgaggtgggggttcaaggctgcagtgagtcatgactgtgccactgcactccagcctgaacaacagagcgagaccctgtctcaaaaaaaaaagttattttcttttaaaagatcaatgtataaatgtgtgaagtagaaaatcctgtatttttaaaattaattgattgtatatctttctgagaattttaatacagctaaaaagtatgtaattttttccataaatgaaaacacaatacgtaaattgttgtataacccccatttttcatttatataccattgaggatatctttccatgtcagtaatgagaggtctactatattttaaaaataaaattatgcatatttgtcctaagaaattcagacaatgccaaagggcataaaatgaagactcctctgcagtagggacatctgtcaggtttcttattgatcctcccacacattttctaaacacatgcactgtagcctagtgactttttaaacttttaatactgtttttaaacataacgtcaccactgtacctctcattttttatcacacttgtattttggtgtgggtttcaaaactattgctagattatccagaaatccttatagttgtggaactctcattttcctggtaattatttgcagtttagtagttaatgatttgttaagtatccctatactgggtctcctttcgagaataaatagctttggctgttgttacaataatgtttctgttacatcttctggatagacagcctagttaactcatttgcaaaagatgttctgtactcttacttgctggtctcagccaaagtgtgtgtttatataggcacaaagttaataaatgaaacaagaggtggcttgaaccattttcttgccttttgaagctgtgtcatttaggtttatgtgtttggcataatttaataaactgaaaaacagtaaactataaaatgtgtaatagacagttacttttccctcagggcatacacagactgcaattactagaaattatttctctctatttgaagaagatctgctgatgttgcctgttttctttttaataggagaagtgtttgaaattgaagagcatatcagcgagcgacaggcagaagtattggctgagtttgagagaaggaagcgagcccggcagatcaatgtttccacagatgactcagaggtcaaagcttgccttagagccttgggggaacccatcacactttttggagagggtcctgctgaaagaagagaaaggttgcctttctaaatatttactttttttctttattataatcacagggttctactccaaattttggttgatcatttagttgaactttaatagaatgtctcaaatcatgttaacaatatcttactgtgtttatatgagttagcccataatctgtcttaggccaatttttaccgcactattaatgtttcttttttgtgtttgttcgtttttgttttgttttgttttgttttgttttgttttgttttgtgttttgagacagagtcttgctctgtcacccaggcttgagtgcagcgtcgtgatctcggctcactgcagcctccgcctcccgggttcaagcgattttcctgcctcagcctcccaagtggctgggattacaggcacctgccaccacatttttcttttttgtatttttagttattttttatatttttgtatttttagtagagacagggtttcaccatgttggccaggctggtcttgaactcctaacctcaaatgatttacccaccttggcctcccaaagtgctgggattacaagcgtgagccttcgtgcctggcccgtttttctttatagacttggaagagggtgctaacatgctcccttgcctcccctccccagtgcgagttttgaattggataaacatttgttgttgggctttgaaaattgagacatcaaatgcattccatatcaatgacatagaacaatgataaatgtttcttggattttattgaagaggggtaccatcctcagataatgccctcttgttatttgcaggttgcgaagtcttagttgtggtctagtcacacacaattatgaggagcccctctggtctctctgtccactgtctcatctacccttcatcatccagcttgttggaagggttttttctattactcccttgaggtccttacccttatttactcttcaacctgctgcaaactgaccaacccctaccacattaaaattgctctttgttaagatcaccaatccacctttactaagaatagccctagtatactgccagccactcctccttgaaatactccctccttgaactactccctttccttcactctcctaataacaaatcctcttgattttcctcttctctcactagctaattcttctcacttaccttctaaacctctttttctctgcctgccctttacaggctgcctttttctctacttgcccttggtgatcagctctactcccatggcatcattcactgtgtgttctgatgattcccaaatctctcactgcagcttaggtatcccacaggtacttcaaacttgagacatctgaattgaaatatttccccacctctctcctatactcatacaattcttagttgaaaatctgcctagcctcctttataatccattagcaaaatctggtctgttctacttgcgagatacaactccagctatcttctttgctctatctttactgctttcaaatctgcactgttgtgatagccccaaacatgttgtgttaattgcttgcttaaaatcctagattgtcttctcatacttggagtaaaaaactcttaccatggtctgtaaggtcttcagccttactcatgtctcccttccccaatttactagaatagccacattggtccttatggaatatgctagttctttttatgtctttccacataattggtctacttttattcttctgtcttgtcttttagaggctttttttcttcctttttttttctttgaaacggagtctcgctctgtcacccagggtggagtgcggtggtgcaatctcagctcactgcaacctccacctcccaggtacaagccattctcctgcctcagcctcccaagtagctgggactacaggcatgtgccaccatgcctggctaatttctgtatttttagtagagacggggtttcaacacgttggccaggtgttgaacacctcctcaagtgatcctctcaacacctcctcaagtgatccgcctgcctgggcctcccaaagtgctgggattacagatgtgagctaccgcgcccggcctttcttcttcattttttattaacctggatccctgtcaaacttcttattctttcgtttcagcatagatgccacctattcaaagaagcctttcgtcacacctaacccctctgttctctgtcatagtatgttattttattagccttttcaaagggtatacttttttattattgtttagtttgttttttccaccagcaaagtctatcttattcattattatgttccttaaatgaatcctttgagtcactactgctactatctgaatttcagtccacggttgtgactcagagcgtcactacaacagtactgtctgatttccctgccattattcttcccttttaatccattctttgtactgtttcagggatctttctcatctgtaaatcctcctgagcgtggcattagcaattctttgtgacctggctcctccttgcatttgcagccctattcttcaccagtcctcttctatgttctacgctccagccatattgaattatttgtgactgcaagctcaacatgtttttcttacctccaggccttatttgtttaaccctctgcctgacattttctcattcttgacccccttgacctgattaactgaggactcaatttacatattacctttttttaatgaagccttccctgatcctctaagcttagttagatgcccgttacaaagtcccctctagccctctgtgcttactgctatagtgataggtaatataatggattatagtttgccagtactctctgttgtttccccaggactaagctacttgaaatcaagaactgattcctagtcatcactgtatagttagcacctgagtcagtatccagtacattgtggcactgagtgaaagttggcagtcttcacagaccaagtggtagcagtgtaggggctcattgactctaaactgtatagagtaattgcttatagttgaattttggaaatttccaaatagagaagactgagtgggagaaaccacactgggagtttagccatccccacttgactcttaaagaaggttcctggagggccgggtatagtggctcatgcccgtaatcccagcactttgggaggctgaggcaggaggatcacttgagcccagaagttcaagacttgcctgggcaacatagcaagcccttctctctacagaaaaatttaaaaattagccagttgtagcagtgtacatgtagtcccagccactcgggaggctggagtgggaggatcgcttgagctcaggaggttgaggctgcagtgacccatgatcatgccactgcactccaccctgggcaacaacaagacctcatctcttaaaaagaaaaaaaaaaggttgctaggtggtttgaacagtgagagaatagtaaaggcttgctcccatcttaggggaactttaataacagtgtttaaaactgtgttaaagtgtactttaaaaacagtattatctcaaccatgtttaaattctgatctttttttttttttttaacaggttaagaaatatcctctcagttgtcggtactgatgccttgaaaaagaccaaaaaggatgatgagaagtctaaaaagtccaaagaagaggtagaacatgtctttaacttcacagtataaacatgaaggaaatgaggggataggtctctcgttttctgctttcaatggtttgttttgctgagatgttgggggaaatgtttttgaaggctctaccattcaagaagagttgctggcagtagttttggttcctttgtaagtatgaatggagctaagtgagttttccagtcaggaaagaatcatggcattcctggtataaccatgtagttacatatcatagaaaaaaattcagtagaaagtcctctgcctgatttcatcctattaccgaatgaattcaccttccttctgggcagttaaaatggagaaatgacagttataagaggagtagaatgcttcagatttgacctttctgctcttaatttgcctttcagtatcagcaaacctggtatcatgaaggaccaaatagcttgaaggtggcaagactatggattgctaattattcgttgcccaggtaaagagagcctccagtagaagaaagaagcatattttttgtgtgtgtttcctctcaggaactgagtgctggataatgactatggttgttaaatgaaattgaggggtagagtagggatacatgtgggtccttgtttacaaccctgttgctcctggtgatggtgtttctgtgtcgcagggcaatgaaacgcttggaagaggcccgactccataaggagattcctgagacaacaaggacctcccagatgcaagagctgcacaagtctctccgggtaagatgctcccagcaattgtcccacatcttaaaggttcttcatgtttatttgatttttctactttggctcacctctgggaaggtagaggcaactagagtgattcctccctgcttaagttgagctgctgtgacatggaaggagccatcagttaatgtggcaggagcttactgtgctttgtattcagcagaggcctatggttctattctttatttctccccgttaatatgtcagagtttctctggggttttctgtttatatttagctgactcagaagttgtgatcctaagactgtagaaaacatctgggcacagtggctcagtcctgtaatcccagcattttgggaggcagaggcaggcggatgacttgagcctcaggagtttgagaccagcctggtcaacatggtgaaaccctgtctctactaaaaatacaaaaatttgccaggtgtgatagcatgtgcctataatcccaggtacttgggaggctgagacgggaggattgcttgaacccgggaggcggaggttgcagtgagccaagatcacgccactacactccaccctgggcaacacagcaagactctgtctcaaaaaaaaaaaaaaaaaaagactatagaaaacagcatgctggagtttcatataacttcatttatcaatgtatgtgtcttctaacagcagcaacaaaaccatagaagaatcttgggatgggttaaaactgaaaagctgctttgttgttctttttatggtggaaaagcaaaggagctcttagattaacctattaatgatcaccgtgtgtgtattttttttctttttaagtctttgaataatttttgcagtcagattggggatgatcggcctatctcctactgtcactttagtcccaattccaagatgctggccacagcttgttggtaagttccattttacaatgacattttttcctaaatggggaacaggctcaggaagaaaattagcatttgcgttagacgtctatttctacgtcctctttctctgcttctcatgatcacaccaaactacagatgtcagtcagtgctctacctgttgtataatacaatgtagccttggtttagccgttctcgctcttcaccagtgaccccagagatccattacacaaagcactctgtcacattcttgacactagtattttggaacaggtcctgtagtgagtttatagaccaactagtatccataactcagtctggcttttctttttcagttatgtgacctcgctaagatacttaatttctgtaagcttcagtgttcttacctgtaaagtgggatgaggtagtgtttgcaaggcattttgccttgacagtgcctggtatgtagtaaggactcgttaaacgttaattattggtttatctttgttttattttcttatcaccacatatgcagaaaactcaggatgtggtaactttgttgttttgtttgagtttggttgtgtttttctgtgggacatggctatctaatgagaaaggaaacttagattgaatacacaggagctacttgactaggctgacctttagatgggttcaggagaaagccaaggttctgcacaaatgagtccacctctccaagcctcattaccttcactataaagtttgatcgttcctgccgtacctgcttcacaggtctgttagaaagatcatccgagataatagatataaaagtaatttgttgaaaaatttccaaaataagaagtctctaaaaagtttaaggccagccagccatggtggctcacacttgtaatcccagcactttggaaggccacggcaggaggatcacttgagcccaggagtttgagaccaggctgggcaacaatagtgagaccctgtctctacaaatttttttttttttttttttttttttttttttttttttttttttttttttttttgagacggagtgtcacactttcggccaggctggagtgcagtggcgcgatctcggctcactgcaagctccacctcctgggttcacgccattctcctacctcagcctcccaagtagctgggactacaggcacccgccaccgcacccagctaattttttgtatttttagtagagacagggtttcaccgtgttagccaggatgggctcgatctcctgaccttgtgatctgcccgccttggcctcccaaagtgctgggattacaggtgtgagccacagcgcctggcccaaaaaatttttaaaaatttatttaattttttaaaacgttagccaggtgtggtggcatgcgcctgttagtcccagctactcaggaggctgggtgatagaattgcttgagcctgggaggttgaggctgcagtgaactgtgatcacactactgcactccagcctaggtgacagagtgacactgtttctcaaaaaaaaaatttaaatactttgtaatcagcaaaatactattcatatttaaggacagtatcactattaatattcgtattattggatagtttaatttgccccaccttccctcacaagtggatccaaaagttaaggagaatggctactggtgtagtgttaattatagtccagtaaaagcctctggttgcgtgtgggctggaggtagctttttcttctataacccttctaactataaggcttttatttttctgtcagccattgtaaagtttattgggggtgagaagagattgtcctttagtaatattaccaaggtaccttttccttcccagaccaaccctggctgagatgctttcctttgtatttgataggagtgggctttgcaagctctggtctgttcctgattgcaacctccttcacactcttcgaggtaagttagagtcttatccaaatctcggtctttttcccagtgtgaactcagttaagccttaaactctgcttgacactcagaccccatacacacagcattaatccttgatttgatttgacttggttttctctggctgcaagactggactatcacaacttcctacacatccacttttctctcatgtgcagtcacactctggcattttataatctctaaaccaaaaaccaaaatgggtttttttgtgttttgcttttttaaaaatgtaatttaaatattagcttaaattaaaatagttcatgttttaatagttgaatagtcacttgaatactctgtatgtccacatgttccctagtatataacatgggttataaagaggcaggaaccttttaacttgcatctcttacactcctttagggcataacacaaatgtaggagcaattgtattccatcccaaatccactgtctccttggacccaaaagatgtcaacctggcctcttgtgcggctgatggctctgtgaagctttggagtctcgacaggtgaatatcactgttctgtggcccatactgccatcactaaagtagatgtttgattggttggtccccaggacctcagtaaaaatctggcatttaggccatgcgcagtggctcacaccttaaggctgaggcaggagaattgcttaaacccgggaaatggaggttgtggtgagccgagattgcacactgcactccagcttgggtgacagagcaagactccgtcttgaaagaacaaaaaaaaaaatctggcatttaacccccaagatggtttaagagtcaaggtaacctagtgtgaaaatgaagtaagtggaagatttcattcttaggccttttcttactaaaggagttatgtccgttttttcttacctgttaactttggatcttgatttttgtctatagcctagtgaccactatttcctagctccatttattccagaaagatccagcctacctcctacatgataaattaacaatgaactaaatataatattcttggcagttcgttggttcttagcaaacagccacaggggagaggaaagtgaggttctgtctagcagtattaccacggagatgtctcctcgcaatagcatcatcctttacctagaatgtattttccaactacaacagtttttaaaaatgtgtttatgtgattgttttccaaaaaaaaaaaaacttcggaagcaccctgttggccaaaaggcatctgaatttaattgtttagttttctttctttgggaaaacacatgaaggtttttacttgagaatttttatgagagctaattaatgtcttcactcctcaccagacagggtctcacttaggagcgcagtgagttttaattggctttggtaatacttagcaatgtttattccccttgggctttggcttgttctgtgtatgcacattgacaaagttccctttttaattgcgttccttagagttcatgtttatttccttttgctgatgttcagatcttttggtggttgctgggtagcagaatttaatggccaccaaaaggagactaagcctcatctctatttaggagttcctttttcatttggatcttggaacaggcctaaatttgaaaaaggtttatctgtaatccacttgtaccaaaactatgtgatttctgtgtccttatatctcttccaaagcatgttttctttctagaatccaggtactcctttggtgcagaatgactattttgcttattgggccaaagtagtttacaagtgtagttacaatttagcctctcgtgttgtacagaatgggtatgtctgcacagaaggtaagcagttttgtgactatttatatgtctataaaattgtttatatgtttggttcctttccagtgatgaaccagtggcagatattgaaggccatacagtgcgtgtggcgcgggtaatgtggcatccttcaggacgtttcctgggcaccacctggtgagccatcctgttattgttttatccatataggcctgtagcatcttcttaaccctttatggctatctgccaggtaaatttttagagcagagatcttcaggtaggattttcttgggctgcagggaattggaatcagaggagaatgtttaatatagtgagagctaagtatatttgccttttttttttttttgaggtggagtctcactctgtcacccaggctggagtgcagtggcgcgatctcggctcactgcaaccgccgtctcccgggttcaagcaattctcctgcctcgacctcccgagtagctgggactacaggcgcgtgccaccatgcccagctaatttttttatttttagtagagacagggtttcaccatgttggccaggctggtcttaaactcctgacctcaggtgatcttcccgcctcagcctcccaaagtgctgggattatagataacaggtaacgcgcccagccatatttgcctttaaattacaattaatctgaaatttcagagttacaaattaccagaaaacaaggattttcactcttgtccaatgctacaggtatataagtctcccttcctggttctgtaagttcagggaggctagaatctgttagagaacttttccattaagttataatttacatacaatggaatggatttattttaagtgtacaatgctgtcagtctttacaaacgcgtaccattcctgtgatcgacacctctgtcaatatagagaatagtccatcaccccagaaaggtccctcatgcccttttccagccaactcccccttctaaagcaactgctgatctgacttctatcaccacaaattaattatgtctattcatactgtgaattcatttgtggcaggcttctttcagcataacattgttaagagtcattcatgttgttgcatgtatcagtaattcctttttattgctgggggttattcatttttatgactgtgccatagtttatccattctcctgttgatggacacttgggctgtttccaggtctgggccagtcagaatgaagctgctataaatattcttgtaccaggctttttgtggacatgagtacaattgctgggtcatagggtagaggtatgagatgtatatttaactttttctaaactccccaccagttttccaaagcggttacaccattttacattcccggagttctggttacttcacatccctgttaacatttggtgttgtcagtcttaccattttgcccaatctagcaggtgtgtagtgatctcccgtgattttcattcttattaccctgatcattattgctcttgagtgctctgtcatatgctttgcctggttttttaaattgtgtttgtctcttttgtctttatttccatgtgcatagtcagttataccaccttgtattgaagagactttcctttctctgttggaattgtttcagtacccttgttgaaaatcatctgaccatatatgtgtggttatttctgtacttcctattctcttccattgatctatttgtgtatgagtgatttttgtatccccaacatccaatttagggcctagtaaatgtataaatgcttgatgaatgaaagaatataacagtggaggaagaaagaaggtaacagagtctttgctgggccattcttggggaatcctgttattacaatagccactaggttgggcatggtggctcacacctataatcccagcactttggaagaccacggtgggtggatcacctgagctcaggagttcgagaccagcctggccaacatagtgaagccccatctctatgaaaaatacaaaaattagctgggcatggtggcgcacacctgtagtcccagctactcagaaggctgaggcaggagaatggcttgaacccgggaggtggaggttgcagtgagccaagattgcgccactgtgctccaggctgggcaacagagtgagactctgtctcaaaagaagaaaaaaaaaaaagccctagaggtttacagcgattccatggttttcagctagcacctaaggcagataagcttagttgttgagtcattgtttatgtcagaaaggagcttcctgttaatatggttatatgaatagtttcagaagcattaataacttaagctataatggcttagaatactttatgtgttgtagaaactgaataaatatcagctggttgattgttagtgtgatttggttttagctatgaccgttcatggcgcttatgggatttggaggctcaagaggagatcctgcatcaggaaggccatagcatgggtgtgtatgacattgccttccatcaagatggctctttggctggcactgggtaaggcttctcccatgtagtcaggggcagttcagtactctcacctcttacctatacctgcttccacagagaactggattcaaagtgttcatttctaaattattttctcaggggactggatgcatttggtcgagtttgggacctacgcacaggacgttgtatcatgttcttagaaggccacctgaaagaaatctatggaataaatttctcccccaatgggtaaaataaacacactgaatgaggggcgaaaaagggttctgggtcagtaagtactctatttctaacttcaatactgcatccaatccacagctatcacattgcaaccggcagtggtgacaacacctgcaaagtgtgggacctccgacagcggcgttgcgtctacaccatccctgctcatcagaacttagtgactggtgtcaagtttgagcgtaagctttcctcctattttacgtctaaatgacacagacaaacagtattgtgttcccgtggaatgcaggccaggctttagcttaactgagcagtaaaacaggagagaaattgacctactggtaaaggagcaaattataatttccttccctctgccatacccttagatctgtgggaaagcacgcttctcgttgcaggaagtaaagcagactttcatgagtgctttgcttcattctttcctccatggatgctctgagcactgagtccttaatattattctgaatagattctcggtcagggaatgagccaaaagaccttactgttatttgttcccttaagtctgtagaaacaagtttttttaaaaatagtatgtttttgcagacttttgtgcttttgtcttctcttttgaatacttgaattcctcaagcaattccccttctcttctcctgtagctatccatgggaacttcttgcttactggtgcctatgataacacagccaagatctggacgcacccaggctggtccccgctgaagactctggctggccacgaaggcaaagtgatgggcctagatatttcttccgatgggcagctcatagccacttgctcatatgacaggaccttcaagctgtggatggctgaatagatgacaatgggaaaaggacttgaacctcaagctctctctaaggagctgttttcctcaaacgagaagaattgaagtgtttagttctatcatgttttctgccaattaccatgcatagaccctcagtagaattggatttccatgtcagcccccactccaggaaggcagcccaatccctaggtgatggggaacccctctcacggttgaaaatttattacctttttacgccctgccacgaactgtgtagacattgtttttattaatcttttgtttggccgggcgtggtggctcacgcctgtaatcctagcactttgggaggccgaggtgggtagatcgcttgagctcaggagttcaagacgagcctgggcaacatggcaaatgccgtctctgcaaaaaaatactaaaattagctggtcgcggtggcttctgcctgtgattccggctacttgggaggctgaggtgggagggattgcttaagcctgggaggcagaggttgcagtgagccgagattgcgccattgcactctagcctgtgtgacagagcaagaccctgtctcaaaaaaaaaaaaaatttgttcgaatgccttatagccttcctcacagcacccaggattgtgactgactctgcatttttaattcttgaaacttggctttccataacatggtacatgcttcaggactacatatgacccagagagcaaggtggctgaactatagtctggaagccctcaggtaaagaggcacatctcaccactcattggttaaacaatgcatcatagcgagcacttttcctttccctggagaatgggatgtgaagcagtagaccgcagccacgccgatggttatacagtgaagaagacttcacctcttcctattgagtttgcttggaatgctgacagcatcaggcaactctgaactgaacatttgctttgtcagaaaatatctttttttttactttgaagtttggcaaccttcatgttaccccaaagcaaaaccattgtgtcaggagtcaaacaaatgtttagaaagcaaacatgacgtctctattgtacaacctcctttctcttggctgtttaaaggatgtacttcgtgtattaaagggtactttatgttgaagtaacgaaaaaaccctaatgggtgttcctaaacctaaaccttttctttattccacatttgctacggtaaaatcctgttacaaaactaccctataaagaattattttctatagttaagcattttctgaatccta

SEQ ID NO: 1243 - DNA, 10029 bp, Homo sapiens
ggccacggtctccatgctctgctcctctggccgcagcagaaccctgtgaaccccaggcaatgacagcaggatcctgaagcccatgcaggctctgaaccacgcggccatccagaaggggtgagataaatgttggggaaaccatccccgacccccgcgagccccaggagcccaggctgccgcctcctgcctcctacacccctcccccgcacagctggccctggaggctgctggagctggggttaccccgtggggaccctcatgctctttgctcccctccttctccctccccctcccccacaagcgtgaaaccaactgaccggattgacagatgcaggtgcgcgggaggcggaggtgggggtggtgccagcagccaatgggttaatggtcccggcaggggctccacaggggaccaggggtcagatgtctctctaagatggggacaggcacgcaagctgctattccggggctctgatcacggctgtctatttatagcgctggggggagccgcctcacatagacagcagagaggctgccctgctgcaatgtcaccgtcgtcactgcctctgcaggctgcaggcacctgccactaccgcagaggactgaggggccttggcccagcagggaccccagggccttgggggactgtgtgagctggaaacgtggctggccagatgggcagcaccatggagccccctgggggtgcgtacctgcacctgggcgccgtgacatcccctgtgggcacagcccgcgtgctgcagctggcctttggctgcactaccttcagcctggtggcccaccggggtggctttgcgggcgtccagggcaccttctgcatggccgcctggggcttctgcttcgccgtctctgcgctggtggtggcctgtgagttcacacggctccacggctgcctgcggctctcctggggcaacttcaccgccgccttcgccatgctggccaccctgctatgcgcgacggctgcggtcctgtatccgctgtactttgcccggcgggagtgttcccccgagcccgccggctgtgctgccagggacttccgcctggcagccagtgtcttcgccgggctcctcttcctggcctacgctgtggaggtggccctgacgcgggcccggcccggccaggtgagcagctatatggccacggtgtcggggctcctcaagatcgtccaggccttcgtggcctgcatcatcttcggggcgctggtccatgacagccgctacgggcgctacgtggccacccagtggtgcgtggccgtctacagcctgtgcttcctggccacagtggccgtggtggccctgagtgtgatgggccacacagggggcctgggctgcccctttgaccggctggtggtggtgtacaccttcctggctgtgctcctgtacctcagcgccgccgtgatctggccagtcttctgtttcgatcccaagtacggtgagcccaaacggccccccaactgtgctcggggcagctgtccctgggacagccagctggtggtggccatcttcacctacgtcaacctgctcctgtacgtcgttgacctcgcctactcccagaggattcgcttcgtgcccagcctgtagcccacagtggcagcccacccacctctgctctctggccaccagctccaggctctgcgagggaaactcaggtgaaccaaagtgtcaagtagcgagcaggagggaagccgcgggctcaggggagatgaagtacaacgggagaggtcactccccgacttccagactgggctcagagggacaagggcaggacagtagggcagaggccctgagcagacgcaggggagagcctcacctaggccaatccccaactcactctctctcaccatttcccagcgctcctggggctcagtgctggtcactggaacatcataagggaaaactttaaagcagctgctgttgtgacccattttgcagctggggacatggaggctagaagcatttgcgaggcacccagtacctccattagtgtctggagaccacagtcaggctgggtaaggcaagctgaaagaggaatgacttccagaggagacgaacccaggagagtagctgggccaggcaaggggagggaggggcgtggggagccggaaccactcctggttcagagaggcagctcccagaaccctgggaagagagccctgcctggggagctgtgccagctcacagagaaggagccagaaatctggaccagcctctcccacccacgtccgggaagcctctgggctggtagccacagtgtttggaagcaggcttcctccggagtctccgcaggctggaggtggcgcgggtggcctggaagagcctgcagagcccggcggcaccgagtgcacagtggacggggaggacctggttccgccatagccacggagccccacctggacactcaccattggctgtgacgaagcagcttcagcagtgcccggcgggcatctgtgcactgtgggcatctgtggcactgggagggagcccggctgagggcggccgctggacacagaatctgggtactgcttgcctctgctcaagggtccagttgccgaaactcctgacgccggggccatcatcctccaggctccagccagcttctcctgcacagaagcccagcctggtccagccaggagctgacccactggccacccctgagtccaagccgggtgggcagtggcacaacagcccctcagcccattgactgggccccattgacgtccttgagcaggaaataaatgctgacatttatacgtaccctgcctctggaccagcagtctcttctgaggggactgtgggcacttgcccctcctggcggcccctcctagcgtgctctgggggaaggctgaggaaggaagtggcctgggatcacagtcagggcaggctgggctcctgagggtctgagcagcctcctggggaaggggcaggcagcgtcttctgcctcacaggggtgacaggccagcctggctccgacgggcctgtggctcatgcccgtccctcccagaggcccgcagcactcacctcctcccccacgcccatctgggggtctcgagaggccctggacacagcgatggacagacgcactgttgctccttttagacggcggtccccacagccaggcctgtgctgctgccatgaagaatgtgaggaaggggcctcactggccgctgaggaggggtctcgctcacgttagccaacaaacagggtccggccgacatcctttactcagagggggtgggtgttttggggtcaatggcagatcccagatgagggcagtcagctgttcagggcctgccgctggctgagggcgatacagagggggcatagggatcacctgcttcctgactcaggggagacctgggcaccagtcttggagaggacccagcctccttctctcctttttttcatgtggccagaattctgaaacgagttaattgtcaccaacttcccaatttcctccctgtccggtggtcctctgccaccttcgcaaaggtcctgagggacagaaaggaaggggaggggacccagggctgggagacttccttcagagtcagtccttttgacagtgtatccctggcccagagggctgtccattttgggtttttgggtttttaggtaaaagtgttacttgctgttatcacttggggaaaagtgattttgtaacagcctggggagcttggctctcaaagcgcctaggcgatgctagcctccgtgccccaggtttgagctgtccatctggacaagctcttcccatggccaccacagagcagcctcccagtgttggtggtggtcattacgtgttcacggtggggggaccaggtagacagatagccagaacgcgtggccctgccgctgtggcagaagcatcccaggccttctgaaatgatgtgctagaatagcctgtcatcatctaagatacagcacagaaaaaataaggcagctcctctcaccccttggcaggggaatgggctgccagtgatcccttctgacttcgcccttaatcttggccaccgacagggaccctgactatccagagccccagatgcaggcccgaatcagatgaactctgagcatgtcctcagggggaagtgactggagcttcactccccctaaaacccaggcaggcgagaggtttgggtattggaggatgctccgggctgcgtgggagtgggggcatgatggggtgggcttccttcgtttgcttagtggagcaccgctgcgtgcccagttagaggaacacctgtggccgcactgtcatgcctctttcttttcttttcttcttttcttcctttctttctctctctctttttttcagatggagtctcgctcttgttgcccaggctggagtgcagtggcgcaatcccggctcactgcaacctccacctccagggttcaagcgattctcctgcctcagcttctcgagtagctggaattacaggcacctgtcaccacgcccggttaattttttgtatttttagtagagacgggggtttcaccatgttggtcaggctggtctcgaactcctgacctcaggtgatccgcccgcctcggcctcccaaagtgctgggattacaggcgtgagccaccgcgcccggcccaaatggtgatatatttaaaatgcttccacttggcaaattattttcaactctgcccccaagggaaaaaaaaaaaggaaagaaaacgctgtacagccgggcttctccaaactcgatgacagtagaagggactgattcccagagagagccggccgcgcgcccagggacgccagctggacgcgtccgtgtccgggtggcccaagacaaagccctgcgtggagggcccctcacaggccccaatcgggccgccccctccgcccgcgtcctcggaccccacgtgtaggtcccgggaagcgcgaccaggaggagcgcgggtcaggggaccgcgtgccggagagggtgtctatccgggggccgggggatcccggggcgcgagagaggcgagggccggcggtcggcgtgggaggggcgcgcagatgatgcaaccgctctggcgccgccgcgcgctctgattggccagcgcctggcggccgcgcccggattcgctggcgcgacgggggcggggcctgggtgcgggtgccgcgtggcggccgcagcgctgaggggtgggtacgacccgcgcacggtagctgggttggggtcgggctccgggaatggtgggcggcggtcgccgggtggggcgcgacggtagcccagttctgggcggggtgggaacccagacgggggacccctaggcgccgggccctccctctccccgtacttttcccccttcccagtcatttcttctgcggaacctccacccctccagtgggtgcgggaccctaggcagcaggccaggcaccgccgctctgactgggggccccgaagcagttaacgggccggacagcaaagtggaaagttagaccagctgggaccaggggaggtgggcacccggctgcgggaggagcggccaggctggcactgcccccctaacttgctctcgatcctgccggtctcgtcccgcagagccggtgccatctgtgggggctttgggccaggggtctccggacagcatgagcgtgggcttcatcggcgctggccagctggcttttgccctggccaagggcttcacagcagcaggtaggcccccaggtgggggacggtgaggcccagtgggagagactggcctctttccacttctgcagggctgggggctgaaggtgggtgctgggtcacaaggcctgagtcctgcgggaactggcaacttctgtgtgtttggggctttacctgtgctgtctcactcttcttcctgggaatggggagggagggaagccaaagctagccatgaagaggaactgtttccggccgggcgcggtggctcacgcctgtaatcccagcactttgggaggccgaggcgggcggatcacgaggtcaggagatcgagaccatcctggctaacacagtgaaaccccgtctctactaaaaataccaaaaattagccgggtgtggtggcgggcgcctgtagtcccagctactcgggaggctgaggcaggagcatggcgtgaacccgggaggtggagcttgcagtgagccgagattgcgccactgcactccagcctgggcaacacagcgagactccgtctcaaaaaaaaaaaaataataaagaactgaagaggaactgtttctcccctcaggcgtcttggctgcccacaagataatggctagctccccagacatggacctggccacagtttctgctctcagggtaggtgcagatgaaagggagaaaggagactgagtccctgtggggctgggtgtgagaggcaggagtgtgtgctgtagcccccaccccagtgagggcaggggccctgggctggggtctcatggaccccacctcctcgccctgctgattgctcttgggacctgggtggtgggcgtgtgtacagctgataggagggtgttgttctggaatggagttccctgcacagggttaaagtttcgaggggtcctctgggggcctggcaggtggggccacagcctggcagccaaggaacacacctgggggctgcttgagaccaccactcccacgtggagagcccggtctggaggacggcagtcccaggctgggggcagattggtggcatggatggagggtccttttctgtctgcagcagggacatattccacacagagttcttcctccatttctgggtgggaagggtcatcaagggggtggtcagagccctgagcccccagccctgcccacccccaactccagcattctctgtgccattctacctgtggggctcttggcttggtgggggtacagacagccacgggaccaggctgagcccacctgttgcccctgcagaagatgggggtgaagttgacaccccacaacaaggagacggtgcagcacagtgatgtgctcttcctggctgtgaagccacacatcatccccttcatcctggatgaaataggcgccgacattgaggacagacacattgtggtgtcctgcgcggccggcgtcaccatcagctccattgagaaggtagcaccgcaggcccagtggggtgtggagaggggctgtctagagcccgggccctcagtacttcagttttcatctgcaaaagggttgcagcgtcccggcccactgggagagctcgggcactgcttggtggggtgagtgcatctaggcactgcgtccatggccagacggacacgctggtttctcttccagaagctgtcagcgtttcggccagcccccagggtcatccgctgcatgaccaacactccagtcgtggtgcgggagggggccaccgtgtatgccacaggcacgcacgcccaggtggaggacgggaggctcatggagcagctgctgagcagcgtgggcttctgcacggaggtggaagaggacctgattgatgccgtcacggggctcagtggcagcggccccgcctacgtaaggactgcgggggaagctggcggcggcgggcacttcccgggaccaccgggcacatctgtccctgctccccctgggagggccagggtggagggctccaaggctgtgggaactggagcttgcccagaagggaaggaggagaagcccaggagagaggctcagggtgccttctccccacaggcattcacagccctggatgccctggctgatgggggtgtgaagatgggacttccaaggcgcctggcagtccgcctcggggcccaggccctcctggtcagtgtgtttcctgaccctctggtggggccactctttgcggggccctggggcttcactgggaggagccaagtggggcgtcagtgtgtgctacagtggctggggcagtgccccgcagaggcaggtgcgtgcccacagccgtcagcctttcttctggctgcagggggctgccaagatgctgctgcactcagaacagcacccaggccagctcaaggacaacgtcagctctcctggtggggccaccatccatgccttgcatgtgctggagagtgggggcttccgctccctgctcatcaacgctgtggaggcctcctgcatccgcacacggtgggcccccgcgctgcccgcttccctggtctccagtccttgcatggcagaggcctctctcacacacatctgctcattcacgcactcagcagatacgtattgagctccagcccagtgttgcgcaggacacagggggccccgaggttccctgggttactgtgggcagtgcccctccccaccttccgtttcctgcgaggagggaacatccatagagggacccggatgctgtgccctgtgctccccacataggttcaccattgtcatagctaggagtgtcatttgagccaggggccacaccagtggggtggcggggtggccagccacattaggaaacttctgtgggggcccaccttcctcctgccctcgctgtgggattaagttagaccagtaggacacgcagcaacatccaggcacaaggaaaattccatggaaggtgaaagaagcaaagagcaagagaaagacagagtttgctgtttgcctgggatcccacagctggtcaaaggcagagccaggctgggagccgctgtccccagttcaggtctgcagggtgggtgaggacgtctttctcgccacactgcccactctccagtccagacaccctcagactctgcgagtgccaccctgtaacagtgaggggaacacgaggggcctggcctcacctccagcctgcaggggagacaggtgtaaacccacatcccgtggtggggccacgagaactcaggtctggggggcactgcggggagatttggtgatgctgagctgattcgaatgaggtgagaaggagcccagcagctgtgtgggggcgtgtcgctggcagaggggaataaaggtgctgaggtgagggtgacagcatcgcccagggctgactggcactgggagctgtgggcttcactccctcttcctgggtgcacgcttgtgctccaaagccaacctctccctgcctctctagggagctgcagtccatggctgaccaggagcaggtgtcaccagccgccatcaagaagaccatcctggacaaggtgaagctggactcccctgcagggaccgctctgtcaccttctggccacaccaagctgctcccccgcagcctggccccagcgggcaaggattgacacgtcctgcctgaccaccatcctgccaccaccttctcttctcttgtcactagggggactagggggtccccaaagtggcccactttctgtggctctgatcagcgcaggggccagccagggacatagccagggaggggccacatcacttcccactggaaatctctgtggtctgcaagtgcttcccagcccagaacaggggtggattccccaacctcaacctcctttcttctctgctcccaaaccatgtcaggaccaccttcctctagagctcgggagcccggagggtcttcacccactcctactccagtatcagctggcacgggctccttcctgagagcaaaggtcaaggaccccctctgtgaaggctcagcagaggtgggatcccacgccccctcccggcccctccctgccctccattcagggagaaacctctccttcccgtgtgagaagggccagagggtccaggcatcccaagtccagcgtgaagggccacagcccctcttggctgccaagcacgcagatcccatggacatttggggaaagggctccttgggctgctggtgaacttctgtggccaccacctcctgctcctgacctccctgggagggtgctatcagttctgtcctggccctttcagttttataagttggtttccagcccccagtgtcctgacttctgtctgccacatgaggagggaggccctgcctgtgtgggagggtggttactgtgggtggaatagtggaggccttcaactgattagacaaggcccgcccacatcttggagggcatctgccttactgattaaaatgtcaatgtaatctaatgcaaaa

SEQ ID NO: 1244 - DNA, 78318 bp, Homo sapiens
gttccctcccaggatcgacatgcacttggatcattgcagtttctgggcctgctgtcatctcccccttcagtacttcccacatatgactaccaactgttagacgatgtgctgctgccagaccagcctttcatttcttggacatccggctatttacccaggaaaagtcatcctttgactatttttcatgacctttctcatctgactcgtgatctgcccatcttgttactccctagcagtgtggtaaggtaagagaaaattcaactaggagtcaatagatatttctgttctcattctcccactgtctacttgtgtggcctcaggcaattcattctacttgtggtcttacttaactgtaaagtgaggtttgaagtaggtgtctgagatacatcatgtccttaaaatatgtggatctggagaattaagttgctaagcgctatgttatacacggaaatactgtcctaacacagattcagatttttgttttttattttttgccaccacactggcaaaaaatattatttcctgccctgctccagttatcttttttaaaacctacgtttaggatttttgattaaagctagctaaccgagcacatgtatttactgtctcttcttcctgagaccccataaaatgatgataaataaaagtgatacaaaatagaaaatgagaagggggacatcggaagataatttttttttatttgacatgcaaaaagtaagtgtggtctgacaaaataaaatggagaaaagcataatgtagaatgggtgtagagggtgctgtagaaaggaaggggacctgtcagcccagaagtgctttagggagacggagatttggagataactaccagacagagcaagagtgagaagcagagttgagaccagggagactaaataaaggtctatataaggaagagcagaaccctccctatatctcagatacaatatctaggcatttatccaggctaaaattaagcactctgataatctggggagatttgggttaactgagtattgaagggcctaagagtaaagtattctttattctagcacaatagctggtttcctacccacccactttaaagtgtagttgggcaagttggcaggaacttcctgctatggtttggatatggtttttttgtctctaccaaatctcatgttgaaatttgattcccagtgtgatagtattgggaggtgggtcctgatgggaggtgtttgggtcatgggggcagattcttcatgaaggacgtggtgtcattcttacagtagtgagttctcacacttgcgaaactatgttggttatcaggagaatggatttgttccttggagagtggtttgttgtaaagccaggactcacctcgggtttgatttctctttgcatgtgcacagacacttttccttgaccttctccgccatgtcttgatgcagcacaaaaaccctcaccagaactgagcagatgctagtgccttgcttcctgtacagcctgcagaattgtgagctaaacaaacccgttttctttataaattacccagctgcaggcatgcctttatagcaacataaaatagactaagacacctcccaagttcacaagactccccatcagcattccaactgcctcatacgtatgaacagacaactaagtgttattaggtatttaagaaaagtctccaacatggactgtgggggcagataaacagaaacttcagagaatttagaaaggaaaacctaattagtatactaggatactcagatgaagtaacaatccaaggtttaaaaatagatcttgaaatttaaaataaattgccaaattataaattcaattaaaatattgaaagataaagtcactgaacttttaaagaaaatagaagaagcctgggcaacataatgagaccccatctctttaaaaatgttttaaaacttagccaggtatggtgatgcgcacctgtgttcctagctattcaggaggctgaggtgtaagtattacctcatcctgggaggtcaacggagcagtgagccaggatggtggtgctgcaccccagcctgggtgacagagcaagataccttacttcaaaaaagaaaagaaaatagggctgggtgcagtggctcgcgcctgtaatcccaacactttaggaagctgcaccccagtctgggtgacagagcaagagaccttatttcaaaaaagaaaaaagaaaatagggccgggtgcagtggcttgcgcctataatcccaacactttaggaggccaaggcaggcagatcgtttgagcccaggagtttaagaccagcctgggcaacatggcaaaaccctttttctacaaaaaaatacaaaaataagtcaagtatggtggcatatgcctgtaatcccagctactcaggtggctgaggtgggaggatagcttaagcccaggaggcagaggttgcagtgaactgaaataacaccactgcactccagcctgggcaacagagccagatcctgtctcaggaaaaaaaaaaaaaagaaaacaataaatatacaaaggggtggaaattgtgagagaaaataagataaagaattagttcaacaggactaatattatgtgaaaaagagaaaacaaagttaatgaaggacagaaaattattgaaaaaataatgcaagacaatttcctagaactgaaagaatccactagtgcagaaccaaaagaaaaaaaaaattcaaccatgtgaaatgtttgaactctaaatataaagaagattctaagtttccaaagaggaaaaaaaggagcccataaaaggacaaaaatcaaactggcgggctgggcacggtggctcacacctgtaatcccagcactttgagaggctgaggcgggtggatcacgatgtcaggagtttgagaccagcctggccaacatggtgaaacctcgtctctactaaaaatacaaaaattagccaggcatgatggcgggcacctgtaatcccaactactcaggaggccgaggcaggagaattgcttgaatccgggaggcagaggttgcagtcagccgagattgtgccattgcgctccagcctgggcagtgagcaaaactccatctcaaaaaataaaaataaattttaaaaaagagttacttaaatgtgtgctcaagcaaaatgagggagaaatcagggtatctgacaacatccagtaatcactagatccaattcaggaaaacagtaaagggaagtcccaggaacttagttagattggaacagaagggtaggagttctgggagagaaaacgcccggaaaagagagaattaaacagaataatcagttactatgataaaaaaaaaaaaaaaaagcttagaagatgctgcttttaggggtttcaacttttacacccaacctattaatgaagcatagtcttgctatcgttaaaacagtttaggctcagtaggtcacatctgtaatcccagcacttctggaggctgagacaagaagatcgcttgaggacaggagtcagagaccaccccagacaacacagcgagaccctgtctctacaaaaaaattttaaaaattagccgggaatggtggcacacacctgcagttcttagctacttgggaggctaaggcaggaggatcccttgagcccaggagttcaaggctgcagtgcactataatggtaccactctccagcctgggcaacagggtgagaccctgtctcaaaaataaaaacaaaagcaggctggatgtggtagttcactcctgtaatcccagcactttgggaaactgaggcagaaggattgcttcagcccaggagttcaaagccaacctgggcaacataacgagaccctgtctctattttaaaaacaaggccaggtgcggcggctcacacctgtaatcccagcactttgggaggccgaggcaggtggatcacctgaggtcgggagttcaagaccagcctgaccaacatggaaaaaccccatctctactaaaaatacaaaattagccagacatggtggcacatgcctgtaattccagctactcaggaggctgaggcaggagaatcacttgaacctgggaggcagaggttgcagtgagctgagattgcgccattgcactccatcctgggcaacaagagtgaaactctgtctcaaaaaaaaaaaaaggccaggtgcgttagctcatacctataatccagcactttgggaggccaaggcgggtggatcaccaggttaggagttcgagaccagcctgcgcaagatggtggaatactaaaatacaaaaattacaaaaattagttgggcgtggtggtgggcgcctgtaatcccaactactcgggaggctgaggcaggagaatcgcttgaacctgggagccggaggttgcaatgagcaagactccgtctcaaaataaataaataaataaatgttttttaaaaaaagtggtgcttgaacaattgaatatcacatgcaaaagaatgaagttgaacccatacctcacatatatgaaaattagttcaaaatgaatcaaagacctaagtgtaaagcttaagctaaaatactcatagaagaaaatataggtataaatcttcatggctttggattaggcaatagtttcttagctgtgagaccaaaggacaagtaacaaaagaaaaaaattgagaccaggtgcagtggctttatgcctgtaatctcagcactttggtggggccaaggcaggagggtcacttgagccaaggagttcaagaccagcctgggcaacataaagagacccccatgtctgcaaaaaatttgaaagattagctgggtgtgttggcatgcacccatagtcccagctacttgtgaggctgagacagaaggattcctcgaacccaggagatcaaggctgtggtgaaccatgattgtgccactgtactttagcctaggtgacagaccaatatcctgtctccaaaaaaataaaattaattggacttcatcaaaatataaaacttttgtattggccaggcatggtggctcacgcctgtaatcccagcactttggggggccgaggcaggcggatcacaaggtcaggagatcgagaccatcctggctaatactgtgaaaccctgtctgtactaaaaatacaaaaaattagcctggtgtggacaggcgcggtggctcacgcctataatcccagcactttgggagactgaggcgggcagatcacaaggtcaggagattgagaccatcctggctaacacggtgaaactccatctctactgaagaatacaaaaaattagccgggcatggtggcgggcgcctgtagtcctagctacttgggaggctgaggcaggagaatggcgtgaagccgggaggcggagcttgcagtgagccgagatcacgccactgcactccagcctgggcgacagagcaagactccatctcaaaaaaaaaaaaaagtcttttgtattattcagccttaaaaaggaaggaaattctgacatatgctacactgtggatgaaccttaaagaccttacactaagtaaaataagccaatcataaaagtatagatcttatatgattacattcatatgaggtacctaaagtagtcaaatttatagagacagggccaggcacggtggctcacatgcatataatcctagcactttgggagcctgaggcaggtggatcacctgaggtcaggagttcgagaccaacctggccaatatggcgaaatcccatctctactaacaatacaaaaaaattagctgggtgtggtggcaggcacctagaatcccagctattcgggaggatgaggcaggaaaatcgcttgaacccgggaggcggaggttgcagtgagccgagattgcatgacttcactccagcctgggcaaaagggcgaaactctgtctcaaaaagaaaaaaattcatagagacagaaagcgtaatggtggctgccagaggacagagggagggggaagagggagtgtttaatgggtatagagtttccgtttgggaagaagaaacatttctggagaagataagggtgatgtctgcagatcattgtgaatgtacttaatgccacagaactatacactgaaaaatagttaaaatagtaaagtgttatgttacttacattttaccacaataaataaatattttaaaacttatgtgcatccattacactgttaaagactgaagtatattcctccaaaattcatatgttgaagccctaactcccagtgtgactatatttggagatgaggccctgaagagataatgaaggttaaataagtcataagaatggtatctaacccagtaggactggtgtccttataagaagaggaagagataccagtgacaaacatcagagaaaaggtcctgtgcagatccaagaagatgcagccggccgcgtgcggtggctcatgcctgtaatcccagcactttgggaggccaaggcaggtggaccacctgaggtcaggagttggagaccagcctggccaacatggagaaaccctgtctctactaaaaatacaaaaattagctgggcatggtggcgggcacctgtaatcctagctacttgagaggctggggcaggagaatcatcacttgaatctgggaggcagaggttgcagtgagctgagatcacgccattgctctccagtctgggcaacaagggatgctccgtctcaaaaaaaaaaaaaaaaaaaaaaaaatcttcaggaaaaaacaacctgctgacaccttgatcttggacttccagattccaaaattatggcaaataaatttctgttgcttaaaccacccaaactgtattattttattatggtatccctagcagaataatgtagacttttatgccaagaagtggagtgctgctgtaataaatactttataaatgtggaagtaactcaggaactggataatgggtagagagtgaacgagttttgaggtgcgtgctggaaaaagcctgattgagccgtgtgcagctgctcacacctgtaatctcagcacttcgggaggctgaggcgggcggatcacttgagatcaagagttcgagaccagcctggccaacgtggtgaaaccttgtcttcactaaaaatacaaaaattagccaggcctggtggcacacgcctgtaaccccaactactggggaggctgaggcaagagaatcgcttgaacccgggaggtggaggttgcagtgagccaagatcatgctactgcactccagcctgcttgacggagtgagactctgtctcaaaacagaacaaaaattagcaggcatcgtggtgcgcacctgtagtcctagctactcagggcaggggcgggcgggggtgtggggctgaggtgggaagatcacttgagcctgggaggtcgaggctgcaatgagccgtgatcccaccactgcgctccagcctatgtgacagaacaagaccctgtcccccccgccaaaaaaaaaaaaaaaaaaaagtctagattgtcttgaagagattgttggtaggagtaaggaataaaggtgattctggggaggtctcagacggaaattaggaacatattatcggaaagtgcgggaaaggccatcctttcttccacaaagaatttggccaaatggtgttctagtgttttgtggaaagtgcaggttcaaagtgataaatttggttatttagctgaggagatttctaaccaaactgttgaaggtatggcctagcttcttttggttgctttagtaaaatgtgggaagaaagataaactgagggaattattaagcaaaaacaaaacttgaagatttgaaaaattctcagtatttcatagagattataggtgcaatttacaaatttattcagctttctcagcgcaagccaggaagagagatgagattataccagcataaacactgtcatcttggactaaaggggacacaggacagaaggaaagaaggctgtcgtaattctgggatcctaaaggatgaggcaacagagttatctggctgtgaacacatgttaccctttaagaaaagggaagactgatcccaaaggagattcagttagcaacaaggctgccattcgaactgcaggcccagaagatacaggtctggggagctaagatgtctcctcagttccagaaagtcaagctgctgccatccagtgcctcagaggcatggctgctacccaggaccaatagggccaacgtggtgatgctgcctcccccgtggccctagaaggcaagcctgctaatccactgggccaggagggcagagcgtcaagccaaagacaattattcttcagccttaaagttcaacagaatttgccttgctaggttttattttattttattttattttattttattttatttatttatttattgagacagagtctcactcattctgtcgcccaggctagagtgcagtggctcagtttcagctcacttcaaccttcacctcctgggctcgagcgattatcctgcctcagcctcctgagtagctgggattacaggcgcgcaccaccacgcctggctaaagtcttactaggttttgaatttgcttgggacccatgtccccatgtccctgtcttctttccattttttgcctttggaatgggaatgtctgttctatgcttgtcccactattatactcaggaagtacataactggcctggtttcatacattcacagtcagaaaggaactttgccgcagaatgactcatatctcaagtatcacccacacctgatttggataatatttattttgggtttttattattgttgtggtggtggttgtggttgttgttgttttgagatagggttgcactctgtcacccaggctggagtgcagtggcacaatcttggctcactagaacctccgcctccctggctcaagtgatcctcccacctcagcttcccaagtagctgggactacagccacttgcccccacatctggctaatttttttttttttttggtagagacgggggtttcaccatgttgcccaggctggtcttgaactgctgacctcaagctatctgcccacctcagcctcccaaaatgctgagattacaggtgtgagctaccacacctggctatgatttagatgatatttaaatgagcctttggacttagagttgatgctgaaatgaggtaagacttttgcggctgttgggatcaggataaatgcattttatatgtgagaaggacatgaactttgggggtccagaggacagaatattatggattgaattgtattcccccaaaactcatgttgaagtcctaatccccagtgaggtcatacccagtctgtggtattttgttatggcagccctagccaagtaatacagacactgtcaagaaagtgaaaaggcacccaggcgcggtggcatggtggtgcatgcctgtaatcctagctactcaagaggctgaggcaggaggcctgaacccaggaggcggcggttgcagtgagctgagatcgtggcactgcactccagcctgggcaacagagcaagactctgtctcagaaaaaaaaaaaaaagaaagaaagaggctgggtgcagtggctcatgcctgtaatcccagcactttgggaggctgagacaggcggatcacttgaggtcaggagttcgagaccagcctggccaacatggtgcaacctcgtctctactaaaaatacaaaaattagccgggcatggtggcaggcacctgtaatcccagctactcgggaggctgaggcaggagaatagcttgaacccgggaggcagaggttgcagtgggccaagatcgcaccattgtactccagcctgggggacaagagtgagacttcgtctcaaaaaaaaaaaaaaaggaaagacaacacaataggagacattttgcaaatcacatatccgatatttttttttctagcctatataaataactctcttccctccccttccaccccccgctggccaagatggagtctcactctgtcgcccaggctggagtgcagtggcacaatctcagctcactgcaacctccgcctcgcaggttcaagcaattttcctggccttagcctcccgagtagatgggattacaggtgcccaccaccacgcccagcaaattttcgtatttttaatagagacggggtttcatcggcacgatctcggcccattgcaagctctgcctcccaggttcatgccattctcctgcctcggcctcccgagtagctgggactacaggtgcctgccaccacgcctggctaattttttgtatttttagtagagatggggtttcaccgtgttagccaggatggtctcgatctgctgacctcgtgatccgcctgcctcagcctcccaaagtgctgggattacaggcaggagccaccgcacccggccaagagctgccataataaaatactgcaaagtgggtggcttaaataacagaaatttattttctcacagctttagaggctagaagtccaagatcaaggtgctggaaatttggtttattgtgaggcctctcttcctgattgcagacagccatcttctcactgtgtcctcacatggcatattctctgtgtatgcacacacacacacacacgcacagagagagagagagagacggcacatgtggtctggtgtctcttctgacaaggacactagtcttatctgttaagagccccattcttacgtcctcaattaaccttttttttttcttttcgtgagacagagtctcactgttgcccaggctggagtgcagtggcatgattttggctcactgcaacctccacctcccaggttcaagcgattcttatgcctcagcctcccaagtagctgggattagaggcgtgtatcaccacgccatgctaaatctttgtatgtttagtagagacggggtttcgccttgttgccctggttgttcttgaactcctaagctcagacagtccacccacctcggcctcccacagtgctaggattacaggcgtgagccaccatgcctggccgcatcatttaaccttacttacctctttaaaggcccttctccaaatacaggcacattgggggttagggctaaaatctataaatttggggtgagcacaatttcagttcataacaattacctgtgggggtgggtggaattgatgggaatggtaatgagatttccctgagcacacctttttttttaaagttttacattttgaatcatatacatggcttatatctatatctatctgtctgtctgtctatctatctatctatctatctatctacctatcatctactttttttttaagagacggagtctctgtcacccaggctggagtgcagtggtgcaatctcagctcactgcaacctctgcctcctgggttcaagcaattctcctgcctcagcctcccgagtagtttggattacaggtgtgcaccaccgcctcctgggttccagtaattctcctgcctcagcctcccgagtagctgggactacaggtgcacgccgccatgcccagctaatttcttttgtattttagtggagacggggtttcactgtgttgcccagactggtctcaaactcctgagctcaggcaatctgtccaccttggactcccaaaatgctaggattacgggcctgagccacctcacccggccagtttatatatttttaagaacttaattcaaaaatgatgaagcaaatgaacctagttatataaaattgacactatagccacactgaaaaaattttaattcaagttacatttgaacatagtattctgactgcacatccttaattgtatgtagtttaagaactacaaacggccgggcgtggtggctcacgcctgtaatcccagcactgtgggaggccaaggcgggcagatcacgaggtcaggagttcgagaccagcctgaccaacatggtgaaaccctgtgtctactaaaaatacaaaaaaaaaagaaaaattagccgggcatggtggcattatctaaatgtctttggaaagatagtccagaacgaaaggacagttggtgcctctactcaaagggattgaagaaacatgagaccatggaaaactgtatctcagtagccagtctgtgggacattctataagacaactggcctggaatcattaaaaatatcaatcagtgtcaatgtcactgtcattgtagcaaatgttgtcagtgttctgcccatattcactcaacttgatcatttcaatgtcccattcacagctgatgtcccactcataggttttgcatttctttgctcaagggcttaaacccatgtctaaggcagagaattaataccctcccagggggcaaccctcaattagtgactgataaaagtcagtgtataaatattccagctccctcaccctctgagtgagataactctgaaatatatggttacactagttccctgagctccccaacattcccaaagcagtgttcagtggtgactggcttgataacacacgctattgtctgctttctttccctgtctcacttccccgttacctactggtgttgttagagtgggtagataggcagataggagcagggcaggatagggtcccaaagaatgtcagacaactatcaggtgactgccaggcaaatgtcaggcagctggtcaaaggggaggggaaattttcctaataaacaggagacatcttgggcttgtgggcaacaacttcttggtaagaacttgaaatggtggagtttgaccttcctcaggggacatggccaggcaagcatggtaaggtgcaaaatggcagcgtttgacccatatgtgaccttcctctgggggcactagaccaataagggaaaattgccctaagagagcatgcacgtaacttcagtatggcacatgtgcccctcccagatactagcaagacattgcacatgcagcaattagccaacagcctgccaagggggagggacaagaggaagagacgggaaaagtcagaaaatagcaaatctgcgagtcctgagccagcaatcaggcagagtactgaatttttgagttgcctgcttggttccttacatgtgtgcttttatttgcttcagtgaattcttgtttctgccttaaatctacttctgtctcagccaaattcattctcccaagaagacaaggatcgaggactgtggagccaactcagactcgccacggctaacaatgtttcctgggatcgcctcccaaataaactgcttgtacttgaacccttgtctcagagttgactactggaagaaccccagataagacaatctgcgagtagacatgtcagataatgcagttagatatgaatctggaattcagaggagaggctcatgcaatttgcaagtcatcatcaaaaagatgtcatttgttctgtttgtctactgcaggaagacagattaccctaaaatttagtggctgaaaacaactctattttatcgtagcttacaattttgtggattgggaattagagcctgtctcatctgggcaactcttctgttccccatggcatcacctgaggtcactccatggtattcagctaccagacgaactcatctggagtatccaagtattcattcacgctcatatctggcaccttggcagggatgactggaagcctgggctcagctgggactgctgaccatagtacctacaaatggcctcttcagcatggcttcttaaatggctgctcggagctaccaagagacaggaagtagaagctgctagtttcttaagacccagaaatggtacaatttcattcctgccattggtcaaagcagtcacagagccttccaagaggaaacacagaccctcacttctcactgggaagtatgtcaaagagtttggggctttttttttgagaaggagtcttgctctgtcgcccaggctggagtgcagtggcaagatctcggctcactgcaacctctgcctcccgaattcaagcaattctcctgctttggcctcccaagtagctgggattacaggcatgcgccaccacacccggctaatttttttgtatttttagtggagacggggtttcaccatatgggccaggctggtctcgaactcctgaccttgtgattcacctgcctcagcctcccaaagtgctgggattacagacgtaagccactgcgcccagccctggggctgtctttaatccactacaacattgcaaagctgtgagccaggatgagaacgccagaggtatgaatgtggattaaaagtccaagcactgaaactttcaatgtttagagaccagtgagagaaagaaccagcaacagagactcagaactatatcatattctgctgataagccaataagatgataatgataactaagaattgacattggctttagtgatgtagacataattggggaccttgacaagagcagtttactgggggtggttgagttgaaactttgattgtttcaagagagaatggaatgagtggaaagatagtttgtgagtgctagcaattattcagagaatttctgctataaatgggagcaggaggatgtatcaggagctaatgggagaaatgaggtcaacattatttcctatgtagctttctcttatgcccaaattccactggatatcatccacttctggttacttctggtttgggatgtataggtgaaggaatagttttggatcctcctttattacctgttttatttgcataattggacaataactaaacttgctttaaatatctcttaaagcattttaaattcaaatttggagagaggaatatgagagtggtttttggtcattgtttagccatatacaatattgtcttaccttctgcatttgaagtttttgatacctgataaatgtttgtattgtgtagttgaacaagaatttgccacatgaaggtttacagttgtagttttatgttaagttctttacagtagtcccctctcatctttatcccccacttggaactatctacagtagttccaggacccccctcccagtggatgattgaaaccatggatagtaccaaaccctatatacatattatgtttttcctatacatacatacctatgatgtttaatttctaaattaggcggagtaagagatgaacaacaactaataatgtaatagaacagttgtaacaatatactataataagagctacatgaatgtggtttctccctctcaaaatgtgttactgtactcacctatctttggtccatggttgtctgtgggtgactgaaactgcatataaggcaggggactactgtaaccacaggtgttggaaggcagcatagcagagtagttagggtcaggactgcggaggaagactgcctaggttcatattatgatgtaaactctccatgcctcacttttcttatctaatgcggagataataatagtaactcatttgtaaagttattataagtattaaatgagaaaatacatgtaagacacttagagtatcacaggtcatcacttacttagtatgtagtaagtatttgatgaggttagttactattcttattgagcagtgaatcagttaggaatgctttcggctgcaaggaggagaatactgatttacagtggcctcagtgagaagcctgcatttctctcacagagcaggcactgcagaggtaggcagctgctaaaacaggttcctttctacagctccaggggtctgagttggccactcttcagttccctcggacctcccctgttgtttgccacaccaccaatcatcacattctcaaaggcattcaaggcagaaagctgggaacaaggaagggcggagagtttctcttcaggagcctccctcttactagagaagaaaaaaacctgccttttatgggttcttttgtcttgtttttcatgactgtcttcatttgagaaagtcctcaggccaagaaatggaggtgctggcagttggagatcaggctgtccatagcacactgatgtggcacaggcaaggaatatggctgaggcaccaatttgctgctactgctgtctaacaggcattggaagtcttatgtgttcaaaaataaacttctgatttctactcccaaacctgctcttcccacatcttccccgtctcagtaggtggcagctctatttgtccggttactgagaccaaatattagagtcctccttaatttcctctctctcatgcttcacattcagtttattaataaatcctgttgacagcctgggcaatatggcaagaatccatctcacaaaataaataaataagccaggtgtggtggtacgtgcctgtggtccccggttactcgagaagctgaggctgaggatcagttgagcccaggagttgaggctacagatagctatgatcacaccactgcactccagcctgggcatcagtgagagcacatttcttaaaaaaaaaaaaaaaaaaaaaagaaggactgggcgtggtggctcatgcctgtaatccgaacattttgggaggccgaggcgggcagatcacttgagcccaggagtttgagaccagtctgcacaatatggtgagacccctgtctctacaaaaaatacaaaatttagctgggcatggtggcacatgcctgtagtcccagctactcgggaggctggggcaggaggatctcttgagccagggagttggagattgcagtgagccaagatcacaccactgcactccagcctgcgcaacagagccagactgtgtttaaaaaaaaaaaaatcctgtcagatctacctttagattatgtccagaattcaaccactttcatcatctgtatcattactacactgacccaatccaccaacatttcttgcctgtattatttaaaatttctggccaggtgtggtggctcacacctgtaatcccagcactttgggaggcccaggagggtggatcacgaggtcaggagatcgagaccatcctggctaacatgatgaaaccccgtctctactaaaaatacaaaaacttagccgggtgtggtggcgggcgcctgtagtcccagctacttgggaggctgaggcaggagaatggtgtcaacccgggagggggagcttgcagtgagccgagatcgcgccactgcactccagcctgggcgacagagcgagactccgtctcaaaaaaagaaaagaaaagtttcctaactggtttttgtgttttcttcccctttccccccatgatttaaaagctaggttatattctgtcactttcttgcacaaaattctccaatgacttccagtctcactcggagtaaaatccaaattcttaggatggcctataatgtcctacaaaatttgccccctcattgactctttgacctcatctgctagtctcctagctcattctgctccagttgccccaatttccctactgttcccccaaccatgccaggtgtgcccccacctcaagagcggccctttttttttttttttttttttttgagacggagtctcgctctgtcgcccaggctggagtgcagtggtgctatctcagctcactgcaacctcggcctcctgggttcacgccattctcctgcctcagcctaccgagtagctgggactacaggcgtccgccaccacgcccggctaattttttgtatatttagtagagacggggtttcaccgtgttagccaggatggtctcgatctcctgacctcgtgatccgccctcctcggcctcccaaagtgctgggattacaggcgtgagccaccacgcctggcctaagagcgacccttctaatgggcacagttttctgccaggttgcctcaaggcttgcttccttacttccttcaggtctcacatgtcaccatgcctgagccttccctggtgcccctatgtgaaacagccattttctcatgcactttctgtccccatatcctgttttatttttctccacctgatatactatatgtgtatttatatatatatgtgtgtgtgtactatgcttgcttatcttcagtctcccccactgaaatgtaagttccatgagagaagactttcttgtattacctgtttcacccctagtgcttggaacgtaataggcacttgaagagcatttcctgaatgtatacataaacaagcaatattgcatgttagcgttgcctcaagatttgtgcttattcctcccatattttgtgattaattcccctctacctactcccaaaatgagattattaaatcaaaaggtaaaggtactttgggaggccgaggcgggcggatcacgaggtcaggagatcgagaccatcctggctaacacggtgaaaccccgtctctactaaaaatacaaaaaattagccagccaaggcagcgggtgcctgtagtcccagctactcgggaggctgaggcaggagaatggcgtgaaccccggggggcggagcctgcagtgagccgagatcgcgccactgcactccagcctgggcgacagcgagactccgtctcaaaaaaaaaaaattccaaatagctttcaaaaacaaagcaattatgtggagagtatcatacgagttatacgttcttgttaggcattgtacttttaaactttttcacaaattttatagaaaagactagcaaaatttattatctttccatatttatttacaaccaataatagtagttttgaataaataattaattttttaaagtatttaaaaaacggaaatcttgaccaaaggctttctcaggtttattcacctttttggctgtgatctgaccatggctgcctgtaaccaaaggtgaacttactaaccccgctctgcacactgctgcttattttcctccgttaagtgcaatacctgcctccccagttcacgattctaagtcctatatattagcttatctttatatcttagttatataattctcacactagaggaaaaggcagtcttttctggctcaatgactatgtctttaaaaaaaaaaataccatgcccttccccacaatgttttcagtatcctataataatatgaaacaaaacaaaaggttgattaaaggaacgtacatattggttgcatcatagtcaccccaagggaaatattaggccccaatggaagtaaagacatataggttccttttcttctccaaccaaaggagcttgctgctcagagttcaaaatctatattttgcatatagattatctatattttatctttgcatatgcaatgataaaattccatggaaaaaaatggtgacatatgcacataaatccacttctatatacatacattttgactcttagaaacagctactatataacacaatcaagtatcgatttatttcctgtctctctctctctacgtatatatttggttcaaaatatatgtatttggttcaaagtctcagcaagggatgtacctggctttggttattgatgagaagagtaattaatagaacattccctttgctgtgataccctacccaaaatagctcggttgttggttcactttcttcagatacctccttgtctcatggaccgcctacttactcccaaatgccattctgaacaaccatttgtaaccacctcctcccaaatgccctctcccaactgcctttctaaatcaatgtttcactgtcctaatttcttactgttctttgcagttgtcattttaacctaagagctaattatctttgccaaacaccattcctaataggccaaactttcaaactgaaaaaagaatcttaggaagtcttttggtaaaaataaatgttcccttatttttggttattagtattttgttttttattttaaactatggatagcttcttgactgcctaagattgtgctacataaatatccagtaaccaccctaatcagcaaaatgagataataaaacaatcccaaaaggaatgtgagtaggactaaattatgactttttttttttttttttttttttgagatgatgtcttgttctgttgcccaggctggagtgcagtagtgccatctcaacttactgcagccttcacctcctgggttcaggtgattctcctgcctcagcacccccctgccccacccaggtagctgggatcacaggcacctgccaccacacccggctaatttttgtatttttagtagagacagggtttcgcatgttggacaggctggtctcgaactcctgacctcaggtgatccaccacctccgcctcccaaagtgctgggattataggcatgagtcaccgcgcccagccctaaattatatcaccagaaatggagtgggatatatgaagacaatgtgtctcacttcacactgacgcaaagtctgtcaacagaacagaagcaagaattcctgaattaagttatcaccagtatatatggaatgctgtctgataaacctctttacatagtttcttcattttacttttcccagattttgtacttcactcttaatatcgtatacacatactaaaatctttttttttttttaagagtcagggtcttgctctgtcacccaggctggagtgcagtggtgtgatcatagctcactgtagcctcaactcctgggctcaagatatcctcccacctcagcctcccaagtagctgggactacaggagcatgacagcatgcccggctaatttttaaattttatttttgtagagacaggggctccctgtgttgcccaggctggtctcaaacttctgggctcaagtgatcctcctgcctcagcctcccaaggtgttggaattacaggcttgagccaccatgcccagcttaaaattcttgtaatgagaacaactatggtcaaatgtaataaattgtgattatatatataataaaataagtaaaatgtctatttcatataatttatatgacaaatataatacaattagtgcagccccaccaaagtctcatctaaataaaattattgactattatacttttggtatgaatcagttctcattgtgagaatgttaaataattctttgactggtgttcctgggatgcaaatatatgtagttgttcctcagtatctgtggtggattggttccagcaccccctttcaaaaccaaaatctgcagatacagttgctgatatgaaatggcatagtatttgcatataaactacgtacatcctcctgtatactttaaatcacctctagattattgtaatatctaatacaaagtaaatgctacgtatattgttatactgtattgtttagggaataatgccaagaaaaaacagtctatacatgttcagtacagatgcagccatccattttcttgtccaaatattttttatctccagttggttgaatccattgatgcagaaaccacggatacggagagctgactctgtgtgtgtgtgtgtatactcaccaattctttatttattcaacaaatatttattgaatttctactatgtgtgaagcatagttcacgatcctggggatatagtagacaagctccttgccttattgagctcacattcttatggggaagggcaggttcagggccttctcagatctttgctgggcatgcacacagccctatgcatatgctgctttgtggattcccacaatgagttgaagcttttcaaagctcctagggacgtaccattctctggcttttccttttgagctttaggttagccttttgtttgccctaatatcacccactactcaggcaggaatgaagtcaaacaattgtcttgaaatattttcaataaatgcctctggagaaaagggtttttatttttttagccctggataagatcctggttaggttaaataaaggcagccttgcaagtggggtcttcccgggaagcaccagacagacaaataactacagtaccatgagaatgaagctttgaaggtgctctaaccccattctgccttatctagtggctgccaggttcctggggtcaccaggattgtggactgttggcttccaaggctgccagggagctggagaaagggggatggaaataggatagttaaaatgccacaaacctctttgtttttactaagattcaaccatttgtcttgataaatgcctcccagattgctgcaagcaagcctttggttaatttccagagttctgataaacttaatactatcaatttttgtcagttttgtacttgcttttatggaggaaagaattgtgggagtttctttgtcattttcactgctaacactcatagggatgaatcttacaaacttaatgtcatggaatgaaatgggaaaggcataaaatagtacatagggcataattccatgaatataaagctcaaaaataggccagacacagtggctcacaccagtaatcccagcactttgggaggccgaggtgggaggacagcttgagcccaggctggagagcagaggtgcgatctcggctcactgcaacctccccctcctgggctcaggtgatcctcccaccccagcctctcaaatagctgggactacagacgtgtaccaccacacccagccacaaaaagtttttttaattagctgagcatggtggcctgcatctgtagtcacagctactcaagaggttgaggagggaggatcgttggagccagggaagtcgaggcttcagtgaactttggtcgcgccactgaacttcggcctgggtgacagagaccctgtcacacacccacaaaagttcaaaaacaggtaaaactaaatgacataggcagggatgtgcatataggtgataaaatgctaaagaaaatgaagaacacaataaccgtaaaatccaggatggtgcttcttgagaattgggaaggggtacccactagccacctagtgagctaggtgatggttacgtgggcagtaatttcacacctatttgttaaattgtacttatatgttttgtgaactttttttttttttttgagacaaggtcttgctctgtcacccaggctggatgagtgcagtggtacaatctcagctcactacaacctccgtctcctgggctcaagcgatcctcccacctcagcctcccaaatagctgtgactacaggcaggcgccaccatgcccagctaatttttatattttcagtagaaacggggtttcaccatgttggccaggctggtctggaactccctaccttaaatgatctgcccacctcggccttccaaagtgctgggattataggcatgagccactgtgtccagaccacatttctttatgtgtattatatttcacaataaaacattttaaaattaaatagatacttcatttataatttgcaccaagcaggaagtgaacacattccacccacacagaactcagttgtatgccatcatatttaactacagcacagggaaaaataaggaagtgtagccaaaatagatttttttttttaccttgtgacgcaacagtaaaatagatgttataatatctacgcgttcaaaggagagcctcgccggccttatttaaaggctatttatttttattaatgtctaacatacttggtcttctgtttcctcagtagacagtaaactcctcaatattatttgagctcctaggacagatccgtgtctgttttgcttacaatagcatctctagcacttagccgattgtaagtgctccataatcattaaatcaagaatgactgacagcaaattaggaaaaaagggaaaaagttgatgtaagcaagtgcactgactgtaagtcaggaatggaaaaaaaaaagccaatagaaggcgaaaacaaacagaaaaccatgagcattagaatggagtaacggcttaaacaagttatcttttctcatataaaaaaatggaggtggcatggcagacttttgtattatcaggagcccaggctcccatctttctgcttgaccatcctcagttcatggtttctagtctcgaggtcacctcagggtccaagatggccatgaatattccattattatatccaggaataaggaagtcaagtaaaggggagcacaacatattaaggtgatttccagaagttccatacaacacccctatttacatattgggcccatcgcggtggctcacgcatgtaatcccagcacttagggaggctggagtgggaggatctcttgaggccaggagttcaagaccagtctggacaacataacaagacctcaactctactaaaaaatttttaaaaattaaccagttgtggtggcacatgcccgtccagaggctgagttgggaggatggcttgagcccaggaggttgaggctgcagtgagccatgatcgtgccactgcactccagcctgggtgacagagggagatcctgactcaaaaaacaaacagccaggcacagtggttcatgcctgtaatcccagcactttgggaggccaaggcgggaggatcatgaggtcagcagttcgagatcagcctggccaacaggcgaaaccctgtctctactaaaaatacaaaaattagccaggtgtggtggtgcatatgtgtaatcccagctacttaggaggctgaggcatgaaaaatcacttgaacctggaaggcggaggttgcagtgttctgagatcgagacagtgcactccagcctaggcaatagagtgagactctgtcttgaaaaaaaaaccaagcaaacaaacaacaactacaaaaataaaaaaaccccaaatacatcttattggccagaacatagtcacctgttcaaatgtaaatataaggaaagtagggaaatacagtctcttatcagggcagctaatactggggattctgttcactagggaggaggacagatcagatttggtaggcagcattagcagggaggaggacagatgagatttggcgggcaacattagcctctgccacagggagaatttgatcagaagcaaatagatgaacctgtacgcatcaagaggttctgagtacagcataactctaatacataacaatacaaagcagtcgtacttgttaataatgcaaattctgagacatcaagaaaaatattaaattacatgtaccaatcttctgtaaagaaagcaaagatgtggccgggcacagtggctcacgcctgtaatcccagcactttgggagtcgaggtgggcggatcaccaagtcaggagatcaagaccaacctggccaacatggagaaaccccatctctactaaaaatacaaaaattagccgggcgtggtggtgcgcacctgtactcctagctacttgggaggctgaggcaggagaatcgcttgaacccaggaggcagaggttgcagtgagccaagatggcgccattgcactccagcctaggcaagagagtgagactccgtctaaaaacaaaacatcaaaaaggaaggaaggaaggcaggcaggcgggcaggcaaagatgagtataatacattttctgaagaagtgtatccaaaatattgaatattgaaaacttagagcacatagaggctggggaggtaggccacatctgtagccccagcacgttgggagtcccaggcaggaggaacacttgagcccaggaatttgagaccagcctgggcaacataaggagacatcatttctataaacataaaaaaattagctgggcgtagtgcatgcgcctgtggttccagctttttgggaagctgaggtgagaggatctcttgagttcagaaggttgaagctgcagtgagctgtgactgtgccactgcactccagcctgggcagcagagccgctattgtctgtcatccaggttttgcagtaggaatctgattgttttttttgtgttgttgttgttttgagatggagcgcagtggcacgatctcagatcaccgccacctccacttcctgggttcaagtgattctcctacctcagcctcctgagtagctgggattacaggcacacaccaccacacctggctaatttttgtatttttagtagggacagggtttcgccacattggcctggctggtctcaaactcctgacctcaggtgatctgcctgactcggcctcccaaagtgctgagattacaggcataagccaccacccccagcataattagtcttcttgtttaacatctttccccccacctttcttttcaacatagcagccagcaaaatcctcttaaaacttacatagataaacatcactcttctgctcaaaacccctcagtggccttccttctcagagtaaaaccaaagtcacatcgcctaaatgccttgtctgaaccccaaaccttcctgatctcacctgtgcttgcctcctggtgcctttgactcaagccatttcctactcatgttgtacctccgacactccagacgtgctccatgctgttccctctgtctggaacactcttccccccttgcactgtgcccttctcactcatttcattcagttatttgcaaatgtcacctgatcagagaggccttccctaagcaatcgctccatttgaaagagtaccgctgccctcgtcactctagttctgctgcatttttcttttctttctttttttttttacttgccgataattttattgcttacgtagaacatccaagagtatttaatgataaatagaacccccaaagtttcagacaattatttggtacataatccatacataaaaatgagttgccttcctctatgccagaagccaacagttagaatatataattttataaaaattctatttatagtatcaacaaaaatttttaaattcctgatagaaaatataaagacatgtaaagtattcataaagaaaattataaatccttattgaaaggaatcagtggaaagctataccatatttatggatgggataattaaaaatcattaatttgatatcctgcatttttctttatagcatttacttctaccagccacactctaaatttgtttacttgcttatcatgtctatcatgtctctgtctcctggaatataagctccaagccgggaacttgttttgtttcttgctctattctcagttcctagatcagtacctttcacatgggagtggattaataaatatttatttaatgaaggatgaatgaacgaatgaatgagaggtattaacactgtttactctgctacaggagtccttggctaaaaagattgagaatcagtaagctatagaacactctatgcaaaacgaaaaccacccatacttttcacatggaagcataagacagttttaactaaataaatgaaaacttttcttcaaaaaaaaaaattactcttctacttttgtttcagtatttcatttacactccttaaatctagtaagaattaggcagccaggcacagtggctcatacctgtaatcccaccactctgggagaccaaggcagaaggattgtttgaagccaagagttcaagactatcctgggcaacatggcaaaacgtcatctctataaaaagtgtaaaaaattccaacagagttaaaatgtaaaagtgaaaagtataaaaaaattaggcatggtggcacatgcctgtgatcccagctactcaggaggctgaggtgggaggatggctagagccagggaggtagaagttgcaggaaactgagtcatgccactgcactccagcctgggtgacagagccagaccctgcctcaggaaaataaataaatagatagataaataaataaataaggcatgcaaacatactcaaatatctgtcttaaaaaatgtcttccttgggccaggtgcagtggctcacgcctgtaatcccagcactttgggaggccgaggcgggtggatcacaaggtcaggagatcgagaccatcctgcctaacaagatgaaaccctatctctactaaaaatacaaaaaaaaaaaaaattagccaggcgtggtggcgggcacctgtagtcccagctactcgggaggctgaggcaggagaatggtgtgaacctgggagcggagcttgcagtgagccgagatcaggccactgcactccagcctgggcgacagagcaagactccgtctcaaaaaaaaaaaaaaaggaaagaaagcgtggcagatggggccacctctaactcctcattgtgcattctctcgattctactcatgcttccaggaaactgctcttattagaattggtaagataatcttgttccttactggtggtcacttctccatctttattttccctgcctcttgtcaatgtcctacacagtagaccatttatcttacttgaaacattttcttctctctgcttctggagtaaaatactgtagtagtttgctagggctgccataactaaatactacagactgggtggctttaagaacagaaatttgttctaaaggctagagtctaagatcaaggtgtcagcaggtttggtttctcctgaggcatctctccttggcttacagatggccaccttctcacatggcttctcacgtggcttctcacatggcttttccactgtgtgagcacatccctctagtgtctctctctctctcttttttctttcttttttagatacagggtctcactctgtcatccaggctgcagtgcagtggattgatcttggcttactgcaacctctgcctcctaggctcaaccgagtctactgctccaacctcccgagtagctgggattacaggtgcatgccaccaaaccctgctaatttttttgtatttttagtaaagacagagtttcgctatgtgggccatgctggtctcgaactcctggcaacaagtaatctacccacctcagcctcccaaagtgctgggaatacaggcatgagccaccaccgtgcccagccatagtgtctctctttgtgacaaaatttcctcctcctttaaggacaccagtcaggttagattagggcccaccctaatgcttcatttcaacatttcaacttaattatggcttcaaatgctctatttccaaatatggtcacattctgaggtattggacattaggggttcaacacatgaatttgggaggaacataattcagcccataacaagtaacttcctggctttcttctttacctcactggccctttttttttttttttttttttttgagatggagtctcactctgtcacccaggctggagtgcaatggcactatctcggctcactgcaacctctgcctcccaggttcaagcgattctcctgcctcagcctcccaagtagctgggattacaggcgcctgccaccacgcccagctaatttttgtacttttagtacggggtttcaccatattggccaggctggtcactcctgacctcaggtgatcggcccgcctctgcctcccaaagtgctgggattacaggtgtgagccactgcacccggcccctctttttcaattttctttgcttatttcttctctgtcttgcctctatgtgttggagtgctcaggactcagtgttggggctccttctctttatactttactcttacctactcccatggcttcagatagtatctgtgtaccaatgacttctttatgtatatttctagctctgctctgctctatgtcctgacttctgattcacatattaagttgacattttcatctggatgcctaacaggtaacatattaacatatttgaaacagaactttggttgggtaaggtggctcacatctataatcccaacactttgggaggctaagaaggggggcatcgcttgaggtcaagagttcaagaccagcctgggcaacatagcaagaccctgtctttacaaacaacaacaacaacaaaaatagggtgtggtggcatgtgcctatagtcccagctactcagaaggctgaggtaggaggattgcttgagcccaggagtttgaggctgcagtttgctatgatcgagtgcagctccagcctgggtgtcagaacaagcaaacaaatccaagaaaatcagacctctccatttcttctaaacctgctcctgcctctgtctttcctacttcagtaaataacaccaacatttactcggttactcaagtgaaaaacccaggtattatccttgattcctttctttaccaccattatccaaactatggtcaagtccaacagtttggatcctctatagattctctgtgaacacattttccatatctgttattttctttccaacttcactaagctaccatctctcagctcctagctggtgcccctgcatccacacatttccctacaatccattctccgtacaacaaccagagtgatgtttctattcagatcagggcatttccctgcttgaaatctcgaaagtgcccttggtcctttatggatggtccaccttataggggtcccataaacttaaacccccaaatctttaccctggcttataaggcctgtgccctccctccctacatcttgtacaaatctccctttgacccattaccgaaactccttcccacctctggacctttgtatttgctgtgcccagtgttaaaataattgaatttggagaacatcaggctgaaacagcttcagggccatgggtttctcagtaagcaaactaaagcccatgtaaagggtgaaacttcagcttaaccacccagaagccagcaaccaaccctaactagggactttactgatcagaaacttccaactcacctttaactagagactttccaatgtaaccaatcaaatatgttgtctttgtcttgcttctgagaacaccttatgaaggttttgctcttgcacatttccctagtggagcactggacttcttggattctggtgccccctgattcatgaaccactgtctgctgaaatacacttttgaaaatttaaatgtacgaagtttatctcaacatccgccagaactgctcttcccccagccttagccatgattggctttttcttgtcacgcagttatcgacataaagtcattgtcgaacatctcatttaacgtcaccataacctgtgacctgctattttattgtaagctccgtgacagtatagactttatctccttcattcacaaatgtattcttagtgcttagaacaatgctcactcctgataggggctaataaatatgcattaagtgaataaaattatagatttaaccataataaggtagtatagctaagaggcactgcaatcagccttggatttgagagtccctaaccttgccaattacttcacatctctaaaatgcagttttctaactgtgaaatagagatgatactagtgccggttcttagaatccttttgagaactaaatgagataatgcataggaagccctcagcactcggttgagtaaacagttaatcttagcattattcttacttttttagaactctcctgtgaaagtattaagtcatatgcctaaatgcacctttctctggtgggcggagtgacagcgcctggatcagtagtacagctgctatcacacaatagccaaggacaggaaacagaaagaatactttatcccctgaggatcgcaggggaattcaaagacacacaatgttatgactaaatttggaagctggccgagttactaataccaccatagggtgcttgaggaaaatgcccccaacctcctcaagccagcctccatcctagctgagtgccccacccaccgccacttgtagaagggcctctgaatcgccacacgcaccctgcaggacccagatccttcccatttcagcctgtgttccacgtgaagcacaccataggctgccagacacttcattgcctggcccagaccatcagtattctgtggccagcagcattttccaaaaatggctgtaacaacagcactggttctgcatgttcttctttcacatgacttcaacagtctcccagtgagaggtgaggctatgttttcttctcaggctaggtcataaaaggcaatgcaggctgggtgggcacagtggctcatgcctgtaatcccagcacaatggaaggccaaggcgggtggatcacttgaggtcaggagttcgagaccagcctggccaacatggtgaaaccccgtctctactaaaaatacaaaaattaaccgggtatggtggcgagcgcttataatcccagctacttgggaggctgaggcaggagaatggcttgaacccaggaggccgagtttgcagtgagccaagatctggccattgcactccagcctgggcgacaaaagcgaaaccctgtctcaaaaaataaaataaaatagaaggcaatacagctttctgacattctcccggaatgctcactcttagaactcagtcatgcaccctgagaaatcccgtctgcggagaggcccacatggagaggagccccatgttcctcccagccccggagcccccttacctctgggctgggagcagcacctccttgctggccacgcgagtgagccatcctgaagaacagatcctgcagcccccagtcaagccactggctcttgccacaggtgcaggggcgagaccgccctggtgagcactgcccacaacgagattcagcaaaacaaatgatgattccatctccagaaaaatattcctggtaacaaagtaggaaattaatatgcgtaaagcccattttggctaatgcctaagccaaatggcaattctttttttgttttttattatttatttatttttgagatagggcctcactctattgcccaggctggagtgcagtggcgcgatctccactcactgcaacctccgcctcctgggctcaagtgattcttgtgcttcagcctccaaagtagctgggaccacaggtgtgtgccaccacagccagctaaaattgttttgtatttttagcagagatgggttctcactatgttgcccaggatgatctcgaactcctggactcaagtgattgacccgccttggcctcccaaactgctgagattacaggcatgagccaccgtgcccatacaaaatgacaattcttttttttttttttttttttttttgagacgaagttttactcttgttgcctaggctggagcgcaatggcatgatcttgggtcactgcaacctcctccgcctcccgggcttaagcgattctcctgcctcagcctcccgagtagttgggattacaggcgcccaccaccacgcccagctaattgtttttttgtatttttagtagagacggggtttcaccatgttggccaggctagtctcgaactcctgacctcagatgatccacctgcctcggcctcccaaagtgctgggaatataggcatgagccactgcacccagcctcaaaatggtaattcttaataagtgaaaattttatttccttcttttcttatttggcttttttaaacaactgaaatctgaaggtagttggcccagataaggacttttgtctgcatggaatttttatgcttctctccttttatcaggtgggttcattgtaaggtgtggaagtgaaaaagaatgcaattaacattacagaaacatctattaaatgtcagatattgtgtgctttatatctcatctaataactataatcttataactcatctaatcttcccacaactctaactagtagatgttatttattctcactttaagaatatggaaatggggccaggcgcggtggctcacgcctgtaatcccagcactttgggaggccgaggtaggcagataacctgaggtcaggagttcaagaccagcctggccaacatggtgaaaccctgtctctactaaaaatacaaaaattagccaggtgtggtggcgggtgcctataatcccagctacttgggaggctgaggcaggaagatcgcttgagcccgggagacggaggttgcagtgagccaatatcacaccactgcactccagcctgagtcaagcagcaagattctgtctcaaaacaaaacaaaacagaatgtgtttagctataagtaacagaaaacccaatcaacagtgttttcatccataaggatatttactgttaacaaaaggattagaaataagagattccagaatttgcactgtggttcctatcaggagtagctatacaatttgtggggcccaatgcaaaataataaaacagggccccttgttaaaaatgattaataacttatagcagcatagaacattgaaccaagcacagggttgttctaagtgctgaggcctatacgacaggttcagaggctgaacctggttctaacgacgtcagaattatgggttggcttctgaaattttcttgtccctgcttattgcgttggaagatggctgtcgtagtgctaaacagaagaggatgaacaaaaaagttcccagaagacttccacttgcattctattggccagagctgagtcatgtggctgccccttgttcaagggagtataggaaggggagtagcaggcaaagggaagtaaattgctacaatgaacttagatcaatccagatttaagctctacagaagagtacattgggctgggcagccaacatggtgaaaccctctctctactaaaaatgcaaaaattagccgggcatggtggcgcatgcctgtaatcccagctactagggaggctaaggcaggagaattgcttgaacctgggaggtggtggttgcagtgagccgagatggtgccactgcactccagcctgggcgcaacagagcaagactccatctcaaaaaaaaacaaaaaaaacaaaaatgcccaggtgcagtggctcacacctgtaaccccagcactttgggagaccgaggcaggcggatcacaaggtcaggagctcgagaccagcctggccaatatggtgaaccccgtctctaacaaaaatacaaaaaattagctgggcgtggtggcgtgtgcctgtagtcccagttactcgggaggctgaggctggagaactgcttgaacctgggaggcagaggttgcagtgagttgagattgcgccactgcactatggcctgggcgacagagtgagactccgtctcaaaaaaaaaaaaagaaagaagaagaagaacagtacgttgctgtcccaaatcagggttctgttagcaagataatgggttggggtcatggccattgactaagcatcactgtatcttctacagatatctttacacagtcggcacacactaaaccttcctatatcctgtggttcattcaaattggattatactgtaaacatactcttaatttcttgcccttgcattcttacttatgctttgtcctctatttagaagtcatcatacataggattttgtatgcatataaatcttacccatacttggcagtctattgaaaatgtcatttctgtcatgaagaattatgtggttcccccaatagggtgcaattgtcccacctcttaaatccttaagaatacttacctttaaattctaattaatgtgtttatttaccttatcacccctgtagtgaatattgttttgtctgcctagcacttagtaaggcatcttgctaattgggccataataatgggcatgcaacccaatccagtgagtcagagtctttctctgtaatttttcaaattggatctagggaaaagaatcccctttcctcactggtcacagaattaaaaagttgcataactggaatgctttagatatgtccctaatgtatccctaaccaatgccatgtatcaaggaaaattctaaatgaaagatccaattaaaaagagtactctatcaaggcttaatttagaattttgatagaaaaatgtaagtcagtatttttgcaacctacaaccagaaagagattttaaatacaattttaaaaggattaatcaataaggaaaaatatctatgactgttattacattttttggggggtgggggatgaagtcttgctctgtcgcccaagctgtagtgcagcagcacgatctcagctcaatgcaacctccaccacccgggttcaagcaagtctcatgcctctcagcctcccgagtagctgggattacaggtgcgtgtcaccacacctggctaatttttgtattttttgtagagacagggttttgtcatgttggccaggctggtctcaaactcctgacctcaagtgatccacccacctcggcctcccaaagtgctgggattacaggcgtgagccaccgcgcccagcctgttattgtaaaaaatttaaggatttctgtttaggaaatgacactatggacaaagttaataagcagctaacagagtaagagaagatatttacaaagtcaaaatctgacaagagattaatatctagaatttcaaagaataccttcacatcaacaagaaaaaggtaatgactacatacagaaatgggtgaatgatatgaacagccaattaaaaaaccagaaaaccaaaaactgagcatgcacaggaagtgcttaaaatcattagtaatcagaaatataatttttttaaaaaagataacatttcacactcattacactgccgaaagttgtgaatcagcatgatgtcaagaattggcaggggtgtggacatacaggaaccctcatgcaagggcggtggagagcaagctgtcattactcaggcaaataaaatagacgtctgtcacccaacggttccactgctgtgtgtacggaacgctctcacacagtttataaaggaacatgtaggaatatgttcactgtagtattatttatgatgttcacagtggggaaggtagatgggcgaaatatggtggatgtacaccatgggaaatgctgtggcaggcaggcacgatggattagaaatcacattgtgttagtttcctaaagccattgtaacaaattaccacaactgggtggcttaaaacatcagaaatttagcttctctcagttcttgaggctctaagtcccagattaaagaacttggcacggccatgttatgaagtaaataatactacagtggatatgttcatgtatgtcccttcgtaaattgtatgaggactttttgtacacaggagtggaatcactgggtcgtagacatacactttatttgactaagtaatgacagcttgctctcacagcaggggaggatacttccttgcctcttccagtttccggtggcctcatgttctttggcttctggcataatgactgcaatctctgcctccatcttcagagggctgccttccttctgtctttgtctctgttttcttatttttatttttattttttttgagactgagtctcactctgtcgctcaggctggagtgcaatggcacaatcttggctcactgcaacctccacttccgggttcaaacaattctcttgcctcagcctcccgagtagctgagattaaaggtatgtgccaccatccccagctaatgtttgtatttttagtaaagacggggtttcaacatgctggccagggtggtctcaaactcctgacctcaagtgatccgcccccctcccaaagtgctgggattacaggtgtgagccacctggcccgggcgtctcccttccctccctccccctcccctccccctctcccccctcccctcccttccccttccccttttcccttcccccttcccctcccctcccctccccttcccctcccttcccttctcttccgttccctttcttttgagacagagttttgttcttgtcgcccaggctcaagtgcaatgactatatctcggctcactgcaaactccaccttccaggttcaagcaattctcctgcctcagcctcccaagtagctgggattacaggcacccaccaccatgcccagctaatttttgtatttttagtagagacggggttttaccgtgttggccaggctgatctcgaactggccaggctggtcaaggcgatcctctcgtcttgacctcccaaagtgttgggaggtgtgaggcaccgaacccagcctgttttcttataacagcaattatattgaagagggtctatcctgaattgagtatgacctcatcctacttgattacatctacaaagacccctctctaattaaggtcacattcacaagtactggaggttataatttctacctgtctttttgaggaacacaattcaacccacaacaaagaatagcaggaactatttttaaaatgtagtttttagagctgagcatggtggtgagcacctgtagtcccagctactcaggaggctgaggcaggaggattgcttgagccctggagtttaagacaagcctgagaaacatagtaagaacccctctctaaaaaaaatttttttaattagccaggcatagtgtcatgcacctgcagttccagcactttgggaggccaaggtgggagaattgcttgaggctaggagttcaagaccagcctgagcaacatagcaagaccctgcctccaccaaaaaaatgtttttttacttagctgggcatgtagcctctgtaatcctagctacttaggagactgaagcaggaggatcacttgagcccaggcatttgaggttatagcgagctatgaccgtgccactgcaccatagcctgggcagcagagtgaggtgctgtctcttagaaaaaaaagtttttcataaaaaaaaagaaaacaatataatatatacaataacatgcaggtaggtaactttaaaatacatttaccccaaaaattatgtttcagaatttataaaattcagctaaaggagttcttagaggaaaatttatagtttaatagtttaaatgcctttacttaaaacaaaaaaaggttaaaatcataagaaacaaaaagaaagaaaagtaaagtaaacctaaagtgagcagaagaaaggaagtgatgaagataacaatgaaaatcagtgaaacaaacaaatggaaaaacaattgtagtaattaataaaaccatgagctggttctttgaaaagacaggtaaaattaataaacatctagctggactagtgaaaaaaggagaggacacaaattaccaaaatcagaaatgaaaggacacaacaaagaaaacaacagagtgagagaaaatatttgcaaaccatatatccaataaggggttactatcctattctaaatatgtgaagaaagcaaacaactcatagcaaaatcagatcacacgactaaaaagggggcaaagggcaccaggtgcactggtttacacctgtaatcccagtgctttggaaggctgagacaggagaattgcttgaggccaggagttgtgaaaagcctggacaacatagaaagaccttgtctctacaaaaaaattttagattagccaggtgtggtgacatatgcttgtagtcccagctacctgggaagctgaggtgggaggatcacttgagcccaggagttagaggttgcagtgagccatgattgcagcactgcagtacagtctgggcaacagcttgatagcttgagaccctgactctttaaaaaaaaaatcatttatcaaaagatgacatacaaatgatcaacaggttcataaaaatgctcaatattggctgggcacagtggctcacacctgtaatcccagcactttgggaggctgaggtgagcagatcacctgaggttgggagttcgagaccagcctgaccaacatggagaaaccctgtctctactaaaaattccccagaggctggggaataaggggctgggggagataatggggagatgaagatgttggtctcagggtacaaagttaacagttaaacaggaggaatacaattttgagatttattgcacagcatagtgactatagttaataataatttattgtatatttcaaaatttctaagagagtaagttgaaaatatctcgccacaaaaagaatgataagtgggctaggtgcagtggctcatacctgtaatcctagcactttgggaggctgaggcaagaggatcacttgaggcgaggagttcaagaccagcctgggcaacatagcaagaccctgtcgctacaaaaacttttttttttttttttgagacggagcctcgctctgtcgcccaggctggagtgcagtggggcgatctcggctcactgcaggctccgtcccccggggttcacgccattctcctacctcagcctcccgagtagctgggactacaggcgcccgccaccacgcccggctaattttttgtatttttagtagagacagggtttcgccatgttgcccaggctggtctcgaactcctgacctcgtgatcagcccgcctcggcgtcccaaagtggtgggattacaggcctgagccaccacgcccggccccaggggacattctagaggggacttcgccccccaagccgcacttctccatttccctgcggtcgtcgctaaccgaaggcgccatccggtgacgactggatgtgcgcggcggtggtgagaggccgcgagaaccaccaggtccaccgctgcctcggcccgggcggaatctgggaaggtctctgacaaccattcatcctcagattttcccaattgtgcatgggtgggcgggccccgcatcctaatgggcactgggcatgtgaagtgtgaaccacccgggcctaactagccgctgaaggcctgacgaaaccgccaggcccaccagggggcagcagagatccgacggccgcggaccgagggaagctggcgggaagtaggaggcagagggcgcgcagggaagcggcagggcgagcggctcagaacgtaaaagccagcaccgcgcctccaggttgctttacggctgccgcagaaggctttgcggctcttttcccctccgacttgatttacggttccttctctggtctgtgtttttttttttccccctccggcgctgggcgtgggttcggaccttcttcccagagacgctcgcgcacccttcccattctcctctgcgcggcctccatctaagatctcttccccttgtccatagcctagatcgagctccctgtgtgcaccgcgcgctgcccgaggcgcgtaagtgggggaggagagcggcttcccccggggtggttctagccgtgggtgtggagcgtgggaaggctcagcttccgggtcgagaacctggggctgcggtggacctgatcctgaggtctcagcgtagagatgctgagtccagaggcctgttctagttcaccagtgcagtgaggggctcagtatccgggcctcccgagaggtgggtaggaaggcggggtacaggaaacttggcaccaacgcgccgggaccccaccgcggtgcggacagccaggtgtccgtggtggcgcttccttggagatgctgcctgcagacaggcgtggggaatctgaagtttgtgttaatagctaaacgaagttgagttgcagggagcgggggacgctgggaagaaatgattgatttaaaaggaatttgacgccgggcatggtggcggcatgcccccatgttccctggaggtcaagcctgcagtgagccgagatcgcacccgtaccacgacactccgtcccgggcgacagagcgagaccctgtcacgggggaaaaaataaaaataaaaatttgacgctcactttagctgagtattgagccttgttataacattgagatagaggtctggcgcggcgtctcacacctgtaatcccagaactttggaaggccgatgcgggaggatcgcttgaggccaggagttctacgccagcctggctaacatagcgaaaccccgtctctactaaaaatacaaaactaggcaggcctggtggcgggcgcctgtaatccccgctactcgggaggcggaggcatgagaatcgcttgaacccagtaggcaggtgtgccggtaagccgacatcgcaccactgcactccagcctgggggacagagcgagaatccatccaaaaaaaaaaaagttataattcacgtacaattaaattcactcccttttttaaaaaaaagtggagacatagtctcgctctgttgcccaggctggagtacagtggcgccgtctcggctcactgcaacgtccgcctcctgggttcaagcgattctttgcttcagcctctcaagtagctggaattacaggcgcataccaccacacccagctactttgtatttttcaccatgttggttaggctggtctcgaactcctcgcccttccaaagttcagggattacaggtgtgagccaccacacccagtctaaattcacccttttaaagtgtgcaattcagtggttttaatatattcacaaggttgtgcaatcaccactattatctaattccagaacatttttatcatccctaaaagaaaccttaaaaccattagcagacacccattatttcctcctactcccagcagcactaatctatgaatttacccattctcagtactgtattatacaatatttgttcttttgtgtttggtttatttcacttcatgattcaaagtccatctatgttgtatgtagcatgtatcaacttcattttttaaataactgaattatttattgtgtggatataccacattttgtttctccatttttgatggatactggtgattttctaggctttctaggtctagtcctccacagaactcgcagtctgaggcacagacatttaaaacttaagtttttggaaactagcatttaactcttgggttgggtcaggtaattcagtggcctcaggtctggtatcgtttagggcagttttttttttgttttttttttttttttgagatgaagtttcactcttgttgcccagggtggagtgcaatggcgtatctgggctcactgcaacctcacctcctgggttcaagcgcttctcctatctcagcctcctcggtaactgggcttacaggcgcatgccactatgcccggctaatttttggtatttttagtagagacagggtttcaccatgttggccatgctggtctcgaactcctgacctcaggtgatccacccatctcggcctcccaaagtgctgggattacaggtgtgagccaccgcgcctgggtgggagttttgtttttttgtttgtctgttgttttttggggggacagagtttctctcagcctcctcggtaactgggcttacaggcgcatgccactatgccaggctaatttttggtatttttagtagagacagggtttcaccgtgttggcaatgctggtctcaaactcctgacctcaggtgatccacccgcctcggcctcccaaagtgctgggattacaggtgtgagccaccacacctgggcgggagttttgtttttttgtttgtctgttgtttttttggggggacagagtttcgctcttgttgcccaggctggactgcagtggcgagatcttgactcactgccacttctgcctcctggattcaagcgattctcctgcctcagcctcccgagtagctgggattacaggtgtgcaccaccacacccggctaattttgtatttttagtagagaaggggtttctccatgttggttacgctggtctcgaactccctacctcaggtgatcctcccgccttggcctcccaaagtgttgggattacaggcgtgagccactgcgcccctctgggagtgttttttaaagtgttctattctcagttcaccacttaccaggccgttaattatcgtggtatcaagcagagaaatgtttgtgtgctggtcttctcagggaggcagaaaccgtcagagattgctgttgtgtaatgtacaccaaaacgtgttatcttgtagtataaacggtgtagttggagatgagtgtatgaaaaatgtaactgagctagctgtgggagagactagttgtgaaaaattttgagtcacccactgtatgctttcccagctatgttcaaataaggtgacactctgccttcctgtttcagctctaaaactgttcataagtgttattttggctgtatacgtagtgccatgtttttttgtatttttgtgcttttggtgattttgctgtttataggggcctccaagaatagaagtgctgtctagcatttccaagttgaaggctgtgatatatcttatagagaaaagataagcttttagattagctttgttcaggcatcacttttgttgttggctgtgagttcatgttactgcatcaacaatatatattaaataagatatctttaaacagaagcacacataaaacaaggttatgtattggcctgttgagtaaccctgtatttcccctgggagcagtggctcagtatttgctagttcagtgttcatgatggctttacaggacataactaccctgaataatgagaactgactgtctcagtagtgcttcaagggcagaaagcctagtggatatttttccatctctgcagcttttagcatttcttcactcaaggcactcatttttaatattgaactggcagttttgatgtggagagaagctaaaataaggctaaaatgctcttcatactatgtgctgagtggggactgtgctgagtgttggggattcagtgattagtgtatggccccgcagttctctaatggctgagtgtgggagtgcagagaaatgatcagtgtgagggaattaatcctatgttcccaccgtgtttttttgttttttttgagacggagtttcactcttgtcgcccaggctggagtgcggtggcgtgatctcggctcactgcaacctccgtctcccaggttcaagcgattctcctgcctcaacctcccgagtagctgggattacaggtacccgccaccgtgcccagctaatttttgtatttttagtagagacggagtttcaccatgttggccgggctggtctcgaactcctgacctcatgatctgcctgcctcggcctcccaaagtgctgggattactgggttcccacaaattttaagacttacttcaggccaggtgtggtggcttatgcctgtaatcccagcattttgggaggccgaggtgggcagatcacctgaggtcaggagttcgagaccagcctggccaacatggtgaaacccctgcctctactaaaagtacagaaaattagctgggtgtggtcgcgcatgcctgtagttccagctactcaggaggctgaggcaccagaatcacttgaacctgggaggtggaggttgcagtgagctgagattgcgccactgtactccagcctgggcaacagagtgtctccccctcaaaaaaaaaaagacatacttcagagtgtggtgagctgcataaggctttagaggtaatgacattttgagatttcaattaaaaattttttttctactttttttttttgagacagagtctcactcttgctcaggctagagtgcagtggtgcgatcttggctcactgcaaccttcgcctcctggattcaagcgattcttgtgccttagcctcctgaggagctgagattacaggcacctgccaccatgcccagctaatttttgtatctttagtagagaagaggtttcatcatgttagccgggctggtcttgaactcctgacctcaggtgatctgtctgcattggccttccaaagtgctgagattacagatgtgagccaccgtgcctggccactttttttctacttttgctaatttttttaaagtttcatgaacattatagtactgtgttcataaatgaaaataaaagaaacttgctccagtcttgttcatcaagccgttcttgaccttcacagtcagaatctcacccatcaccttgtcacatctccctcttgatctgtatatccagagtccacctgacatgcttcttcagccctccacatataataagaaatggttttgtgagccgagattgtgccattgcactgcagcttgggcaacagtgtgagactcctcaaaaaaaaaaaaaaagaaagaaaaatgcttttaggtgataaggaaatggagaagaataaaacatctttgccagtctttacctttttaatatcttgaattcatgatttcttgccatagccactatcctagtccaggctctctcccttctacccctgagttttttttttttttttttttaccatgtttttatttcctctgggaaaacacctatcagaattttgggatcatatgacagatacatatttaatttctttctttcttttttgagacagggtcttcctctgttgcccaggctggagtgtagtggtatgatcatggctcactgcagccttgaccccttcctcgcccccgctcaagtgatcctcccaccacagcttcctgagtagctgggactgccggcatgctccaccatgcccgactaacgttttgctgcttgtagagacagccatgttccctaggcttgtcttgaactcctgagcctcaagcgatccttccacttcagcctcaagtgctgggattacaggcgtgagccaccactcctggctacttaatttctttctttctttttttttgagacagtctcgttctgtcacccaggctggagtgcagtggggtgatctcttctcactgcagcctctaccttccaggctgaagcaagccttccacctcagccccctgagtagctaggactacgggaacattccaccaggcccagctaatttttgtattttttgtagagatggagtttcatgatgttggccaggctggtcttgaactcctcacctcatgcaatccgcctgcctcagcctcccaaagtgctgggattacaggtgtgagcaactgcacccagcgggccccgcccagacctattttcaaaattagaaaaccgtgaggcttctggaagaagatgagaagaatatcttcatgacctgagtgtgtgcaaaggtttcttagggctcaggatgccagagtcacttaaaaaagcaaaaaaaacccaaaaaaaaaaccacacacacaaagataaatatgattgattacatcaaaatgtaatcacagactactctaagaaaatgaatggggaaacacagggacctatttgacaaaagactgatattcaagataaataaagaactaataggccaggcgcggtggctcacgtctgtaatcctggcactttgggaggccgaggcggggggatcacttgagctcaggagttcgagaccagcctgagcaatatagtgaaaccccatctctactaaaaatacaagaattagaattagctgggcgtgatggcacgtgcctgtagtcccagttactcgggaggctgaggctggagaattgcttcagtcaggaagatggaggttgcagtgagccgagattgtgccactgcactccagcctgggcgactgaacaagacttcgtctcaaaaaaccagtagggctccaggcctgggattgggcctctgctgctctactccctggacgtgtggctccgtccttggagtcggcctttggttttcatgaagagtagtgtgcattaacagctgagtggttttatcagcctgtttcctgccaacagtgtatgagagttccagttgctttacatccttgccagcatttggtgttgtcagtcttttgagttattctgatgggtgtggtgtgtcatggtcttaattttagtcctcagtcactaatggtgtttagcactttttcctgtgcccatgacaatgtgcatcttcctttgtgaagtgcctgctcaaatcttttgcccattttacattgggttgtgtgtctttttattattgagttgtagcagttatttatataacctttatatcctggttacctgtcctctgtctggttgcctattcattttcttagagttgtctgatgaacagaagttttacattttgatgtaatcagttttctcttatattttcttttatagttactgctttctgagtcctaggaaatcttggctaccttcaggctgtgaagataatctttcatgttttcttctgtaagttttttttttttttgagacagagtcttgctctgtcgtccaggctggagtgcggtgatggcgatctccgctcactgcaacctctgcctcccaggttcaagcgattctcctgccccagcctcccgagtagctgggattacagacatgcgccaccatgcccaactaatttttgtatttttattagagacagggtttcaccaggttggccaggttggtcttgaactcttgaccttgtgatccacccgcctcggtctcccaacatgctgggattataggcgtgagccaccgtgcccggcctataaattttatagttttagttttatgtttaagcctatcacccatttctagtttaggtgaatggtgtgagatataattaaatattaatttcttttccatatagatatccagtcattccagcaccatttgttgaaaatgctattgtattgcgttttggaaattaagatgactgtacaaatggtaattgatgtctgcactcccttttctgttccattgttcaatccttgtgttagtaccacacttttaattactgtagctttttagtaagtcttgaagtcatgtagttgtaggtcttccaattttgttgttttcaagcttgatgtgaatattctaaatcctctgcatttccatataaatatcagaattatctttaccagttttacagaaaagtctggtaaagttgtgattgggattgcattgaatctatggatcaatttggaaagaaatgacacctaaacagtattgagtcttcaaatatatgaacttggtgcattttccttcttatttaagccttttaaaatttctttttaggccgggtgcagtggcttatgcctgtaatcccagcactttgggagtctgcagcgggcagatcagctgaggtcaggagttcgagaccagcctggccaacatggtgaaaccccgtctctactaaaaatacaaaaattagccaggtgtggtggcaggtgcctgtagtctcagctacttgggaggctgaggcaggagaactgcttgaacttgctcaggaggtggaggttgcagtgagctgagatagtgccattgcactccagcctgggcaacaagagcaaaactctgtctcaaaaaataataataataaaaataaaaattttgggccaggtgtggcggctcacacctgtaatcccagcaatttgggaggctgagccgggtggatcacctgaggtcaggagtttgagaccagcctgaccaacatggagaaaccctgtctctacgaaaaatacaaaatttgccaggcatggtggcgcatgcctgtaatcccagctactctggaggctgaggcaggagaatcacttgaacctgggaggcagaggttgcagtgagccgagatggtgccattgcactccagcctgggcaacaagagtgaaactctgtctcaaaaaaaaaaaattcttttagttctgttttatggttttcagttcagaagtcttatacatattttgttaaattgatttctagatatgtttcttacctttattgtaaaatggagccatcatttgcatcattcattactctgtatgtaatgtgttatcattctctacctgctttcaagattttctctttatttttgttttttagcagtttgtctgtggtgtatctaggtgtcattttatttgtatttatccggagatttattcttgagatttgcagagcttcttaaatctgtaaatttatgtctgtcggccaatttgggaaatttggagctattagttttaaaaatatttcttctgttccattctctttcacttcttctgtatgtgagttcaatttcacttcaattgtatgtgagttagacattttgatattagcccacaggatcctgaggttctttcattcttttcaatcttttttttttctcgaagtttgcatttcgtgagcaggagtgacagtcattcaggatgatttttgagattcctagttcaagagtagttcctattcttttctaggtgtagtcaagtatggcttctaattctactagaaggcttttttgtcggggaggtggttctatgtcctttggctcttacattttctttgtgtctttcacagcacagttttcagagggtaccctttctctttggttttgttttgttttgttttgttttagacggagtcttgctctgtctccaggctggagtgcagtggcgcaatcttggctcactgcaacctctgctcactgctacctctgcctcccgggttcaagcaattctcctgcctcagcttcctgagtagctgggactacaggcacgcgccaccacacccaactaatttttgtatttttagtagagactgggtttcatcatgttggcaaggctgttctccatctcttgacctcgtgatccgcccgccttggcctcccaaagtgctaggattacaggcgtgagccaccgcgcccggccaacagagggtaccctttcattctttttctccttcttcccagaaggcttgcgttttcaagactacctcatcaagttctgcatgtgtttaaaagtgtctctacccgaccttcccttcctccctcccgatttaacggaattctttgttggtgttttcatacttaccgtgagttttctttttcagggtgatattttagttccatcttaggctctccattgtcctcttctctcttctttttttttttgagacagagtctcattctgtcacccaggctggagtgcagtggtgtgatctctgctcactgcaacctctgcctcccaggttcaagtgattctcctgcctcagcctcccgaatagctgggattacaggcgcacacaaccacgcccacctaatttttgtattttcagtagagacggggtttcaccatcttggccaggctggtctcaaactcctgacctcgtgatccgcctgcctcagcttcccagagtgctgggattacaggcatgagccaccgcgcccggtgcgcccagccctcttctctcttctttgcatctctcttcctatctggatccctctttgctgtccttaaagagctgagatgagagattgagaaacatctctacaagaaattgacgtttttctacttatgggtaattagaagcttgtagtattttcagtcttctaagtatgttgaagatatgagacgttggtgattttctttgtttctccggttggttggtctgtgtagtttttggacatgtgtttggatatttggatttatatagctgccataatcttggctatgcaggtagtctttcctgacacttcatcctgaaagatttgaagcctttggacaaattttacagtgggctgggtgcagtggctcacgtctgtaatcccagtgctttgggaggctgggcaggaagattgcttgagcccaggagtttgagaccagcctggacaacatagtgagacccgtgtctctacaaaaaataaaaaatatgccgtgtgtggcgttatacaactgtagtcccagctacttaggaggctgaggtgggaagatcacgagccaaggagtttgagggtacggtgagccatgatcgcctcactgcactgggtggcacagcgagactgtctcaaaaaaaaaatttacaattaatgtctgcatatccttcacctaggttcataaatttgtacttttgctttatctacttgcctttttctctctctctacacacacacacacacacacacacacacacacaattagttgaatgaattgagagtaagttgcagaaaacatgacactttactccaatattgcatcatacaaaatcatacatctagtgataggccattgtcctacagaatcacgatataattatcacactaaccagctgtggtggtgcacacctgtagtctaagctactcgggaggctgaggcagaaggatcacctgagcccaggaggttgtggctgcagtctcatattcatcccatcatcagatttctcccattgtcctaataatattctttatagcttttctttatccctgatccgaaatttcattgaagatcacacagtgcatttagttgtcatgcctcttaagtctttatttatttattatttattttttgagatggagtcttgctctgttacccaaactggagtgcagtggcatgatcttggctcatgcaacctccacccgctgggttcaagtgattatcctgcttcagcctcccgtgttgctgggactacaggtgtgtgccaccatgcccagctactttttatatttttagtagagacgggaattgtaccatgttggccaggctggtcttgaactcctgagctcagatgatccacccgccttggcctcccaaagtgctgggattacaggcgtgggccaccacacccagccttaagcctcttttaacataaaagagttcaccagccattctattttgttttgctttttgagacactgatgctttggagagtccaggccagttgctttgtagatttcaacttgtttgattgtttcctgatgattaggttggtagaaatactacctcaatgatgggaccttcttagtgcgtccatcaggaagcacatgatgtgactgtaattggtgacattaagtttgattccttaataattaaggtggtaactcccaggtttctacattgtaaaggcatcttttgccgccctcctttttattcccaagtagtttatttggagattagtcctttacacagtagaggagcggggaagggagacaggaaaggaaagtttgacaacaaagggtgagttttcaagcctgttgccacgggggaacctaattccactggagaagctcatggcttggtgatgttccacagaggggtcagaaatttagcgtatttcaacaccagctcctgtcaggcaccatttgagggctgctgccagggtggttcaattttctggtgcttacagcttgccataaacaggtgcaaagtagtctggataccaaagaaagctctcaggtaacaagatgcagatgttggcatttggaagtcagaatagggtgcactattgtggtaagagctgaagggatggctgggcgcggtggctcacacctgtagtcccagcactttgggaggatgaggcaggcggatcacctgaggtcagaagttcgagagcagcctggccaacatgacgaaaccccgtctctactaaaaatacaaaaattagccaggcgtggtggtggatgcctgtaatcccagctattcagtaggctgaggcaggagaattgcttgaatctgggaggtgtaggttgcagtgagctgagatcacaccactctgcactccagcctgggtgacagagcgagactctgtctcagaaaaaaaaaaaagctgaagggatgctgagtagagcatccgtagtgtctgctatacctgggtaccctagaacctggagaacctacagcttgaggcaagagcgtatgtgctattattttttcaagaagtgtgctctcaggaagcagaggtaggggaaaggtgagtgaagggagaaggaagattaagtcagttcaagggtgcattttgaagttggttgcccttggtgcaagtacagttggttgcttgttctcctaaagctgtctcccaggaggatgtatacataactgcattccagggcaatccatctaaaggaagggtggacggacccctcagcttctgtatctcactggaaaaaggtttgcttcatggcacattaattcccatagacttctaggttgtgcatgtgtgggtaccaggtgggtcccacagacccttacacctccaaggcaagcagcaagccacgggtgggaagtgataggtacccagtatgagcaggaggtaagggaccgtggggttgtgcctgtgggcagttggttataacccagacgtgtttgatcagcccagtgacagctggagtggacaaagtgaccaagggcctcaaggacacacaaggccaagaagatttgaagtgctgtgtaagatatgcctaatgcatttggattctacctttgtttaacgaatatgcacacataaaaaacacttgaactccttgagcccaggagttcaagaccaacctgggcaacatagtgagacactcatctctaaaaaaattttaaaaaaaattaacctggcatgatagcactcacctgtagtcctgtctactctggaggccgcagtgggaggatcacctgagccctggaggtcaaggttacagtatgctatgattgcaccactgcattccagcctgggtaacagagcaagacgctgtctcttaaattttttttttttttttttttacttttataatggaaaaaccattgtagacagttttaggaaggaaagcagaatagtaagacatctttttcaaagtaaaagagcaaaaaaggcaaaaaatatttcacatttactttatggacaaagataagattgtccttcaataaaagactgaattttttttgtttgttttgttttgttttttgagaaagagtcttgctccattgcccaggctggaatgcagtggtgtggtctcggctcactgcaacctccgcctcccgggtacaagcaattctccagcctcagccccccgagtagctgggactacaggcacgcgccactgcatctggctaagttttgtatttttagtagagatggggtttcaccatgttgaccaggctcgtcttgaactcctgacctcaggttatccacctgcctgggcctcccaaagtgctgggattacaagtgtgagccaccgtgcccggccacaagttgctctttaaatgtgagaagtgttctggcatggtggctcacacctgaggcgggtggatcacttgaggtcaggagttcgagatcaggctggccaacatggtgaaaccccgtctctagttatttatttatttatttatttatttatttatttatttatttttttgagacggagtttcactcttgtttcccaggcgggagtgcaatggcgcaatctcggctcactgcaacctccgccttccgggttcaagcgattctcttgcctcagcctcctgagtagctgggattacaggcatgcaccaccacacccggctaattttgtatttttagtagagacggggtttttccatgttggtcaggctggtctcgaattcctgacctcaggtgatctgccctcctcagcctcccgaagtgttgggattacaggcgtgagccaccacgcccggccctgtctctactaaaaatgcaaaatttagccgggcatggtggcgcacacctgtaatctcagctactcaggagactgaagcagcagattcgcttgaacccaggaggtgaaggttgcagtgagctgagaccacaccactgcagggcagcctaggcgacaagagcgaaacgcttacaaaaaaaaaaaaaaaaaaagattcacaggtgatggtgatgctgctggttaaggaagtgaagtggctttttgctctgtagccttcctgaatgttggggcctcctgctcttcatttgtttcatttctattaagtctcctccctccagctatcttgttagctcctggaaagcatttcagtgattgtggcttctatttctttttgaccccacagtgtccagggtcatgctgcctatatagtagtgagcagtaagttgaggtttttaaaaactttattattattatttttgagatggagtcttgttctgtcacccaggctggagtgcagtggcacaatctcagttcactgcaacctctgcctcccaagttcaagtgattctcctgcctcagcctcccgagtagctgggactacaggcgcctgccaccacatccggctaatttttttgtatttttagtacagatggggtttcactatgttggtcaggctgatctcgaactcctgacctcaggtgatccgcctgctttggcctcccaaagtgttagggttacaggtgtgagccaccacacctggccggtttttttaaactttaaaacagattcacttgatttttcttccctaccccccagcttttttgaggtatgactgacaaaaattgtatatatttagggtgtacaatgtgatgatttgatatgtgaatgcactgtgaaatgattaccacagtcaaggtaattcacatatccaccacctcccagttaccctcttagctagtacaggttgggtattgcttctctgaaatgctttgggaccagaagtgttttggacttcagattttggaatatttgaatatatataatcagatatcttgggaaggggacccaagtctaaacatgaaattcatttgttttcagagcctaaagatgatttttttttttttttttttttgagatggagtctcactctcgcccaggctggagtgccgtggcacaatctcagctcactgcaacctctgcctcccaggttcaagcgattctcctacctcagcctcccaagtagctggaattacaggctcgcactaccacacccggctaatttttgtatttttataaagacatttcaccatgttggccaggctggtctcaaactcctgacctcaggtgatccgcccgcctcagcctcccaaagtgctgggattataggtgtcagtgactgcgtctggctgataattgaatttttctcttggagaagctgaataaactgtgtgttgtgtgcctgcctttttttttgtttttttttttttttgagacagagtcagacactctgtcacccaggctggagtgcgatggggtggtcatagctcactgcagcctcaaactcctgagctcaagcgatcctcccacatcagcctcctaagtagcatagcaccacgcctggctaatttttaaattttttgtagtgatggggttttgttgtctaggctagtctcaaactcctgggctcaagcagtccttctgccttggcctcccaaggtggtaggattataggtttgagccaccatgcctggccattacctgtgttttgactataacacatcatgttggcactcaaaacgttttggattttggagcattttgaattttggatttttggattagcaatgttccacctatagtacattttttgtttgctttcccataaagaattttttgtaattttgattttatagttctaaatgtaatatattcttattgtaaaaatcacctttaatagcaccgccagaatagcaaacatgttaacagaaaggtagaagtagaccttaaagaatcttcagcagcttgagagaccacagctaaccactgaggaactctgttctggattggagcagtgcttagaagcttataaataactcttagggtattgcatagggattctttttttttttttttcctgaaatggagtctcgctctgtcgcccaggctggagtgcagggtgtgatctcagatcactgcaacctccgcctcctgggttcaagcaattctttgcctcagcctcccgagtagctgggattacaggcgcctgccaccatgcccagctaatttttttggatttttagtagagagggggtttcaccatgttagccaggatggtctccatctcctgaccttgtgatccacccacctcggcctcccaaagtgctgggattacaggcatgagccactgtgcctggccgcataaggattctttatgtgatttttcagtagaggctcttgccttttactttaaacattctttgagggttgttttttttttccgctttttatttatatagaggtcaaccagaatcaagatgtctgggactgaggaagcaattcttggaggacgtgacagccatcctgctgctggcggcggctcagtgttatgctttggacaggtaactgtggttccttcatgccgggaaagaatgaggtgaagtgagtaaagttagggcaaggcagtttgtagagcatcgtagtacatgtgtgagcagtacctagtacgtttacctagtacgtgtgtgagcagtacctagtacgtttacctagtacgtgtgtgagcagtacctagtacgttgacgcggtgcgtgcgggggcagtacctagtacgtttacatagtacatgtgtgagctatttgttattggtttttcctttagatgcattttttgggagtcttgtgaactctggagggcattttggaatgttagctatcaaaagactgatagtactggggattagatttagattttaaattttttgtggggggggatagataacatatttgtatgacatcaaattcaaaatgaaactgtgaaaatctccctatttcctattgcccctgtgtgcatgccacccagttctatttcttttttttttcgagactgagtcttgctttgtcacccaggctgcagtgcagtggtgcgatctcagctcactgcaacttccaccctctggattcaagcaattctcctgcctcagcctcccaagtagctgggataacaggcatgcaccaccatggccagctaatttttatatttttagtagagatggggtttaaccatgttggccaggctggtctcgaactcctgacctcaggtgatccgcctgcctcggcctcccaaagtgtttggattacaggcgtgagccaccacgcccgggcttaatttttttgtatttttagtagagatgtggtttcaccatgttggccagggtagtcttgaactcctgacctcgtgatctgcctgcctcggcctcctaaatgctggaattacaggcatgagccaccgcgcctggctccagttgtctttcttggaggcatggaaagttactgggggtcctattccttgtagggacattgtgtgcacagaaaagagtttcttgctttgtccacccaaactccatctttgtctttagcagagagttgtgagtattcatctcatctgagcagggcaagggggacaaaacccaaatcagcaagcagtagtgtgtttctgtttgtgcaggatgggaaattgttgtattggagaaggcgtcaatctctggaaaggacaaatggaagcaaggcttcctacccccgtgctctttccgtacttgcttcctgtgctgacgtcatttacagatctggaggcagaacattttagcttcctaagcttcagaaacatttataaggatggtagcagcagctaaggcagcagttctcaaaatgcagttctcaaaaaccctggggtttctgaagatctttcagagtccagaaggtcaaaattatcttcataataatactatttgcctctttcacactcattgtctcatgagtgaatggtagagttttcagagagtgcatgatatgtggtgatgtcactgctatgatgcctaatggcatgcatgccttaaaagtttctcagttttgattcctaataggatacatagaacccacataaacaaaggttctggggggtctttttaagagtataaagtctccataaaggatggagactcaatgatgtgaggaatggtggaagtgtgaatttaattttcttttttggggttgcagtgccagtacacagcagaagagtaccaggccatccagaaggccctgaggcagaggctgggcccagaatacataagtagccgcatggctggcggaggccagaaggtaggagaattcatgtgcctggaaagcaggcatccataccgcagactccgatggtcttgccagttccctctctgggtcctcagggattcggaagtctgctgttaactgttcctggaggtctcccagtgcccctgggaggggatgggttccagacttcattctcatccgaaggggcctgggcatggtcttgacactcgcataaccgccgtcttaagatttttacatcatctttttttttttttatttttaaagacagggtcttgctctgtcacctaggctggagtccgaccagtggtgtcatctcagctcactgcagcctccacctcccaggctcaagcgatcctcctgcctcagcttcctgactagctgggactacaggcacacgccaccacacctggttaattttttaatgttctgtagagacgacatctcgccatgttgcccaggctgatctcgaactgctgggctcaagtgatcctcccacctcggcctcccaaagtgctgggattacaggtgtgggccaccatgcccagcctttacaccattaaaaaaaaaatgttccttttgccatttgctttttttttttaattaaacactttttaaagaacttatgattgacacataataattgcatatcatttgcttctaattttaacttctgtgtatatttttggtcttccataaaatatgtcaaacagatttgtactttttgcaaactgaattttagcaactgctgggtgagttcctcctcccaacagaccattcgttctcgcgggctccatctagaagatttttgaaataaattcattgagaattttcttgaaaaaaaaattttttttaacagactggttctcactctgtcacttaggctggagtgcagtggcacgatcctagcttactgcagccttgagctcctgggctcaagtgatcctcccacctcagcctcccgagaagaatgtttaaggacagtttatcgaaaaaagtagatgaggaataaattatgtcaattttgattcacatttaagtgtggtaaggaattaacacagcttttccttaaaaacatttgtttttctaggtgtgctacattgagggtcatcgggtaattaatctggccaatgagatgtttggttacaatggctgggcacactccatcacgcagcagaatgtgggtgagtatgctctccagcagtggggacttctgcactgtccagctcctgctgaaagtctgctgtgggtgaggaggtaaggtaggtggactcagctgccagcaggaggaatggttgtggcccagcggtcagtgtcctcttcaacttgctctctttcccactcctagattttgttgacctcaacaatggcaagttctacgtgggagtctgtgcatttgtgagggtccagctgaaggtgaggggatggagtagacctgctgcccggaaggatcagtgggtggtaggagaaggtgagcaggtagggaagtaggtagctggacggggacccaggctccagagttgtgtctcagccagcgttccctagagtggtggaattcaaatactcttgctcatgtgctccctaaaagaatggaaaaactgttctcttgcacatgttcaagctgacacctaaaagttttcaccatatataaaaattgttgcaaaggatgtattttttggcatatggtaaaatctgacattttaaaatacaataattttaccatcactgataagtgtttggaaactcaactttaggcaaagcaggtccttttgttataacattgatgaaaacaaaaatatgttttgttaataagttgtttcacttcaagtcacagttatttaaggtgttaagtgagcacttaccgtaaatctgttgaatcttgttaaatattccagtggactctaaatactatagaggataagatctatcatttatttgaagaaatacaatgaacaagcttttttttaatcattagaaattttacattgttctttctttatctgaactcatatttctattctatttccccactggttttaatcctaatacatatttatggttgaaagtttggctaggcggggtggctcattcgtgtaaccccagcactttgggaggcccaggtggaaggactgcttgagcccagggatttgagaccagcctgggcaacatagcgaaagcccgtctctactaaaaatacaaaaaattagctgggcatggtggtgtatgcttgtagtcctagctactcaagaggctgaggtgggaggatcacctgagcccaggaagtcgaggctgtggtgagctgtgattgcgccactgaactcctgggtggaaaaaaagaaaagttttatcggtagccttactgtgcttctctgcctttgcctgtgtataaaaataaaaatttttggtaaattttcagtgcacttaaggctctaaatattaaaatatttcttttggatttagttatattatagctactgttaacacacaattgaccagacaattgtgtttatggtgaagagaaaacataaatacagcaaaattttgatacttagaaaaattaaagatatgaaatcttgccacaaaaataaaaaatttaaaatataaaatttatggaaaatgtatatcttaatgagatggatggtgctgttttttcttttcagttagtttatatatccatatatccataactgaatattacttacttcttttttttttttgagatggagttttgctcttgttgcccaggctggagggcaatggttcaatctcagctcaccgcaacctccacctcctgggttcaagcgattctcctgcctcagcctcccaagtagctgggattacaggcatgcgccaccccgcccgcctaattttttgtgtgtgttttcagtagagacgcggtttctccatgttggtcaggctggtctggaactcacaacctcaggtgatccacccgccttggcctccaaaagtgctgggattacaggcgtgagccaccgcacccggcctacttatttcttgaatgaacaattcagcattaattctattctgacttatttttctaaatagtactaaaaaatcttgtatctatgagtgagtagctgagaatggaaagaattgtgttatagtgtcactcatttatttgagtgctttctgagttattttttaaaaatcacagagcgctgtcatcaaacattgtatttaattctcaatcagcgaatgatgtgctcaggtccaccttctcttttggtgagaggcaggagctggacgccacctgatttacaaagggtttgctctcccgtccttacagaccattagatccagtgttcaaatcatccctttgtttcatatcccagaggtttttttttttccaagacgtagtctcactctatcacccaggctggagtgcagtggtgcaatctcggctcactgcaacctctgcctcccaggttcaagtgattctcctgcctcagtctcctgagtagctgggattacaggtgcccaccaccacacccggctaatttttgtatttttagtagagatagggtttcaccatgttgaccaggctggtcttgaactcctgacctcaagtgatccacctcccttgacctcccaaagggctgggattacagcgtgagccaccacgcccggcccggccatcccagaggttttttttaccttagggtgatgcacactgataggatttggggtgagtttctaatgtgccctttgtgtgttgggaagttgggaagggaggatcgtcttgacaccttgaccgcaggcacatgtccaggcagcccaggtctaggaagcagcactcgcgatggattctcacccagccttctgcccgtgcccctgtagcaaggccgccaggtgggagagtccggctttgaaccctgctgcttgaggaacaggggagttgtggcacgcctgccgctctcgtgtttgagttcaaactccttttctgcccccaggatggttcatatcatgaagatgttggttatggtgttagtgagggcctcaagtccaaggctttatctttggagaaggcaaggaaggaggcggtgacagacgggctgaagcgagccctcaggtgagcgcggggctgggagtctaacctgcgtcatttcagctcttgcttcagagcagatttcgattttttttggaagaggtaacacatccacatggttcaaaaatccaagcagcgtggaaggtaattctcacccctgccctggttcctgtctgccgttttcccactttcgttagtattttttcaatgtttctgtttcaggcttcccttgctgggagtaagtggtagaatcctgtactctctcttctccgtgcactcagtcatgtgtgccggaggccttcccactcctactgcgagtgcacagacagcaccctcctctccgtgctcctcagcagtcctccgctacgcacaggtagcatagttaacgtagttacacagtcacgcagatgtccgtgttagtccatttatgttgctatacaggaataccagaggctgggtaatttataaataaaggaggtttgattggcttatgattctgtggactgtactggaagcctggtgccagcatccacttctgctgaggcctcaggaagcttctaatcatggcagaaggtgaagagggaacgtggagagagagggagcaagagagagaaggaaggagtcccaggcttatttatttattttattgttgtttttcattttttgagacagggtcttgctctgttgcacaggctggggtgcagtggtgccgtcatcgctcagtgcagccttgaactcctgggctgaagtgatcttcccgcctcagcctcccgagtagctgggatcacaggcacataacaccacccccagttaattaaaaaaaaatttttttttttttggagagacagggtctccctttgttgcctaggctggtctcaaactcctgggctcaagtcatcctcctgccttgtgcctcccaaagtgccgggatcacaggcatgagccatcatgcccagcccccacactcaaaaccaccagatctctcatgagctgagtgagaactcactcaacaccaaggggatggcactaagctgtttatgaggaatccagccccaggatccagtacctcccaccaggccgcaccccccggcattggaggtcacgtttcaacatgaaatttggaggggataaacatccaaaccatatccgtgtctttgagaattgaagtgaattgaaccagaaaaacctatgagttctgtgggggagtccgtagatcccaagttaagaactctggtcatgggaggttgtgcccttgagcccccggtccccaagtgtgtgttgcctactcctgctgggaaattggagcagcctttggggggaaaaaaaagaaaaactctctgcagtttgttctccatgtcaggaggtggctggtgggttttgtgaatggcgccgtaatcttttcatactcatcttctctgtgagggcagggacttgtgtcttgtcctcactgcagtattctcagaaactaacacagtgcaggaacatgctagatgcttaccagacatcaatggggaatgcatgttagggtccacttcctctgctgctcctgagaagcaacctgtacaaaagttgtaattctattctctgatattcatgtgtaacaattcttaaccctgtttcacctttttttctcttgcccttaggagttttgggaatgcacttggaaactgtattctggacaaagactacctgagatcactaaataagcttccacgccaggtatatcagacatggatgagtggagtgaagataatgcggcaaactcttgtgtgtcatgggttgagtatttggaggatgcaaggagaaaaagtgaggactcagctctttagagggtcgggaatgttgatttcagatttcgaatgttagagacagcaggaactaatcccaacattttccttttttctaaagtacatcatgtgggccggggaccgtggctcacgcctggaatcccagcactttgggaggtggaggcaggtggatcacaaggtcaggagatcgagaccatcctggctaacacggtgaaaccctgtctctactaaaaatacaaaaaattagccgggcgaggtggtgggcgcctgtagtcccagctactcgggaggctgaggcaggagaatggcgtgaacccgggaggcagagcttgcagtgagccgagatggcaccactgcactccaacctgggcgacagagccagactccgtctccaaaaaaaaaaaaaaaaaaaatcacaccatttgacaagaatgtgaggtctagagaatttgtgtacgtgtaggtagtgaactgtggttgggggtagtctgtgaagcctcaaagcaagcacacagccctctgcagcaccactgtccttcccagacactcccagcctcgctgttgagccttctttcttttccttagttctggtgtcattacatgtctgatgtcattacaatgtcatttacatgtccattatttctgtcaatacctataacgtgatctgagcctttgcctttggagaatggggtctgtggtggggcagccctggagtcacactgccttgccatgagtggcttctggagtgttcctcctgcctcatctgctctccgaggtccctgccatgtcgctccccagggcagcattcccatcctgtgcctgagggattcttgtcctcatggagccccacaaggtgtgtgtcactgggcatctgtaaaaactcctttaaaaaaatcatttttaaacattattggattcagtttgctaatattttgttagacttttttttttgagacggagtctcgctctgtcgcccaggctgaagtgcagtggtgtgatcttggctcactgcaacctctgcctcctgggttccagcgatgctcctgcctcagcctcctgagtagctgggattacaggtgtgtaccaccacgcctggctaatttttgtatttttttagtagagacggggtttcaccatcttggtcaggctggtctcgaattcctgacctcatgattcgcctgcctcggcctcccaaagtgctgagattacaggcgtgagcccccgcgcccggcctttgttaggcatttttgcatctatgtttatgagagatattagtcaagttttctttttctttttttttttttgagatagtctcactctgtcgcccaggctggagtgcagtagtgtgatctcagctcactgcaacctctgcctcccgggttcatgccattctcctgcctcagcctcccaagtcgctgggactacaggtgccagccaccaccatgcccagctaatttttttatttttagtagatggggtttcgtcctgttggccaggctggtcttgaactcctgacctcaagtaatccgcctgcctcggcctccgaaagttttgggatgacaggcgtgagccaccgcacccggccttttctttttttaaattgtagtaaaacacatcacattttaactatttttagtgtgtggtcgagtagtgttaagtgtattcccattgttgtgaaattgatctgcagaactaagaccctgcacccgtaaaacaagaactccgcatttccccctttcccagacccttgtaactacttccactttctttcctttttttttttttttaatttattttatgaaagatgaggtcttgctctgtcagccaggctggaatgcaggagtgccatcataattcactgcatccttgcactcctgggcccaagggatcctcctggatcctcctgcctcagcctctcaggtggctgggactacaggtatgtgccagtgcacctagctaatttattttttaaacaattattactattttttttgtagagacagaatttctcagggctggtcatgaactgctgggctcatgtgatcctcctgcctcggcctcccaaagcgctgggattgcagcgtgggccactgtacctggagccagctaattaactttttttgggggcttttttttttaagaggtgagttcttgctatgttgctgaggctggtcttgatctttttttcttttttaaaaaattaggttaggcgctgtggctcctgcctataatcctagcactttgggaggccgaggtggttagatcacttgagcctaggagtttgagaccaccctggccaacatggtgaaaccctgtctctactaaaaaatacaaaaatcagctgggcatggtggtcagcctgcctgtaatcccggtggtcagcctgcctgtaatcccagctcttctggaggctgaggcatgagaatcgcttgaacctgggaggtggaggctgcagtgagccaagattgcactactgcactccagcctgggagacagagtgagattctgtctcaaaataataataataaaatataaaaataaaatacttttttgtgtgtggtcatggagttttgctattgcccaggctagtctcaaactcctggctacaagcgatcctcccactcagcctccttaagtgctgagattataggtatatgtgtctactttctgtttctgtgaatttgtctactctggatacctcatataaatggaatcacataatttttgctttttgtgactggcttatttcacttagctagcattaatgcctttaagattcatccatgtagtagtgtgtatcagaattcccttctttttgtggctgaatattctgttgtatatatagaccacattttgtttatgcattcatttggtgatggggatttgggttgctttcaacctcttggctattgtgaataatgctgctatgaacgagggtgtgtaactctctttgagatcttgctttcaattcttttagacatattctgaaggggattgctgggtcatggtaatcctatttttaatttttcgaggagctgccacactgattttcatacagttgccccattttaccattccaccaacagggcacatgagttcagatttttctaaatcctaaccagcacttgttattttctgagtttttggttttttttttttttttttttttaagccaacctaatgggcgtgatattttattggggttatgatttgcatacccctgatgattagtgatgttgaccatattttcttttttgagacagaatctcactctgttacccaggctggagtgcagtggcacaatcttggttcactgcaacctctgcctctgggttcaaacaattctcctgtctcagcctcccaagtagctgggactataggcgcctgccaccatgccgggctaatttttgtatttttagtagagatggggtttcaccatgttggtcaggctggtctcgaactcctgacctcaggtgatccgcccgccttggcctcccaaagtgatgggattacaggtgtgagcccccgcacccagccaaccatattttcatatgcttgttggccatctgtttatcgtctttggagagatgtctattcaagtcctttgtcattttattttgttttattattttaatttaatttcttttattcatctcatctcatctcatctcatgacaagatctcgccctgtcacccaggctggaatgcagtggtctgatcatggcttggctccctggagcctcgacatcctgggcttgagtgatcctcccacgcaggctggagggcagtcgtgtgatctcggctcactgcagcctctatatcccagactcaaatgatcctcctgccttagcctcccaagtagctgggactacaggcatttgccaccatgccaggctaatttttttattttttgtacagaatacaaaaaattttaccgtgttgcccaggctggtctcaaactcctggcctcaagtgatccacctgccttggcctcccaaaatgctgggataacaggcgtgagaaacccatatggcccaactcctacttttattgagctttttcgtattgtttttgtattctctctttcacttatgtttgctgtcatctttttagaatttcctttcttctagctttgggtgtaactttttttttctagttctttgaggtatagcgtagatttgagatcttttttttttaactatgtgtgtaacttccctcttacgacttctttccctgcaccccagaagtttggtaggttgtgttgtagtatcatttgtctctgggaattcttctaagttggcttgttacatttcctttgactttaagagtgtggtgtttaatttctactgatttgtggattttccagttttctttttgctgttgatttctagtttcattccattgtgattgaaaagatactttatatgatttcaatcttgaatttgttaggacttgttttgtggcctaacatgtagtctgtcttggagaatgttccatgtgtacttgagaagaatgtattttctgctattggtgggtggaatgttatgtatatgactgttaggtccagttggcctatagtattgttcaaatactctatcgccttattcatcttttgtttggttgttttatctattattgaaagttgagtagtgaagtctcctactattattgtgttgcttttatttcaccttacaatcctctcaaagtttgcttcatatatttaggacctctggtgtttggtgcataaatatttataattgttatatcttcttggtgaattgacattcttttttttttttttgagacggagtctcactctgtcgcccaggctggagtgcagtggcggtgcgatctcagctcactgcaggctctgcctcctgggttcacaccattctcctgcctcagcctcctgagtagctgggactacaggcgcccgccacctacgcccggctaattttttgtatttttagtagagacggggtttcaccatgttagccaggatggtctcgatatcctgacctcgtgatctgcccacctcggcctcccaaaatgctgggattataggtgtgagccactgcacctggctgacattcttatcattatataatactctcgtctcctataacaattttttttttttttttgagacggagtcttgctctgccgcccaggctagagtgcagtggtgcgatcttggctcactgcatcctttgcctcctgggttcaagcagttctcctgcctcagcctcctgagtagctggaactacaggtgcgtgctaccatgcccggctaattttttttttttttgagacagagtttttgctcttgttgcccaggctggggtgcaattgtgtgatctcggctcactgccatctctgcctcccaggttcaggcaattcttctacctcagcctcccaactagctaggactacaggtgtgtgccaccacacccagctaattttttgtattttgtagagagggggtttcaccatgttggtcaggctgatcttggactcttaacctcagatgatccgcccacctcggcctcccaaggtgttgggattacaggcgtgagccaccacgctgagcccagatttttttttttttttttagacagagtcttgctctgtcgcccaggctggagtgcagtggcgctatcttggctcactgcaacctccgcctcccgggttcaagcgattctcgtgcctcagcctcctgagtagctgggactacaggcgcccaccaccacacccaactaatgtttcgtattttttagtagagcggggttttgctgtgttggccaggctggtctcaaactcctgggctcaagtgatcaatccacctgccttggcctcccaaagttctgggattacaggtgtgagccactgagcctggccccaaatttctctttttttgttgttgagacggaatttcactcttgtcaccgaggctggagtgcaatgttgtgatcactgcaacctctgcctcgtgggttcaagcgattctccagcctcagcctcccaagtaactgggattacaggcgcccgccaccatgcccggctaatttttatacttttagtagaaatggggtttcgccatgttggccagggtgatctcaaactcctgacctcaagtgatccacctgcctcagcctcccaaagtgttgggattacaggcatgagccaccatttcctaagtgagcacagctgttcacctcccagatagagaatcagacctttaccagcagcccagaagccccattttgccctcttccagtcactgccttgctttccttttttcaaaagtaactactatcctgtcttctattctgacttccatggattattttttcctgtttttgaactttatatatgtaaagttcacaaatggaattgtactgtaagtggaattgtacagttcatattttaagaaaattgaccgaagtatgaaaaagaacatatagacaggttagacgagtgcacgtatcatccatgctcagcttgatgaattttccaaccaaacacatccacacagccaacatctgaatcaagacactgccagtaccgagaaggcccagctgtgttccttgcagtcactgccatcccctgccctccttcccactctgagcaaaccgcttttaacaacacagattggccgggtgtggtggctcactcctgtaatcccaccacttgagaggccaaggaagaaggattgcttgagcccaagagttggagaccagccaggacaacatagtgggaccctgtctgtacgaaataaaaataaaaataaaaataaaaattagctgggcctggtggtggcgcctgtagtcccagctgcttgggaggctgggctgggagaatcatttgagcctaggaggcccaggctgcagtgagctgtgattacgccactgcactccagcctgggccacagagcgagaccctctctcaaaaaacaaaacaaaaaacaaagaaagccaccaatttgtttttattgttatgtacttttttggaatcctacagtttgaactctttgtatcttacttgaattcagcatggttgtgagattcattcatggtacgagcagcagtttcattgctgtataattttcttttgcatgagtatgtggcaatttatttttctagtcttttcttagtagacattttggtttttgtagcttgtggctgtttcgattagagatgctgttagcattcttttgctgtacagttgcactcatttttgttgggaattattgggggagaagataggtacgtgtttagttttagtaggttcttcccgttttcctgtatggttgtattaattcacaccccacgtggcattgcgtaagttccaattgttctgtatctttgacagcacttggtatcgccagtctttcatatttttcaaagctcgtttcttttttttgagacacagtcttgctctgtcgcccaggctggagtgcggtggtgcgatctccgcccactgcaacctctgtctcccaggtttaagtgattctccctgcctcagcctcccgagtagctgggattgttggtgtgtgccaccatgcccagctaatttttttttttttttttttgtatttttagtagagacaggctgttactcaggagttccttcgattttttttttttgtatttttgtatttttgccattttggccaggctggtcttgaacccctggactcaagtgatctgcttcggcttgccaaagtgctgggattacaggcatgagtcaacgtgcctggccaaagctcatttctttttaaactactcatttatctttcaatgtagacatgaaatctgcactataattttcattttcaggtcaaaatgtaatcatcttaatccctcatattcaaacaattattccatcagcatcagttttatgaattgagagatgttttcccaagtaaaaatgttctggatttctgtaggaatccgtgtggaaatgaaaccatttgccctgtgccacgcagcacaggactgtcccttctcatgttgatgagatgcagagcagccccgttctggaagattccttgcagccttggctggcagccggcgtccgtgcctcccaagggttcttccctctgtcgtttgaagggttcttcgtgatgccacagcgtgcccgaggctccctcagtgacgagcgcgatttgcaggggtggccctggcagaaagggttgggaaggtacagacctccacagagactgtgtgtgctcatttccgtggaaaaaggacaaggaggcagcaaagacagacccagcagcccaggaaagattcaaatgcgattttacagaacatctgccctaagtcaaaaccaaagaaggattcctttttatcaaaacttcactaacacagaacatgaaattgtttggctcctcctgctcatggagttacaggacctagaaggcgtgatggatggaggatgtcaaatgcgattttccaggaatcgcaatctgtgagtcagggagaagcagcggagggcaagagccagttgaaggaatttgtttttcttctttccttctagttgcctcttgaagtggatttaactaaagcgaagagacaagatcttgaaccgtctgtggaggaggcaagatacaacagctgccgaccgaacatggccctgggacacccacagctgcagcaggtgacctccccttccagacccagccatgctgtgataccggcggaccaggactgcagctcccggtatgcggcctaagtcccctcctttcctctgcggcccctcctgtgtcacggggctgcctccactcaggcctccagagccagccagccgtgcgtgtcctcccagcagccgcggctgttgctcaggagcccgtcctcgccgccgccctctcatgcagaagcctgagctcatccgccgtggagagcgaggccacgcaccagcggaagctccggcagaagcagctgcagcagcagttccgggagcggatggagaagcagcaggttcgagtctccacgccgtcagctgagaagagtgagggtgagcgaggggtgggagcagggccctgggaggcgtctgcaggaggaagtgtagccgcagggtcttctgattctctgcggtaaccctgggccggctccaaaccaggcctcgctgggacttctctcaagctacacgcaggagagatgagcccaggaaattcagatatttaaatctgctgtacattttcccgtttctaaagacaatgatttcttttttcccccgtggaactaagtgggccttgataaaatcttctagaattagaaatttcagggtaaagaacttttttttgcttcgaatgctttggccatctctacattagaaagccttggccgggcacggtggctcatgtccgtaatcccagcactttgggaggccaaggtgggcggatcacgtgaggtcaggagtttgagaccagcctggccatcatggcgaaaccccgtctctattaaaaatacataaaaattagccaggtgtggtggtgcatgcctgtggtcccccctactcgggaggctgaggcagaattgcttgaatccagaaggcagaggttgcagtgaaccaagatcgtgccactgcactccagcctgggcaacagagtgagaccctgtctcaaaacaaaaacaaaacaaaaaaaaaacaagccttgtgtttctgagatatcttcgaatacaaggcaaaattgggattgagaataacgggaacttttggcagattatttatcaactttagtttatttcagagtccagattgagtgggaatagtgatacagatgccttctttctttcttctctgtctccccacctgttctctcctgcccatccagcggtaggtagtccttactcagagagtggaaacagagaaagggcttgtctcagacccatcgagcttttgcccagtttttccctacaaattgtgaagcagattcacagaggacttgcttcatggttggttcattcatatgcccctcagcaccgacaggctgaaattaacataaaaaccaaaacagaaccacttcctgtcctgtggatatccttactgttgagttattgcaggtgtttagcttcttaaccattgcagaagctcccgggtagattgtggaggaagctgccctccaggcctttcctgccccttggcagacaacccgagccattgttattttaatccatttcacacatcagattttggctgaagattttgtttgttggtttgttttcagacagggtcttgctctgtcacccagcctggagtgcagtggcgggatcagggttcactgcagctttgaccttcctgagctcaagtgatcctccttcctcagcctcctgagtggctgggactacaagtgcatgctaccacacccgctgatattttattttttgtagaggtggcgtctcgaattcctggtttcaagcgatcctcccaccttggcctcccaaagtgctggggttacaggtgtgagccactgtgcctggtcagattttagtttaagattttgtttgagcaagggttatggctgttaacaagcgagccagacactggattagatggcctgtgagaaaccttttacttttgctgtgaaaggagaaagaaacttgtttttcccactggtgagaagaattcaaaccacagacagatctgtaggtaggactgggactcgggaagctgaagttctttttactggcagaagcagcgcagccctaagcggtgttgtgcttcggagagtgttccctctaacaagaggggagtggacccacgctctgaaatcccatgcagtgatgtgatgatgacttgtcctttctctcctctgtgaaccgtagcagcgcctccggcccctcctgtgacgcacagcactcctgtaactgtctcagaaccactcctggagaaagacttccttgcaggagtgactcaagaattaatcagtaaataccttgaaatgcttgtaagctactgtgctgtatgtttctagtagccacagaataccttttaggcgacataaaaatcctcattttcgtgtggttttgttgagggggttctggctgatagcatatgtccagttcctctttggtcctaaccaaagggaagtgtacttttagggggaggggagagaaattccaaaaactttcagaaggtactgaagacatggaatttctgagggccagtttttccagtgctttctgtgagaatacttcattatttgctgatgacgcacttttccttgacctctgtagagactcttgaagacaactctgaaaagtgggctgtgactcccgatgcaggggatggtgtggtcaagccctcgtctagagcagacccagcccagacctctgacacattagccttgaacaaccagatggtgacccagaacaggactccacacagcgtttgccaccagaaaccacaagcaaaatctggatcttgggacctccaaacttatagcgctgaccaacgcacaacaggtagcagagaggtgtttaggcacaaaaattaaggggagatcctagctttaattctgggaatttttgaggaaggatgacatttcatttaaagtttgatagaatcgggaacttctattagggaatggtactgcaagtagaacagaattgatttaagagccagaacgtttcctttgggctcctgacttcaggtgcagcccttttcagctcctgataatagcaggaagcggaaacgactgcatggagagctgtccctcccagcagcaggtctgtcatgagcacgaggccacttggtctaggagaatcatctgccttcctcctaacagtaattctcattcttgggcttagtctaaattaggatcattaatataatccagaaatcattagctgtcagtttattttaaaattatggcagctacatttaagccattttgtcttccataggaaactgggaatctcataggaagagccaggacatgaagaaaaggaaatatgatccatcttaactgaggctcaggccacataattggactctgtcacaaagggactttggaaaactactttttggtcatgaaattgttcatcgctgctggagaatgaacgtcattgcgatttatcttgcttcattctgaaccttatcaagaggatctgactgagagcccactgcagttagagctgagcacttttgaaaagcttgtccatcactctagtagggagaggctctggacagatgaataccttttcttcggcttgtgaggcttcccactatttattactgaactattatgttaatgaagatggacattttaggaatcaccaatggctccttgccctcaagcaatataggccagacttggtcctaagcacctgcctcagcaattgtctacattcagttgttttgcataacgtctgccttctttcctttacggtccatgcctttaatgttgcccacattaagcactgtggatcacgacaggaaaaaggttggagcagtgcttttcactactttgtatcaatccaggctacaatcttcatttaatataaataatttatggatttatgacattacaatcctgcattgtttcaagactgacattttttcctaaggaaggaaataatcatctaagaccacgaaaaaaggctgttttttgtttttttttttttttttttttttgagacggggtctggctgtgttgccctgactggagttcagtggtgcaaacacagctctctccacaacctcttgggcccaagtgatactcccacctctgccttacaaaatacagggattactggtgtgagccactgtgtctggccagaaaaggcatttttgagaaagcaaatcgtataccttattaacaaaatagaatatatatatattgcttatctgaaatgcttgaaaccagaattgttttgcattttttgaatatttgtatacacataatgagaccttggggatgggacccaagtctgaacgtggaattcacctgtgtttcgtgtatatgcctcatacacataattttgtgcatgaaacagagtttttgtataagaagatacactgcagctgaagagggctgggtttttttttctcttagggtcgctgcataaactgttgtatgcctggtgctttgcgacttgtcacacgaggtcacgtgtggaattttccacttctggcatcacgtcagtgctcagaaattttctgatctcagagcatttcaattagggatgctcaaacgcaactgtttctacttccccatttcaggtgtgagatgtaacccaccttgaccataaattggcttttcatagtgctcagatgtttcataattcttcccccaaaataatgaagtttgcagtttaacaactttttttttgagagggggggtctggctctgtagcgcaggctggagtgcagcggtgccatcttgactcattgcagcctccgcctgccaggattcaagcaattctcctgcctcaggctcccgagtagctgggattacagacacccaccacgacgcccgactaatttttgtatttttagtagaggagacggggtttctccatgttggccaggctggtctcaaactgacctcaagtgatctgcccacctcggcctcccaaagtaaaaagtactagaattataggcatgagccattgcgcccag

SEQ ID NO: 1245 - DNA, 33236 bp, Homo sapiens
gggggcctcggagcaagatggcggcggcggggtccgtgaggcgcgggcggcggcgaccgcggcgccagtgagggggccctggggcccgggcggctccgggccggggccccgccgcgggacggaccatgctacgctccactggcttcttccgggccattgactgcccctattggtctggggcgcccggggggccctgccggcggccctactgccacttccggcaccgcggggcccggggctccggcgcgcccggtgacggcggagaggcgccccccgcagcaggtaatgcccgcccgcctgcttgccttgggctcggctcccctgcccgggtctggaccccaccccggtcccgcccggggtccccgttctcggcccagcctcctccccacacgttcgcgggcgacggttttcccagtcgggaccggaaccacccaccctgggacccggtgcaaagcactagatgtccctaagccttcgtcttcacgagtgtgaaatgtcaactaggaggacgcgtcctgccagggctgtctagagggcggagtgcgagcgcatgttgagtaccgggcaccgggcctgacacaagggggctcgggagacgggcgcggccggcgctaggcaggtcctggactcctcctgcccctgattggcgcccgccgcttcccggaccccatgtgcttgtggccgcccttgtttatttccatgacgtttcctccggccgcgcctctggcagcggccacctcagtctccagtcgttgagttaggatggtccgaggatcgtctcttgtgtttgtcgagccctgtgtccagcatgactggcagggaggaagtcaaagcttactcgagtgggctccgaggaattccatgcttttggtcgggcagaggacgttggtggactccacctcacagcgtcatggtggttttcatcgtcatggcagcgtttcttggaggagatgtgggatttggattggagaaaaagagggacatcgcaaggaaagtcgtggagggagggttatcgagtgtgatgtcattcagactcccctgttacctctgtcccttgatagtggctctctgcttcacccagcccctgacttccttcgtcccagatttcctcattgggcgtgagtttcaagcactgtttttactttaaccatgaaacagtctcagctcagaaccttttcctgcaaaagagaaacatcttctctaggatttaagaataggtttattttcctgttttgccagaaaaggtagcatttttttctgatttccctgataagtgtgcttgggacacctgcacctgtgggcggttgtttgcaggtggacagatgcaagcaatcacttgtcagctccccacagcccagcgtcttcgctgtgtttgaggcgggggattcagagctgcgtacgatgccggctgtgctctcagggacctgccgacagctgtgcctacagatcccgtagcataggtcgtgatgtcctgggagcacgcagccggctttggcgggggctgggagttggtgaagaaggcaacgcgtgggagaggcttctcggaggctgtgacaccagactcacgatgctcattttaaccctatttttagagacagggtctcactctatagtccaggctggagtgcagtggtgcgatcacagctctttgaggcctcgacctcctgggctcaagggatcctcctgcctgaacctcctgagtagctgggactatgggcggcgggtgccaccaagcctggctaactttgtatgttttcgtggagatagggtctcgctatgttgtccaggcttgtctcaaaactcctggcctcgagccgacctcctgcttcggcctcccaaagtgctggggttacaggtgtgagctactgcacccggcgcaagtcaggcttatgatatctgtctgcatcccaaatggctcatttgtttcccaaaggcttatttttgagggtccctttggtgatgtcgtcttcctgtctgccccccgttcctatgggaaaaaggcagctgcctgcctcttaccatggcgtgtctgcatttcccttttgctggtgagaatgaactccttttcccatctctggtggggtggtagggcttcttgttactgtctggtagaagactgcctccccccgcagaaggcaggatccatcttccttgcggtgaggtttctctgaccctctgtttccgcctccgtgacatgttcatcaggctgccctctgaggacagggggggatgcatgtcccatgtccacacctccagatttacacacacccagtttcctatgagatttgaagaggctggcgtgatctagcctttgccatgtcttctcaaggggattttagggtgcacagggcagcggcctccagagaggagatagacaggaacgctggcctcccaggattgagagtggacagaggttcaggtgaaaagccctcagctagccctggagcacctgtggggccatgctctgtgctggacacgcgctgcatggtgaccctgtgagctatttgctgccggtggggaaacggaggcttatcgaggaacgtgttttgcccatactaccacctggccagggcagggctggagcctccagggcctctgggagaaggagagggcatctgatgagggcaccaaggcaggcagggttgggaggcttggcggagctgcgacgggaacaggaaggtggctggtgctcctgggccctgggtcacaggctcagcgggtcattggcgaccttgagcagcactgctgaaggactcaggtttccttctgggctcttatccctggacctgctcagccattttatttaatgaattaatttttgagacagggtctcactttatcacccaggctggagtgcagtggtgcgatcacagcttactgcagcctcgacctcctggactcaagggatccacctggctcagcctcctgactagctgagaccacaggcatgtgacatcacacctcgctaatgtttaaaatttttgccgagacggggtctcactttgttgcccatgctggtcttgagctcctggactcaagcgatcctctctcctcagcctcctgaagtgctgggatgacaggcgtgaagcaccgcgctgggctgcacagccatttcagagccggctggacctgcccagggtggcttggagggatggtccagcagcccttacggcgggcaccgtgtagccctgggacgcagggatgtgcatccccggcctagaggggcacgttctatcccagccttgtgagttgggaatgagcgttactatccccccagtggccgctctctgctgcctgggccttggctgcagcctggtggtaggtgaggggcctcggttgtctatgtggagtgggcagggctagatcccaccttcctcccatctgacctcagaacccaggcctctgcccactgccccgcactccctgtggtgtctcagggagtctgtgtcctactgagaggcaggacactgtcttccaggagagggaacccttccggggaggattgcaggaaagtccagggctctccagaggtgcggtgggccccagctcagggcttcacagctccggcaggaacgtgctcccagatgatgcttctcctgagggaggcagaggctgagggcaccacgttgaggggatgctagtgctgcgccacaggctgactcaggccccagcaggacagtcccaggcctggggaaggggccatcctatactgcaaagtgagcggcagacgtgtgtgcggggcgcacagctcctgccctcggggatcccgcagtcgggttcaggatctggcagcccggtgccagtggttctgggtggggctgttggcggcgtcccagctggggctccaggcgactctccagaactgcatctgtagagggcaggagtcctggggtagaggcgctcagggagcagccccaggtacatggggagccctgaagcccacccactgtgtacccagtatctactgaagcccacccaccgtgtacccaatatctcctgaagcccagccaccatgtacccagtatctcctgagccttctagcagagtcgggtcaggcaggggtcctcctccttctggctcttcagatgtggcccctcacatgggctctggggtccctacctcttgacttggccactaccacagcagtactgggcggactctgcctgtgacccccaaacagcagtgggagtggctcttcccagtttacagatgaggaaactgaggcccagcgccgggaggctgctcacctgtgtacgcgtggctggtaactggcagtgctgggttggatgtgggtgggccggggccctgcctgcctcctctgccgtttttgctgccagcctctgtgggctgggcacagaagggaacttgaaaccttccaaggatgggcctgaagcaggcctggctctccggtgtcggtgacagcctcccatacccctgctaggcaggtgagccctgggatcctactgatctgttagggcttgccagctctcctcggaaactctgaggccccgagtcaggcgagaagggagaaggaggccaagaatggcgcctcgctgcagaggatggcttgccttcatttcctctggcctctcaggagggtcaggagctcccgctggctgcgtcctgtgctgcctcctcctggtggatgggagacagccggctttccgtggggcagtgaaggcaccgtctgaccacctgtgtcaccttcagagacgtgacagtgtgtgctctcctcggtccgacttttcatcctcagtgagccgcgtccaggaaggaatggactctaggggagaacccccgcagccagcagtattgtcttttggttccccaggcctgaccagggcgtatgaggacccgggggtgattttaccagcgggtggcaggtgggcaatcgggccaccggggccgcctgcctgcctggcctggagtggcagctatggagcttgctggagggacggttggtgctagggacactgggggccagattgtcgtctggtgggctgtcctttgcgttgtaggatgttgagcagcgtccctgggcttccctgaccccagtggtgacaaccagcggtggtgctgaggccgtttctttttcagccctcgccggcgagcctgcgagtccagctgcggctctgggccctggggagctgggaccctccgggcggggggttgaagctttgcccagctgtggctctgggccctggggagctgggaccctccgggcggggggttgaagctttgcccagctgcggctctgggcccggggagctgggaccctccgggctgggggttgaagcttcgcccagctgcggctctgggcccggggagctgggaccctccgggcggggggttgaagctttgccctggcctcgaggaggaggagccctcccccacactcctaccacagagtgggtggctctgctgccccgtgactcttgatgttcctgtgtggagggggttagaggaaaggggcctggggtttccagagcagccgccttcttgcagatgctggcaggattgtgctggcagctctcccccaggtggatggcgatgggaaaagcgctgggttcccagggcctgggggcctgtccgtgttgccacgggtctctgggtgctttacttttgaaggtactattttctggcctggggaaatgtttgttttagaaacatcagagaatacggaagagccagaggagaagtgtggcttcctttgccgagtccggcaccaggccgcttgccgggcctcctccagactccacaccagaggtcccgggcttgctgtgcttgagccatggctgggaccctgcctcacagatgaggttggattctgtttttttgggggggcttttcccaaggttctgaggtcctcacctgacttccggagcgcctgggcagctttgaaaacctggctgctgggcccggagctgcctccaggcgtgggccgtgccagtcgaggctggttttggtattcatattttaggattctttgcttaggtcttcagtagagcagtgactgatcccgacagggcggttctgcaccttgggaatgttaggagatgtctggagatgttttggttgccagtttgggggtgcaggcacagagagggcagaggccaggggcactgctcagcacccttcagtgctggggacaaccccacagacagagatctagcttggggcagtagtcctgaggatgaggatgccggtctggcggccccgcctgctgtttttgtgttttctttgctgctgctgctttttttttttttttttgcaacggaatctggctctgtcgtctaggctgttggagtgcagtggctccatcttagcttcctgtaacctccgcctcctggattcaagtgattcttctgcctcagtgtcccaggtagctgggattacaggcacctgctaccacgcctggctaatttttgtatttttagtagagatggggtttcaccatgttggccaggctggtctcgaactcctggcctcaagtgatccacccgcctcagcctcccaaagtgctgggattacaagcgtgagccactgtgctgggcctgtttttgtgttttcgagagggatggctgagctggcgctctgcctgtagggagaggcagagaccctgagaagcaccgtccctgcccccagagcctgagatgggagaggcagagcagctcgctggggctggggtcagcggggacaagcgtgcctgctgggaggggttccggggactcttgcagtgcctgagccgctccccagagcgctccccccagagccctgtgcagctttaccgtctcctccagggactgcagactggaggttcaggtgccagtggccggcctctgtccctctggagaccgtaccccggaatgaaggcgtcttgcttggctttctgtggggcagagctcgctaggaaggccccggcctcctcctgctgggcgttacccccttgagcctgttgcctcctgaacctccctcggcctctgcgagctcttctgcacgatggggtcgtggcatctgagtgtgacgggaagcgtcgtgcgggctgtgctgtagcaggcctcactttgacgagaaaactctgtcctcctccgccctcctccccaccctcagaatcccttctgcaaagcaatccctagagaggagcaggcaggtttccggggagcgctgggtgcgcccggccgtggcttgttccttacgctgtccgcgcagtgggtagattctgttggtatgatctgctgcagaacaaaaagcaaaaacctgaaaagaaaataaacagggtagaagggagactgtcagggcaatcctgggggtccctgagcctcacggggacctctcgagttgccattcctcttcctcctctaacagccaagtcctctgggacccttggaggagccgcatgtgcactggctgtttcggggcgatccctcccttaggctccgagaggtttttgggaacggctgcgaggacggagcgcctcccgtcccatgacaggctgcgtgcctggagcccggggttctgggacctgcccctgcttccggcctcaggaaaggagtggttgggggaggactcgggacgagctgtgggctgagcctggacacacacaccacaggacttcagtgttctctgtaaagccaggagctggtcctggtgccctccaaggccctgtctgggtccatctagactcagtgtctgtggcgccaggctgaggggactcgggaagcagaagcggagggggtgatgtggggtgggcccgggtccaggagacagggcagctgtcacttggagttgcagggagtggaggggtgacgtggggcgggcccgggtgtcactcagagttgcaggggggtggggcgagtgtttccaaacacaggattactgggctgggttttggaggatgaataggagtttgcctgtggctggaagtgggattagggctgtgggctctggggatggagacagctcgaggaaagcctgggatgttctcctgctctgggcttggggctgcttgggagcttgccgccgatggggctcactgttgatatgctgtctcatctgtccccagcctgggagcgctcctgcggttgggcagtctgcgattctcagctttctggagtctcttcctgttcccacagagactcatgtctggagagtcggtgtgctgcaggtgtggaggggcccgtgcctctgggtcagtgtttccttccccttcccactttccttccttcctcagatctctgcagacacctgccctgggccagctccgtcgacgctggggtgctcagaagagcctggcagggggcagggccaggaaggtggcagagagcgtgtgcttgggggtgtgggcctggcgtgcactccaggcgtatccccgccctgtggcttcccagcctgtccatttgtcctggcgacaggtccatccccaccctgttaacggtcacgggtcacagtccatttttctgagacccctccctcctcctctcacagtggctcagaggccctcagagaccaaaagggagccagcactgcctcaggagcaggccctagggagacaggatctggaagccatggaagtgggcctgcgcagtcctgagttggccaccgccccgtgcaccacggccgaggaggtggagtgaggtgagggctccaccatgccttccacctctgtatcccaggcactatgccaggcactgctgcttctgcagggaggacttcggagggctgcctggaggaagtggactttggggaagtggatgagacagagagggagggccctgccctttgtgccctgcaggctgcgtgccctctctgaggtcctgggcaggtattcagagaacatgtgctggaggaatgaatgatggggccggggtcggcccacattgccagccagcaccccgtccccccagcatctgcacacaggtcaccaagtaacaaaaacagcttgtgcttgcagtcaccctggtgtgtgggttcctccttaggcgccacggcacccatcctaggaacagcctgtgaacccctggctgaggggcagcgccccgtggaggtgcccactccagcttctctgtgagcccctggaagaggctgcagggctcctggatgcttttagtcctctgtgcctgacggggagcacaggagtcccagaaacacccactgggaaatgtcctttggggacagaaaaggccctgggatgaggaggagctgagagctggactctttttttttttttttggagatagagtctcgctctgtcgccctggctggagtgcagtggcgtgatcttggctcactgcaacttccgctgctgggttcaagtgatacttttgcctcagcctcccgagtagctgggattacaggagcacgccgccacgcccagctaattttttgtattttagtagagacagagtttcaccgtgttgcccaggctggtctcaaactcctgagctcaaggcagtccgcccgcctcagctttccgaagtgctgggattataggcgtgagccaccgtgcccagctgctgatttttgtatttttagtagacacagggtttcaccatgttgcccaggctggtctcgaactcctgggctcaagagatccaccagccttgtcctcccaagtgctggggttacaggcgtgagctaccgtgcccggctgagagctggactcttaacttactctgtgtggaccatgaaagtggctcacagccaaggtgggctcttggcagggatggagaggcatagggggagaaggtcccgctggctcctccctgccggttcttgtcctttgccatttgtacccttctgtttcagtttttttttttttttgaaaaggagtctcgccctgtcacccaggctggagagcaatgtcacgatctcggctcaccgcaacgtccgcctcccgagttcaaacgattctcctgcctcagcctcccgagtagctgggattacaggcgtgagctactgcgcccaggcatgggattacctgggattacaggcatgtgccaccacagctggctaattttgtatttttttaagtagagacaggatttctgcatgttgctcaggctggtctcgaactcccaacctcaggtgatccgcccgcttcgactttccaaagtgctgggattacaggtgtgagccaccacgcccagctggtttttttttttttttttgagatggagtttcgttcttgttgcccaggctggagtgcggtggcgccatctcagctcactgcagactccaccttccgggttcaagcaattctcctgcctcagcctcctgagtagctggggttataggcacccccacacccggctaattttttgtagttttagtagggacggggtttccccatgttggccaggctggtctcaaactcctcacctcaaatcatccacctgcctcggccttgggctcagcctcccagagcgcggggattagagccgtgagctactgcgcccagcctgtttctacattgttttgaaaggcagtgacctctgtcctggttaccgtccctgtcccctagcctcgagctgtaagccttgggacagcagcgcgtccagtcatggcatgtggggacggccgccccatgaggtgaataaatgcccaggacgccccagagagcagagctggtggtccccggtcaggccgggacctttttctttttctcccctggaccctgccgtgtggctccacctgctgggcggtcctggcactgcacactgcgctgtcgaggtggggagggcggtgccttggagcagaggggaggctcggatcgcagccctgggggtcgaggagaaccctgggggcagtggggtagaccccaggtgccgctgctgcaggcacagcccagcctccacagcaagctctgagacctgggtggagtctggtgtggggggtggggcagagctgggccaccttggatttcagagagggtattggaagctgctgggtggtggaggtccaggcccccggcactggctggacttttcctcgaagccctctccaggtgaccctgtttctgccccgtgtggtctaggagctgtgggacctcctctgggtgcagagtgctggtccctttgcctctgagcagcgggttcctatctgtccagtgggctgtgcatggagggccccgggcgcccgcatgtccaaggatggggctggaggacgtcccactgtgagggttggaggggaggccccaggagcagggacccccagagtggacgtatggccatttgtggggaccttatggttactctgccgtccgcaggaggtggacttcaggggtgctgtcctccagacccctcttcccagagggtctgttatgggatgggcgctcccgtggacacaaccagcccctgccttgcgcttcgcgagggtcagccccgtgccttctctgccgctgtggctgttttgggaatgtcctcttctgtctccaccttcaaagcctcaggccgcccagatggctcccccaggggctaggttgggggtagtcttgcttatctcatgccgcagtgtcaggcttatcttttttgtccagctaagccccaggcgggagggactgtctgtttccatctggggtctctgcctggcctgttctgggccagcatgcggggcccactgcctgggctggaggggccagtcctgctgatgcctggttgcgttgagagccctgcgggcccaccgaacggtgtccggagcaggggctgggcctgccgggttcttttttttttttttttttttttttgagacagtcttgctctgttgcccaggctgcagtgcgatggcgtaatcttggctcaccgcagtctccgcctcccgggttcaagtgattctcctgtctcagcctcccaagtagctgggactataggcgcctgccgccacgcccggctaatttgtgttttcttagtagagacggggttttaccttattgtccaggctggtctcgaactcctgacctcaggtgatccacccgtctcggcctcctacagtgctgggattacaggcatgagccatcgtgtccagccagcctgccgggttctttagagccactgagtctccccgtctgggtgggaggggcctggggctccttgtggggctaggagctgccggctctcgctggcactgggtgtcctcatctttgaaatgggctgactgagagaagacaggagtttggacgggtctcactagagaacgttctggaagttcaggttgggatcttcgtgctccatgatcttgtcatttttgctgcctttcagtctccgtgtggggttggagctcatgccaggttctccccattgctggggacaggacagctgtgtgggtggattgagtgtggtggggcgggggcagtgggagcagagaggagagtggatgcccagggtgaggggtttctgggccaagggaaggtttgggggccaggagatggccttgggcagatagtgctggtcccaggccccacacctagaaccctgggaagaaatatcatctttgtcatccagcccgtcccggggctgcagggcactggtctcaggagatgcggtcaggatgggtggtgtagggagtgggctctctcctaggccgggacaaggctgggctgcgttgccctgggctgagccctggctggagaggctggggaagatagccagccaggcgttgtggcctctcaggaccactggggctgggtggtacctcccagtcctggccttggggtgaagcagggaggaaggggcagctcccaggcctctggaggtaggcttttcctgtcagccaattcaccatgtttcccagaaacagactgacctgggccacatccaggaaggagcccacctgctcctatccaaagtaattcccagccgtgggacggggcctggacgggcccctcctacttccagagtcggcattcatttatgtatgtgtgtgtgtatgtatgtatgtatgtgtgtatgcatgtatagctctgtcgcccaggttggagtgcagtggtgcgttctcggctcactgcaacctccacttcccaggtttaggtgattctcctgcctcagcttcccgactagctgggattacaggcgcctgccaccaggcctggctaatttttttttgtattttttagtagaggtggagtttcaccatgttggccaggctggtttcgaactcctgacctcggtgatcctcccgcctccgcctcccaaagtgctagcattacaagtgtgagccaccacgcctggcccaaactcggcctttagatgtgaccccctgggtgggctcccagggcacctagcagcatgcacatgccaccctggggcctttccagtcctgacaggtacccagatccaaccctctgaggcatggtgggacagggaggtccagggaggcagtggtgtgtaccagcttcaggtgacctttcaggggctcagcacgccgtaccccctgttctgagctgcaggcagccatggccgagccccaggcaacttcctgtgtgaaacttccagacctggctggagcgcccaggccaggatgctgccttccagcaccagtgggtcacaggctgcagggtgggggagcccagtgaccacagggaggagaggccgtggtgcagatcctgatctcagtcttctcggacccgcctagcatgcctgctttctttttggtgcagtctttgtggaggtggtagcagcctccacccgggagtgaaaatgctgaaaccccctctgcagagtgtgccctccggcctccaggtgcccctgctctttcccatctgttggctaaaggctggggcaggtttcacagcccttaaaagacaagcagtgctttgggaggccgaggcgagaagaccgcttgagcttagaagtttgagaccagcctgggcaattacagcgagacccccgtctctaccaaaaaaagaaaagaattagctggatgtggtggtgcacgcaggtggtcccagctacttgcgaggctgaggcgggaggatcgctggagccggggaggcaaagcttcagcgagccatcatggtaccactgcactccagcctgggcaatgcctgtctccacaaaacaacaaaacaagtactcacacaggcttccagttagaaagacaagcccacgtcccccagattggacccttatcacctgtcctgcgctctgcttgggggcctggctccactcctgggaggcaggtgctattccttccaagaccttccaaaagcaccttttggggaaatggtctctcctttcagagtccacaatgtccagaggtctgaatttccttcctttgggaagggctcgcgggtgtctgctggctggtgtgtgtattgcctgtgactcttggctcccctgggctgggttgatcttgcaggctgtgtcttagagccctggggtccaggacaaggaggtggaagcccctgagtggagtcccttatccttagccccttagagatgcctcagtcccctccacccccgcctgccctcctggggcccagtctcactgctgcccacccctgcctggggaggagagccttcccgttaggcgggctcttcctcctctctgcatccccgttagctggagccttgggaggggagaccagtgtctccctgacctggccttgctcctcctcagtaattgtgctctgtcacctccccttcatgaatctctgcagctcacgccacagtggccttggcctggcccctccacgtcactgggcagccgggcttccggggctgggggagggctggcactagttgccctgttcaccaggcgggtggcagggtggcgtgctctgcagccggctgggtcagggaggagccggagcctcccccagtgaagtgggccgggagggcgcccttgagctgctgctggcctccgcagccctccccctgggtgggggctgacacccagccccagccggccgtttccctgccgggagcatcctcctggcctggcagctgtccctccccgcacagaggaactggcagccacagttgctgatcctagttgggtgccctcgctgactcccagggtccttggctgtgagatggtgccagaatgggcccctctgcgcctgctgggcacatggggtgacgtttcctggaaatgccttggctgtagcctggcacaggcaaagaagaacctgtggcttctgtgtgatgttcccctgcctgcccgtacctcgtggccctccacacagtcccgcggagttccgagtggtccaaaacagacacacggatccttcctcttgtctaaatgctacttaattttatttgttttagagacaggatcttgctctgttgcccaggctggaatgcggtggtgtgatcacagctcattgaagccttgacctcttaggctcaagagatcctcccacctcagccttccaagtagctgggaccacaggcatgcaaccatcacacccagctcattttttgtatttttttgtagagacggggtctcgccgtgttgcctaggctggtcttgaactcaagcagtctgctcatcttggccttccaaagtgctgggattacaggcgtgagccactgagcctggcactaagtgtaatttttttttttttttttttttttgagacagagtcttgctctgtcgccaggctggagtgtagtggtgtgatcttggctcactgcaacctctgcctcctgggttcaagcgattctcctgcctcagcctcctcagtagctgggattacaggtgcacgcccccatgcctggctaattttgtatttttagtagagatggggtttcaccatgttggccaggatggtcttgaactcctgagctggtgatctgcccgccttggtctcccaaagtgctgggatgacaggcgtgagccaccgtgcctgggatgacaggcgtgagccaccgtgctgggatgacaggcgtgagccaccgtgcctggtccctaaatgtaattttaaagatgggcacaacactgctgtgatttcaagggaaaggcggcagctgcccgtgaccaggcctcctcccacctcctctgcagcctccgggtcccggcctcccgctgtccctgcagggttcccgggaacaggaggggccttccgccttcgcaggtacaggcagcgggcagctgttttccactgcactttcatcacccggtgaggctgcattcgtccccgtgggccttaaagcagcacactctctctcagcgctgggctgggaagtccaaagtcagcctcgctgggctcaagtcaagctgtgggcaggactgggcctcccgaaggcttccggggagagtcagtgcccgcctttcccagcatctggaggcacctgcatccctcggctcagggcgccttcctccccttcaaacccacagcacagccttttccagtctctctgactctcaccctcctgcctccctctttaaaggaccctgtgaggacactgggttcccggataatgcaagatgttcacccaccctcagggtcctttgttcaagtcgcacctgcagtctattggctgagtgaggtggcctggccacaggtcccagggattaggatggggacttacctggggaggcttttgttctgctggtgggtgtgtctcgggggagcagcttgggaaaccagccatttctttttttctttttctttttctttcttttttttttttttttttttttgagatggagttttgctcttgttgcccaggatagagtgcaatggctcaatcttggctcactgcaacttccgcctcccaggttcaagcgattctcttgcctcagcctcccgagtagctgggattacaggcatgggtcaccacggctgggtaatttttttgtatttttagtagagatggggtttttccttgttggtcaggctggtctcgaactcctgacctcaggtgatccgcccgcctcagcctcccaaagtgctgggattacaggtgtgagccaccacaaccggccgaaaccagccatttctttcttatgcctgctggggcttgagggggtgtgggtgggggccataggggaagcctccagttctgttgctgttctctgcgtcgcccacagtgggaggtcttgtgcctgcctccccttggctgcgtccagccatttctctgcacggaagtcttagcacgctgtgggggtcgatctccaggtgggccgaagggcaggcaggttttctgagtggaagaaacacacctgaggcccgaccttcagacaagctgcacgttcagtcagaatcaagtcagagccaagtggcgtcttggtgcgggcaggttcccatggggctgttgccttttgctacatggtgtcacagctccttatcagcctgtcggggatgtgtgtcagcattcacgtccctcttgggcagttggtgttgggtgcagcataaatgaaggccagattgcatttgctgtaccccatgggactgcgggcttggtgtgggcccgtgcgcctttgttggaatctgatctcactgggtttgtggagctgcttttcaaaggtgagagtgtgcaacattccttgcccctcttcttccccatagcagtgtgacttggaggtccctccagggcgcacgcctcccccttaaccacaggtgacctgcgtttcggcttctaggtcatctcctgcgttatttattgttgtgtttttgcagtgaaggctgcaccagacgcatctgtacctgccctgtgcggtctgtctgtggcacgggttctgaggattccgagtctgaaggtggtggtgttgaagctgcatgggatggttgcgaaactgctctgcaagatctcggcctgtccatggccccctcagtgacgggcaagggagatttcaccccatctagagccccatttgccatctaaggggatataccatctacaggttccaggaattaggacgcagacgtctttggcgccatttcctgccaactccagaggatcagacctgttgacctttagagacctttagagatgttacggaattacattcagtggaactttattttatttttttaagagctggggtcttgttttgttgtccaggccagagtgcagaggcacaatcctggctcgctgcagcctcaagcccctgggctcaagtgattctcccactttagcctcccacatagctaggagcacaggtgtgcatcaccatgctcagcttatttttaagtatttttttaagagatgggatctgtgtcatccaggctggtcttaaactcctgagctcaagcagtatcctcccgcctcagcctcccaaagtgctgagatgatcggcgtgagccactgtgcctggccgtgctcagtagaatttctaatggtcaacttccaagtttctggagtaaatatttgaacttggtttttattgcttcgctggaatactgggctccacttgctcatgttttctttagactccttcggcctgtccccacgggaggcttctgtggttctgacttctgtgctgacgttggtggcattgaggttgtgagggtctgctacactatgttctggaaccacgtaaataacatgcgagtctcatgttcccagctgccccccgggaagacatttcagccgtgtgctttaagccaggcacagcagcttgggctatagtcccagctatcttggaggctgaggtgggaggattgcttgagtctacgagttcaaagccagcctggccaatatggtgagactccacctctacaaatttttttttgttgagacggggtttcactcttgtcgcgcaggctggagtgcaatggtgtgatctcggctcaccgaaacctctgcctcccaggttcaagcgattctcctgcctcagcctcctgagtagctgggattacaggcatgcgccaccacgcccggctaattttgtatttttagtagagacggggtttctccatgtcggtctggctggtcttgaactcccgacctcaggtgatccgcccgccttggcctcccaaaatgttgggattacaggcgtgcgccaccgcgcccagctacaaaaagttttgaaattaaaaaattaatttaaagtaggccaggtgcagtggatcacttgaggtcaggagttcgagactggccaacatggtgaaaccccatctctactaaaaatacaaaaattagctgggtgtgatggcgcacgcctgtaatcccagctacttggggggctgaggcaggaggtttgcttgaactcgggagatagaggctgcggtgagccaagatcgcaccactatactccagcttgggcagcagagagactgtctcaaaaaaaaaaaatcttcctgtggattttgcagggtggcccatcaactgggcatgtccccatcccccggccctgctcagccacatcaccgcaggcacaccgccaccacaccaccgctggcacactgctggcacacctccgccacaccgcgggcacactgctggctgggtggggccgtgttggctgaggaagggctctcctgtgtccaccgtcaggctgtggttgtcggcccagcccagtcctgcctcagcccggcaccctgaatgctgggagctccacacccgcctgccccggggagttccagcctgtcgagtgtccaccccaccatggtcattgtgcgcatttcatgagccgtgtgagggagcctccagtacccagggagctgtgtgtcacgcagcccaggcccatccagcgcccattggtcagggcaaggcggggcccggcacagggcctgagatggcgccatggcctgtacccagctgggcaccccagagccttggcgggcgccagtgcgtggtgggtttcggaggcaggtctcttcccttccctgcagtttgagaccggggccgcccccatgctgcgggctcctctccggcaggctggtcacagctgtgctctctgttcccttcagggctgggttacgacccctacaaccctgagctgcccaagccccccgcgcagagggagaatggcaccctgggcctgggggaggagccgcgcccggatgtgctggagttggagctggtcaaccaggccatcgaggccgtgcgcagtgaggtggagctggagcagcggcgctaccgggagctgctggagacgacccgtgagcaccgctccgccgaggcccccgccctggcgccccgcggccccaacgccagccccactgtgggcccggacgaggatgccttcccactggccttcgactacagccccggcagccacggcctattaagccctgatgccggctaccagcccaccccactggccgcccctgccgagccgggcagcaagtactcgctggcgtccctggacaggggtcagggcagaggtggagggggtggcggtgccctggaatacgtccccaaggctgtgagccagccccggcggcacagccgccccgttcccagtggcaagtacgtggtggacaactccaggccacccacagacctggagtatgaccctctctccaactactcggcccggcacctcagcagggccagctcccgggatgagcgggccgccaagcggccccggggctcccgcggcagtgagccctacacacctgctcccaagaagctctgtgacccctttggcagttgcgatgcaaggttctcagactcagaagatgaggccgccacggtcccaggtaacgagcccaccacggccagcacccccaaagccagggccgaccctgagatcaaggccaccgggcagccaccctccaaagagggcctggaggccgaggggggcggcctgcgggagaccaaggagacggccgtgcagtgcgacgtgggggacctccagccgcccccagccaagcccgcctccccagcccaggtccagtcctcacaggatgggggctgccccaaggagggaaaacccaagaagaaaaaaaccggggccccacctgcccccagctgcaaagacggggcccaggggaaggacaagaccaaggacaagggccgagggcggcctgtggagaagccccgtgcggacaagaagggcccgcaggccagcagcccccggcgcaaggcagagcggccggaagggaccaagaagaagccatcttcggccactcctgtggccacctcagggaaagggaggcctgaccggccagcgcggcggccgagccccacaagcggggactcccgaccggcggccggcagaggcccaccccgccccctccagctgcccgacaggaagagcaccaaggccccgtcggggaagctagtggagcggaaagcccgctcactagacgagggcgcctcccaggacgcccccaagctgaagaagcgggccctgagccacgccgacctctttggggacgagagtgaggacgaggccgcagggccaggggtgccgagcgtgtggccctctgccctccccagcctcagctcggactcagactccgactcagactccagcctgggcttcccggaggcgcaggggccgcccaagcggctcaaggcctccccgcccccctcccccgccccatcctcctcctcctcctcctcctcctccacctccagcgcgggggcggatgtggactactcggccctggagaaggaggtggactttgactccgaccccatggaggagtgcctgcggatcttcaacgagtccaccagcgtcaagacggaggacagaggccggctggcccggcaggtgaggcgcgcgggtgctggggctgggctcgggcagaggcagagccgagggcctggtgagagaccttctatctggagtggtttccagttggctcggaggcacggggtggaggcagctcctcagtgctggtccctgagcccgttgaaatctcaggagctcaggagcacccgggcagccctgttgctcctgttgcccctcacccacccagaggtcactggcccgtggccaccagccaggcttctgtggccacgtgcacacggtctgttcccactgactggcagggggatattggcccacccacccacctcaggggaatccacctccggcacacccttctagcccctctcccctcgcctcccctttcctcccttccccctctcttctcccctcctcccttcccccatctctgtctcttctcttccagctcctctgtctcctctccttgcctcctcctcatcccctccggctcctttctcctcccctccctcctccctactcccagcgtggcgagctcttgctctcctgggccagccctggacccctgggtctcctggccccgtgtccccaaattggccaccagggggagctcactccacacagactgagcccaagtgctcagcccgcagcagctggttcggcccaaggtggcctcgctttcccagtgtgctttcattctgcagccctggggtctccaagctggggccctgggtgcccaggagaggtagccttgggcatctgcagaacgtgtgacacctgcccacccctccgactgcacccacacaaagcccagggactgttggccctgagccctcagctgctgtgcctgggggctggactgttccattccccacttgccgggggcagtttgaggttggggtgtgttggtgttggcagcgagggcagacctgtgctgacggacggacatgtgtcttagccccccaaggaagagaagagtgaggagaaggggctttcgggtctgaccactctgttccccgggcagaagaggaggatctcccacctttccaagcaaggccaggaggtaaggtccgcagaggccaggccagcaggagccttttttttttttttttttaaagacgaggttggcctggtttggtggctcacgcctgtaatcccagcactttgggaggccaaggcgggtggatcacctgaggccaggagttcgagaccagcctggccagcatggcaaaaccccatctgtactaaaaatacaaaaattagctgggcatggtgatgggtgcctgtaataccagctactagagaggctgaggcaggagaatcgcttgaactcaggaggcagaggttacagtgagccaagattgcaccactgcactccagcctgggtgatagagcaagactctgtctcaaaaaaaaaaaattataaaaaaagggggtcttgctttgtcacccaggctggtcttccaactcctgacctcaagtgatcctcctgcctcggcttcccagcgttgggattacaggcgtgagccactgctcccagcttcatccctctgttttctgtttgtttgttttttggttgtttttttttttttttttttttttgagacggagtctcgctctgttacccaggctggagtgcagtggcacgatctctgctcactgcaacttccgcctcccgggcttaagtgattttcctgcttcagcctcccgagtacctgggattacaggtgcccaccaccacaccaggctaatttttgtatctttagtagagacggggtttcaccatgttggccagactggtctcgtgatctgcctacctcggcctcccaaaatgctgggattacaagcatgaggcactgcgcccagaggtgggcagatcacgaggtcaggagttcgagaccagcctggccaacatggtgaaaccccgtctctactaaagatacaaaatattagctgggcgcggtggcacgcacctgtaatcccagctactcgggaggctgaggcaggagaattgcttgaacccgggaggtggaggattcaatgagccaagatcgtgccattgcgctccagcctgggcgacaaggcaagactctgtctcaaaaagataaatacataaaatgagttatccattcataaacttctgatttctttgggacattgttcctgtaaatctgtgacgctttttgtaaagcatcagtgatttccccattcgttcttccacccaagttttaccataaatttgatgcttaacatttgcttcaattttagcagaactcctgttgctctgactggggctctgttctaactgatgtcttacttttttttagtgcctcaaactccgtctggttcagacatgttatgacaagttagtatcagtttattttggggcaaaaaaacttgaaagccatgcaagtttcgtcacaacgcacgttttccatgagctttttgaagacaccttatctttgacgctgcccgagttccagagggagctggccctgccccttcctgttagattgccacggtgctggggcgagggacagagcaggtcagcagccccagggtgacctcccccagagtgcggcagacggcctgctgcgccgtgtgcggcctgggcctgggccggttgtccagctctgagctccagtgtcctctgtagcccggagacagtagcgcttgtcaggcccctgtgcagacgtggcgaggtagtgcaggacaagcagagagcctggctccggggtcagcagccaggagagtcccagttgctccagtcccagagcctccccagaggaggggctttgaggaagattaggcgtagtgggattggattggagtgccagtgtaatcggggtagtcccgcccacccgtgccttatcagggctgaggacatagcctgggcaccgggagacactgggagtgggggagcctggagccacatggcattgaggaccactgccccctgctgcttccccccagtgtgcccagcagctcagaaggcagccagggaggtggtgcctccggcccccgagctccagccaccctctcccaagcctgcccggggtcgcctgctccaggtgcccccgctgtgctgccaggccttagcatttgtggtgacgcaggtggagcccccgaggaggggtcccgcggtgcccccggcccggcccccgacggcgcaggaggtgtgctacctgcgggcccagcaggcgcagagggcatcggcgagcttgctgcaggcccccgccaggctggcagagaagtcgccctccgtccacatttccgcccctggcgagaagaggaggatcgcccacatccccaacccccgcctggctgcaggtgagtcctggcccagggggcctgtgccggggggccgtgggcatgtgggcaggagaggtggcaccctgaggtctctgagctcacctgaaccacatggtgcttgctcatgggatgactttgggccccctccctggggccctcagcctgcctgtctgtgaaatggggactgttgaggggtgcaggaggcctggcccagcaccttccttccctgacccagctccggggttactaggagtccaacagcctgctggggactgggctgaaccagggcctgagcctgtggttccagggaatggggagccatgtcggggtacctggcattgggtggggagcaggcttctgcaggtgtggctttctcctggcgtgtgagtggggggcgtggcctctgatggaaatgagtgctgtcttcccaggagtggggctgtatttcctttactccgaggggcacttcccccccagcagggtcttgtagaaagtcgggccaggcctcagtggtgggtggacaggacccttcacggggggttgtcctgtctcctgcgtcttcacatcagtggtgtctgtagagcgagaaagtatccctggaggcaggtcacagatgagggtcccccagaaagctcctaaaaaatgcaggttctggtctggaggctgggaaaggtctgtgtgtctggcaagctccctgggagggcatggctgctgtccgaggaccaccctgagcagcctgctggtttggagcccctgcctccctggcgctggctggagagccttagggccagccccggcgattcccctgcagatcccatggatcccacggccctccttagggagagctctccaggctactctgacctcccctccccagagccccctcacggctgagaccttagccccagggaggggaaatcattgagttgggcctatcccaggaccccacacgcttcccgtctgtgtctccgcgctcgggttgtcctgttgctgatctgtggtgggtgctgagctgtcgcagtgcccttggggcccgccgcctgaagggagtctggcgtcccaagtgctggcagtgccgcagggcgggctcatctggcttggaggactcctgtggctgcctgggctcgcccccagcgtgcagccgagggagtctggaggttctctgtccgttcctgaagagcaaaccctccactgcaagaggcgcgtgccagcctggcgggcagcctgcttccttgctgggcggcccgcggtagcatgagcagactcatcctgcctcccttgcaccttccagggccagatggcatttcgagggatgttgctctgagactagggccagatgtccctgctcacagctccccttcctgggtcggtgccgagcccccagtccagaagcccccctgccacacagacgtacatgcccaggttgcagctgcccgcgtggccagccctccgaagcagcccctgcaggcctggcctcctccctctggtttgtgacttcatcaaagggcaaggcagaacacagaggccgcagggcagggcaaagccaatgagcaggtgggggcacccgagacccttcggtcctctgtccgggagccagggcctttccctcagacatcgacgccttgggcttggggtcagaacacgtggcagaggcctggaccaccccaccggtgacgtgtcctcagcggcctccgcagcctgacctgtgtcctctgcctcgatggacttgcctgaaggcagctagagcctgatgccattgcgcagccccagcccctcaccctggcccggccccctgcacgcggagatgcacgtgctgctggcgctgagcggccgcggctgcctggtgctccgccacgtggtgatgggcagccactcgccctgtgcccacaccccctgtgccccgccagcccccacaggtgccaagaggacccttgcggccagcggcagccagtcctccaacggccctgagccaggtggccagcagctgaaaacacgcacattgtcggggatggcgtccaagactaccaccaccatcatccctaagcgaatcgcccacagtccatccttacaggtagcccctcccatctcggccaggaccaccacccccaagaccacgccctgaggcccggccacatgggacctgcggagggccagcctcgcccctgccctgcgggccttcgtgctccacaccgcagtacagccttcaccttccctccccatgccttggtgttttttttttttttttgagatggagtctcgctctgtcgcccaggctggagtgcagtggcacgatcttggctcactgcaagctctgcttcctgggttcacgccattctctggcctcagcctcctgagtagctgggactacaggcgcccgccaccacgcctggctgtttttgtatttttagtagaaacggggtttcaccatgttagccaggatggtctcgatcttctgacctcgtgatccacccgcctcggcctcccaaagtgctgggattacaggcgtgagccaccatgcccgaccgccctggcggtgtttttttgttttgtcttgttttgtttttttggttggttggtgttttttttttttgtttagagacagggtctctgttgcccaggctagagtgcaggggcgcaatcatggctcactgcaacctcgacctcctgggctcaagtgatccttccacctcagcctcctgagtagctgggaccacaagccggtgtcatcacaccccagctaataattttgttttttattttgtagagacagggttttgccacgttgtccaggctgatcttgaactcttgtcctcaagtgatcctcctgcctcagcctcccaaagtgctgggattataggcgtgagccaccacgcttggccttgttttgtttttaattaatagactttatgttttttgagcaactttaggtttctaggaaaattgagcagaaagtacagcaagttcccttgtgcccccatggcctcagtttcccatgaccttagttccgctgccctcagtttcccctgctgctcctgtcttgccttggcgtgtctgtccctactgcagccaggctgatctgtcccagcgcacctcactcttgcctccagccatgggcacggcctcatcgcgtctgcgttccccgctggaggccttgtggaggccctcacccatggcagcttttgccttccctctagagtttaaagaaacccattatccccaaagagtttgggggcaaagtccccaccgtcatccgccagcgctatctcaacctgttcatcgaggagtgtctcaagttctgtacctccaaccaggaggccatagagaaggtgaggtcctggagttcctatctggccggtcgggtggggactaggggtccagggtggtccccagacatcccccggcctctcagccgcagctgtgacccggagctgcctgggagagatgcaagtccccgaccccatggcgaccccaccgctggggctccccggcaccaggcaggcatggcctcagctgggcaccgcctgtcccccaggcactgaacgaggagaaggtggcctatgaccgcagccccagcaagaacatctacctgaatgtggccgtgaacaccctcaagaagctcaggggcctggcccccagcgctgtgcccggcctcagcagtgagtcctggcgggtgggcgggggaggctcagggttgctcttggggtggcagctgggctgggaccctcgctgggaccttcacagccctgagctcagccacagtctcagacaaaaggaaagcgcggtgctgtgggggggctgcctgctgcctggttcccaggcttctgtgtaggacggacctggccctggtgtcctcgctgtcagccgccttcctccgctgagtggggtctccaagccgagccgaggggccgcctgctaatggagctgcggcagcttcttcaaagcaggaggcccagggctgggcgagctccatgcattaagctctggggaggaagaaagcggagacctgggcgtttcattgcagcctctccaggctgcattaagctatcaccggcccctgcccccgtccccgcctgcattagcactcggaggggccctgggttggcgtcgcaggctgggtggcccatgaaggctcaaagccctcgaaagccattagatcccccgtgctgttctccccgcccttcccccttcgcttgaggggaggggacgaagactttgggtgtggggcctccgtgcagctctggggcctgcagagctggcggctgccctgcgtccctggctcaccgcatgtctgcctctcctgttcgggtcaggctggaacccggggtcagtggggtgctgtcccagaaagggggagttgaggcagaggtctgaggagggcagggtgggtgggagagcaggcggggcaggggtctgagccagctacttcacaccctcctcccctccctcccttccttccagaaaccagtggccgcagggttgtgtcccacgaggtggtgttggggggcaggttggccgccaagaccagcttctcgctcagccgtccaagcagcccccgggtggaggacctgaaaggtaaggccctgcccctgctctgccacacggtgcttcgtgggcctctgccggcccagcccctgctgtgccacacggtgcttcgtgggcccctgccggcccagccgcctttcccggtggtgtctaccgccccgtgggccatcccaggcaggggctgaccactgtgcctgtccacaggggctgccctgtacagccgcctcagggagtacctgctcacccaggaccagctcaaggagaacggctaccccttcccgcacccagagcggcccgggggcgcaatcatcttcacagctgaggagaagaggcccaaggactgtgagtcgctggcctgcgacggcctaggtgggcaggtgcgggatgtgggcaaggccgggcatgcgggccccagcgtgagcctcagcttccacctgggtccccacccacagcttcctgcaggacctgctgccgctgtggcaccgagtacctcgtgtcctcttcaggccgctgcatccgggacgaggagtgttattaccactggggacggctgcgccggaaccggggtaaggccttacccgggtccttccccttcccacccatggcccccggaacctgggccctcccttgaggcccccagaactggggtaaggctttacccaggccctccatcccactcagggtccctgggctgcaccgtctttggcagagccggggctagcccttggcctcattttctctccacctgttctttatgcaaaagtaagacaagagctttcccatgacaaggttcaaatgccaccacctgaaaggccctgtgtccctgccttcctgtgcccttggtccatggaaatgtggaggttgctggccccaggagcggaggggcttgtcccacccttggcctggtggttctattcaatcccccaggcaaccacgcagccacgctcagggcacatggccagccttgcacagccctgtggcggcccctaaagccatcgcctcagggatacctggagggtgctgcccggggcagcgctgccaagaggcctctgcagagggcactggtctccctggatccaggcctgggcgtcctggctgccacacgactgccggggcctggtctgcttccagctccaccaagaggctgaggcctcctgtcctcagtcctcactccctagtagggctcggtagatgcaggtggtcagtgccccgggggctgtggagtgggcctggccgggccctgactgtgtgtctgtgtcccctgcagtggccggaggctgggagacccagtacatgtgctgctcggctgccgccggctctgtcggctgccaagtcgcaaaggtgagccctggcgtcccagtcccctctgcctgttctcaacagacttctgcctccccatcgttggtgtggggtctcgggacacagcacagtcctgggctcagggtctgggcccccgggcagcctttcttgtgttacccagagaacgtagcacccgtaggccccaggccctgtccctggccacttcccatcctgggaagccgtcctccctgtgtcttcttggcaagcccccttccccacctgctcaccagggtcccaaccagtgaatgggcgtgatggatggataggatggtcccgaagggctcagagatgtgctgctgctgccacccccgcccccactgcaccccgaagctgccctcacctgccttctccacccccagcaacacgtgcaggatggccggaaggagcgccttgagggcttcgtgaagacctttgagaaagagctctcaggagacacccacccggggatctacgccctggactgcgagatggtgaggctgttctctgcccagcgtcgggttcaggattggggaggacctggcctggtgcggccgccccatctggccccatctgggcctggctcaccggccagcgctcagggtttctctcgcagcaccggtgcctgtggctcctgccctggaccaacaccccatacttcccagcagagccaagcacaccgggcactgggccccggctctgcctctgaatgggaggcaggagggctttgcgaaagggggttactgaggtcacaccccactcggcctctcctagaagtcccacagagtctctggtcactgcctctgcctggaggggctctggagactcaaaggggcagggaaggggagggagggaggccggtgcctgggacacatctgaggtgcatcccttgcccgcagtcctacaccacatatggcctggagctgacgcgcgtcacggtggtcgacacggacgtgcacgtggtttatgacaccttcgtgaagcctgacaacgagatcgtggactacaacaccaggtgtggccagtgccctccacgagctgggagccctcccagccgcctctccccagggacccaccctcccccgccccaccagccagtgcttccaggctgagccctggtgcccctcctgcccgttcccccaggttttcgggggtgacggaggctgaccttgccgacacaagtgtcacgctgcgtgacgtccaggccgttctgctgagcatgttcagcgctgacaccatcctcatcggacacagcctggagagcgacctcctggccctgaaggtgccctgccggcccgggtcccgcgcggttctccagcaggacctgcgcaggccccacgtgcgctgatctctgccgctgcccacaggtcatccacagcaccgtggtggacacgtctgtgctcttcccccaccgcctgggcctcccctacaagcggtccctgcggaacctcatggccgactacctcagacagatcatccaggacaatggtgagtgccggtgcctgccctggggccgtccctgcgcaggggccgggtgctcaccgcatctgccccgcagtggatgggcacagctccagcgaggacgccggcgcctgcatgcacctggtgatctggaaggttcgagaagacgccaagaccaagcgatgacgcctgcccgcctcccacccgcctctcctgccgtcccgctggtccttagccccatgcctcttccaaaacagtgcaataaatctccggtaacccgtccacctggccgaggcagcccagagcagcgggatgagctggcggccagagaacgcccagcccagcccacccccgctcacgtcctgccgcacccctccgccggtccccaccctctgccccccagccctctggcgtctctagaaactgctgctgatggagaccaggacagagcccgcccccacccggcccgcagcccctcctgcccctcctgccaggccctccctcccgggtggtggccggcacctctgctcctcacgtgggtcgcggggcgggcttgtcccaggtttgtttgagacagtctttttttattttgtattgttatttttattatttttaatttaaacctgatgacttgcacagcatctttcccaccgggaagagcgggcctgctgccttccctcctgcggggtgggggtgggacagaccccagtgggggccagggccacactcagcgcagtgtgggctggacccgcctctgtgctccaggggctggccggtcttcgggggcgccggcttccaccactcgccgccccacccctgcactccgtgacctctgagaacccagctggcccctcgttagccccagggtctgccgtctagagggagcccaccggcctccggacactgtcttcccgctagagccccgtcctcctctgcggggctctccggacccccttccccctcacctccaggcagggacagaataaatgtttgtatggatttta

SEQ ID NO: 1246 - DNA, 6718 bp, Homo sapiens
gcagcagtgaccaatgacagagcaggccgcccgtgtatctaggcagatcgcggctgttacaaccattcagaaaaaggaaaataaagcaacgcacgagccggctgggccaggaccttggggctgggctggagtgaaggtggctacgaggtagtttctctttctcccttacctttattgttgcttgtgttggaaggcgactgttcagaggtagggaggggcaagatgagttgggaggagagcagaaaaagattgtagctgtattttcaacagcttcttcacccatgtgcacgtgcccggaatctgggaccccattcccctgccgggtttctgacgcccagcgcatgagttccgctaccccgccccacccccgctccactttgcagaaaccggggattgaatggagggggaagggaaggaggtgggggcgcgcctcaggatgggctgttgtgggagatgacgtaggggccggcgacgtggggagggggagcagcgggggaagtcgtggcgagattaagtaatgagaacttgggcccagttttttttccaagcctagaagggcagaatatgttcgtatcctttctgacctcccaggcatatgcaatggtgaggagtatttttgagaattagagaactttgttttgtggctgttattgttgtttttgagggggaggagggcagtatggggtcagaggcagaaatgaaaatttcttgctaacatggattcccaatccccctatctcttcctttacagttttccagatttaggagacttcagaaaggtggggcagatagaatggagatggcaaagatctctttgggcatatatgggcctggcgaagtaatggaataatttctaattttcggagaaggcaagtggtgagaaaaagaccaccggggaaattcggaggctttgtttctgtttctctgcctttctgggtaaagagatgaggagtgccctggggccttctggggaagggaaggccagtgtgagttacatctttatgcctgtccctctcaattctagccctcatgccgggatggcagaagatgagcctgatgctaagagccccaagactgggggaagggcccccccaggtggtgctgaggctggggaacctaccacccttcttcagaggctccgaggtaccatttcgtaagtactcatcacatctccaagtcctgtccaagacctgagtatagatccctgcagcacttcactttggctgtagatgaactgcctctcagcaagggcatgggagcagagggagatttttggccatggtagcaattcttgagcacctgctgggcatttcagtccttttccctccctagcagtcagataaagagacagggaaaatcttgtgtgtgacctccagctttctcctcttccccacagcaaggccgtgcagaacaaagtagaggggatcctggtaagtgtgttggggaagagggcaagagagggatggaaatgctgagggaggaggatgtgaggatgatgggcatcaacaaaacattgatgtgggagaggtagggtcctctgccttgtcagaagatagttggctttgcaaacttgctgccagtttgactttgtgcctctcacttgatctctgtgagcacttgcatagaagcccagcagagatgaagtcagagctgatcccctctacttccctcctctccatggtagcctatagggctcctcagagcacctagcatcaaataatttctttcttttttttttttttttttgagatggagtctcactctgtcgcctaggctggagtgcagtggcgcaatctcggctcactgcaagctccgcctcccaggttcacgccattctcctgcctcagcctcccaagtagctgggactacaggcgcccgtcaccacacccagctaatttttttttgtatttttagtagaaacggggtttcaccatgttagccaggatggtctcgatctcctgaccttgtgatcagcctgccttggccttccaaagtgctgggattgtaggcgtgagccaccgtgcccggccttgtcaaataatttctaaggtcctttttcagtctgacaccctgtaagtcagctagactttggtgtggggatcagagggtcctatattgggtccttcttggccttattatttctcctgcctctgttctctcctacctcagcaagatgtacagaaattttctgacaatgacaagctgtatctctaccttcagctcccctcaggacccaccactggagacaaaaggtaggtttgatagtagttttagatggcagaggttctgattcttagagaaaggttcactgggaaggggtgaggtgaataggaatactcgtaaatgctgtccttgatgaagaggaaaggtcctcgccctgacttggtttaccagggaaagttagattctgggtgaactaaatttggtccagcactactgaagtggtagtttgggaagaaccaggacaactgttagggtcttagtaatgcttgttccttttgtttctgtagctcagagccaagtacactgagcaatgaggagtacatgtatgcctataggtggatccgcaaccacctggaagagcacactgacacctgtctgccaaagcaaagtgtttatgatgcctatcggtgggtggaggggtgggtggtgggatgagtggattggtgggcataggaccccctcacccatgaagagcttcctgccttgataaagcctgccttcttaaagggttcctcacacttgatccctagggactcttcgagcctacccatggcctccttctctgagtatcttcccactctgctcccctctcactcaggaagtactgtgagagtcttgcctgttgccgcccactcagcacagccaactttggcaagatcatcagagagatcttccctgacatcaaagctcgaaggcttggtggccggggccagtccaagtatccttgactagagaggttgggggtggaggacctgggaggaagacttaggatgtggagagcaaggagtggaacagcttaacttgctcgaggggcttggagatcgccatgtgttggctgctctttaacttgcatcagatattgctacagtggcataaggaggaagaccttggtgtctatgccacccctgcctggacttgacctaaagggttctgagagtgtaagtaccaaatcaccttccaattccactcttctctcccaggtaaaagtcagaggtctttggggcatgttttgagggctaacagcctcagtcattatgtacatagcttctaggtatgatgttcccttctgccaaccctgtagctgaggcagaggatgaagagaacttgtgggcttctgcaatgggataggtagaggctactcccatccccagtctggtctcagctttggtcaatagtctttgatctctgacaagagaggaggcaagggttctttaatttggagtgtgattgggcatgtccttccccacttcagccagaaatgggcccagaagtaaccccagcacctcgagatgaactggtggaggcagcgtgtgccctgacctgtgactgggcagagcggatcctgaaacggtccttcagttccatcgttgaggtcgcccgcttcctgctacagcagcatctcatctctgcccgatctgcacatgcccatgtgcttaaggccatggggctcgctggtgtgttgaccctctcttatgtctcagcaaccctgagccactttcagcttcagtggccctcccacacactagaatagagacaccttggatttgccccctcttcctggagacccttctaagacatgctttagcaccccatttcctgtctctaccagtcagtcaatcagaattgcctcactcccctattcctcagtttcctcctcaccttcactctattacctttttggtacctctgcagaagaggacgaacatgcacctcgggaacggtcatctaaaccaaagaatggtttagagaacccagagggtggagcccacaagaagccagagagactggcccaggtaaggaagtcagtggccctgactttgctgtcctgggctgggggcttagtatatccttctccaattgggtcccttgcttttccacctcctgtgcctctggcgtctatgtttcccccaatactcattcttcacaccttactgtgttcctctctttactttttagcctcctaaggatctggaagcccgaactggggccggtcctctcgcacgtggagagcggaagaagagtgtagttgagagctcggccccaggagccaataacctgcaggttaatgccctagtggctcggctgcctctgctccttccccgggcccctcgctcactaattccgccaatcccagtctctccacctattctggcccccaggctttcttcaggtgccctgaaagtggctacactgcctctgtctagtagggccggggcacccccagcagctgtgcccatcattaacatgatcttaccaactgttcctgctttgcctggacctggacctgggcctgggcgagctccacctgggggactcactcagccccggggcacagagaacagagaggtaggcataggtggtgaccaaggaccacatgacaagggtgtcaagaggacagctgaagtacctgtgagtgaggccagtgggcaggctccaccagctaaagcagcaaagcaggatatagaggatacagcaagtgatgccaaaaggaaacgggggcgccctcgaaaaaagtcaggtggaagtggggaaaggaattctacccctctcaagtcagcagctgccatggaatctgcccagtcctcaaggttaccatgggagacatggggctcaggaggggaaggcaactcagctggaggggcagagaggccagggccaatgggagaggctgaaaagggggcagtacttgcccagggtcagggagatggtactgtttccaaaggaggaaggggccccggttcccagcataccaaagaagcagaagataaaattcccttggtcccctcaaaagtgagtgtcatcaagggcagcagaagccaaaaggaggcttttcctttggcaaagggagaggtagacactgcaccacagggtaataaagacttaaaggagcatgtgcttcaaagttccttatcccaggagcataaagacccaaaagcaacacccccatgatacaggtctgtggggaagagtgtttatatccctacgttaactttgcctagtagaggcccttctttgcacttgcttctcatttggctattcttttcctaaggaagtccattctcctctgtacagacagctgagtcacccagtctacttagtacctggttgctgcctctgaccttttcagcttgataccctgggctttagtgtaaccaataaatctgtagtgaccttacctgtattccctgtgctatcctgtgggaaggtaggaatgggctaagtatgatgaatatataggttagggatcttttggttttaaatcacagaaaacctaattcaaactggcttaaaataaaaaggatttattggttcatgtaactagaaagtccataggtagtgctggctccaggtgaagacttgacccagtagttcagtatgtctctaaataccggactgacttttttctcactgttgcatcttctgtaggaccatttaagtctgggccacttaatggctgccagcattcctaagattacacttttccccatttatgtccaatcagaaaaagaaggcatctttgtaccagaaatctcagcaaaagccctaatattcacactgattaggcctgggtcacatgtccaccctgaccaatcactgtggccaggaggatgatacatgctaatttgcttattctatatcatggacaacacctttggggaaaagggtgggggtcagcctccccaaaatcacatggattccccaagtggaaactaggagcagggagttgcttgggtggccgctaacaccaggctactcttattttagcttgctaagttgagatcagctagacctgctttcttttctcctcagtcttgcatttccctcaatacaagctgtagcctctttcctcgtttctagtctcagaaggaaggagagggaagccattctcctctagggactcttcagtctcatttagatgatagtccctttttttctacctccatattagagatggagctccttccttttcctgtttcttaatttttgtcttctcattcctgcttccctctcaccctattgccagttccaccaactagagtgaaagacttcctagccatttcattaaatctattctgtatccaccaggtggcagcatcttgtcatacgtgtcaggacttaggactgcggggtttaggttagatgtcacggaaaaagctagttctgtggtcaggcggcaccaatgagaaaggaatgcagaccctccagatgtatccttgggaaaagcagtaaaccaactaatatttattgaagacctactttgtcctctacatagggtagcttctgtcagggaatcttggttcttcccaagaaacactgattttctttcagggagacttcatgtgttcatttatttccaccacagcagattttaagaaattataatatgtaatatttgatatctataaagagtatatctaacgtgaataaattatgaagcatactaatgagtacctatgacccataacacatatacattaaaacattttaaatacca

SEQ ID NO: 1247 - DNA, 30900 bp, Homo sapiens
acttggcctgaggatgagggcgctggaagaaggggatgggagattgggtgctttttcttgatggggaggggcgacttgaagacggcaatcaagacctagatgacgtgtttggtctggggtggagtgaggacgccaagagggaaaggacggcgccctgaagagaccagctcaggcgaaaacagggctctgcccaggcggggacccagctgggtggagggcggaggcaggaacccaggaagccgactgagcaaagactgcgtccaggccccgcccccatgagcccggccacgccccctggagcccagccccgcctcccggccgcccgcgcgcaggtagggaagaggcggagcgccgccgccccgcccccgaggagccaccgcccagccgctcgcaggcgccgcacggagttgcgtcccggggacttggggccgcagggaggtgagcgcggggcgacgagcggggcaggactcacggccgcccagccgcaggcgccggaagggtcccgaggttgtgcccgagcctgccctggagcggtggtgcgcggccaggaagggtgcccagtgcccggtgcccgccctgcggagcgcctgggtcccacgtgggctcggctggaggcccgggctggctcagacggcgccggcggggccgctggacccggtctgctggcccctagggctcggctcggacaggacgcctaaggggtccctgggcgacggggcgccagatgtaggggcaagacgattgggcagagatttaaacctccggaggaagagaggagactgcgcagggcagtcccgcctgcgtcccagaagtgcctgcagttcagacccttctctcccctccactttctcccgggtgagcaccgggcggaccggggccgaagtttgttggttgagccagccaaggtggaaacaggtgcgggggtggggatgagggactcacacagcagggctggaccggagctcagaaattggacccaggagtcctgacttctggatggaggggctggggaaggttggccctgggcttgccttttacctgtttggcccctcggatgttcccccagggcattgggatagagacggataagttccctagggtacagaccccgccccactcccacgccagggcgcaaaggaagcctaggttttggccctgccccattccatgaaagattaacggagggggctctagggttggagctactgagagggtggcagcgggtgtgtctgaggagcagaaggcggtggggagctgaccccacttggggagaggctgctgttgcctgggcggctggcatcaggcccccagtgtgtgccatttgctggtaatataatgagaccagcatctgccttattcgaccctcactgtccgtagggcaggcagtggaaagggaggcgtgttttagagctgtggttctcaaccaggggcgactttgcctgccatgggatatttggcaatgttggagtcattttgggtgtcacacacttgggaggggaagtgagtgttgttgttactggcaggtagtgggtagaggccagggacgctaccagacatcttcagggcacggaacagcccacataacgaggaattatccagcccaaggtgttgggctgtgctgaggctgagaaaccctgcgcagcagctggtccatcaggttccttctcaatgatgctccctcactggggaaactacctcagttttccagagtggttaggggaggaacttggaataaacctgaatgagatgaggggtaaggcagtgtgagggcacttattcccctcacaagagtcttcctttggtgccatgagacaccgcctttcccaatctccactggccctgcaggaagctggtctaggtgctgtgggggagaggttgggaacagaggacccccttgcagcccaggcctggggtgcttaaccccagggcaatctcccaggaaggctgggctgaggcagcccttgagctcaaatatccctgggctgggagggtgggcagagggcgagctctcttcccatagattttcccaaagctggattgctgaagctggcatggttgcctgataccatgtgacctgctggaattttcccttctgaactcacacctaactcctccaattatgtacaccttttgaaagtgacatccaaggagtatcagggctcctaattcctggggggtccccaggctgcttttgtcctgcaataaagagggcaccctgggttagctgacgagccctggagtgggcccagctgctgatggggtggaggcacccctgcccatggtgttagctgagcagaggtgagagatgggagacatcaaagcacaggccaggtggccccccagtagggatgactcagagttgtttgtattgggctggaggaatgtacttccagttttctggcaacaaggaggggtggctggcacggtgggagaggatcggatgaagcagccacgtccatgcccaggagctggggccacctcgctgccctccctccctgttttcttgcagtagccattatacccatcctgttcacttctggacccagccttcttgcctgggaaccctggtggaggtttcgagcttgggttctttttgttggtgttggtggcttttgttttttttgttttgttttgtttttgtttttgtttttttggtctcttgactgtaaaaggctgaagtgaaactcccaccttttcatttgcacaaaaaacaaaagtggcctccattgctgtgagcctctcaagggacagggctgagcacccaggcttgtacaaagttgttcaggaagtcggcagtggagctcgggtgtgaacccagttgcccaccctcaggccccacccaagagccccacgaacaaaccctcagtgactcctacctgtctgtacctggtgtaaccacacacacacacagacacacacaaacagacacacagagacacacacaaacacacagacacacacagactcacacacacacacacacacacacacacacacacactctctttctctccagcccaggagggggacttttgttcctataagaggaggaataaatcacactacaaatgctttgggtgacgcacttggggcccgagtcctgctctggggtcagtggtgctgtttttcctgtggcctcagctctggatactgtggtggcctctccaccaaggtttctgtccttgctgtgtaaactctgccccagacaaggtgacagatgacagcagaagtcaaggagctgtgcacgcctgcccgtgagtgtgcgagtggcatggctcagctggctggtgcttccctttgggcctggcccccgcctgccgctggcacagcacagggaagacgtgtgccctcctggctgcctctccccctccacactctcctcagatctctgtgcctcgcactctggagcaggcctcggcgctgccccatctgccccaggggatttccagagtgagctcaggcatctgcaccggctgtggaagcgctggctgtcggaagcggctcccagtttcctatccagctgagccaggctgggggaggagtggcggggacgtctgcgcctgcccaagtacaggctgacctcggcggtggtggtggctaggcagggacagctctcagggcacgggcggcttcacagggaaaccaagcctgcccggaacgtcgttttgcctcccaggagacctaggatgggtgtaaggaaaaacacatcttccgggaagtacaaagcgccaccgtgtccacggcccctccttcagcaaatgtatccgggcgcccagctgggagttgtttgtggtccaaaagctactggaaggcagttccagccccagtgcccggctcctgcaggaaagtggtttcagccaagtgggcagtgcaggaggtgggccagagacactgtttggagtgtgaggggaaccttgtgaccagcagaaaaggatggaggaggattccaaacttcaggagctgggccaaggtccaggggctgctgggcacagtcgtccatgtgtgtgctcagtaggatgagttcacttaattagtctgtgcctcagtttccccagctgcacagtgggctcactaacagtaatctacctggagggttgtgtgaggtgaggactcccgtggtaaaggtgtgcagcctgcagtgcagtgcccggccatggcaggagcagtgcggggagccatcgtgataatggtgttagggtggcttcaggtaggggcgtggctgccggtccatggcacagacttgggagatggccgaggccctgcctcgtgggctgtcaaggactagatgggaacacgcatatggagcagtggcactgttgttattgttattctgtaggagtggctgtgtctggggtagggggacctcagtgccttgctggccaagggaagtgagggtgggtttccatctgggcatgaactgctgacctctgcccaggggttttcctggcctgccagtgtgtgtgtgtcactgacagtggggtggggggcagctcatggagttggtgcccctcagctgtgctttccctggcgtaggttcctggggctgggagcagggtaaagctgcctcaagtcttggttttctcctctgcctcccccgtgtggccgccaaccctgtgccagcaggtggtgcagggatggcttcctgccccggtctctggcaagaaacccttttccctctcccagtgggtctccccaggttgtcagctccatttagtcataagaagatctggggccaggcgcggtggctcacgcctgtaatcccagcactttgggaggctgaagcaggcagtcacaaggtcaggagatcgggaccatcctggctaatacggtgaaaccccgtctctactaaaaatacaaaaaaattagccaggtgtggtggcatgcacctgtagtcccagctactcaggaggctgaggcaggagaatcgcttgaacccagaaggcagagcttacagtgagccgagatcaccctactgcactccagcctgggcagcagagcgagactccgtctcaaaaaataaaagaaaaaaaaaagagatctggaagaggagggttgaggatctgctgtggggtttggagtgggaacaggactttgaaccctggcctaagccccttttgaccttgccagcccgtgaggatgatgacagccgcctctcacccttagcctcaactaaatgagatcatgtctgtaaaagtcctttgcaagctgagcagtgctgcccaggcagttaggtgctgtcccttcttcatgaatcaaaggcctttgcatgcaggactcactccagcaccccaaacactcagagtcctcacccgttctttttctcctgcccctcaccagttccagggtggcaagaggctgcagagtgtggaggttaagagcgcgggaccctggctggggttgtagccccaccacctccctaactgtgggaccttggacaggtgacttcatctctctgagcctcagtttccccacctgtcgaatagagatctgtcccctgtggggctcgtggctcagatagagactaagtgagcgatggtggcagagctcagccaggaataaaagaaacttccaactgggcgttgggtgtgtgccaggcactgtacattcatatctgctgtcatcttccctggctccctccgtggtggggcatcaacccatctcacagcagaggaggcaggctctgcagcacccacttgcccaaagtctcccagcaggtaggtggcccaggcaggtttgagtcccatctctggccccttattcctcctcattcctcagcaagagagctccacgctgccccgaagcaaggtgtgggccataagcacgtggctttgcaggcctgcttgggacaagcaacctggtgtccccgtgtcctgaaaccctggcagtcactggggctagggccagcctcttccctgggaagcagggagccccagggcaacgttctgggaaatcaggtttattagttccttaatgaccgtttacaagctcagaagtgtctgcctggcattttccctccctgctgaggggctccatgcagccggaggcagaactgggcctccagaagcgctctgagtgtgtcgaggtgagggcccagggatgccgtcggctccctgggctctgcatgctcacacccagccagtccaggcctatttctggctgggtggcactgggcaaggtgcttacctctctgtacaataggtgagaccttgtacctcagctgagctgttcctggggtgagccctcgttcatggtgacaaagtcacatagatcttagaccctgggaggatactagcatcttatgcatacacaaactgaggctcagagatgttaagtggcttgcccaagatcgcacagtggttagagatgggcctgtgaccctgtcttctgccatcgggacagattttcactgtctggaggcaggtggaaaccgggtgggctcctactttgtaagcacaggacagtgccctgtctgtgtacatgggacagtcacaaacggaaatggcctggtcacaccttagtgtcaaggagcctccagcaggagtgaaacggacctctcacacagaccccaggctgcatctcatcctgccccaaccgctgggcttgtgctggaccaccactgcttccaaggacccgtgaaaacccggctgccgggatgcagagaggcagactttcatgaacgtttgcagcaaagggcagttcccaccgagcctgtgttgctgtggcactgtgtggtgcacaccccaccccggaaaccctccagtgtcctggtgtctgaccccaaatggacagggccttttggcccccaggggccacttctgactcctccccttcacaacgatgctgagggagcaggagaactggggcccggctgctgtgcgtgcccccttcccttcattgccccaaagcctgcagtccagccccaggctcgggagctgctgcctcttccctgggatgtggaaggcacctgcatccccgcccagctgctgccacttgcctgcctccatcagcagctttgttttattttgtctgtgtgttttttgagatggagtcttgctctgtcgcccaggctggagtgcagtggcgtgatctcggctcacttcaacctccgcctcccaggttcaagcgattcttctgcctcagcctcctcagtagctgggattacaggcacccgccaccatgcctggctaatttttgtatttttagtagagatggggtttcaccatgttggccaggctagtctagaactcctgacctcaggtgatctgcccacctcagcctcccaaagtgctgggattacaggtgtgagccactgtgcccagcctccaccagcagcttttgaaatccagaaatttccaggggagggcactgtggtgggtggggcccagcgctgtgtccagctcgaggcctggctgcactgccacctcctttggtgcccacccctgtgtcttgccagcagctgctgcacattgggcttcggggatgcaggactccagcacccccagctcagcctgcttcctggaccaggaaccccagccgaggagggggcatttgtatctctgccatccctgctggcaactggtcctgagaaagcccagatggttggtgcagagggggcgtcaggggctgcaccaccctaagaacatgacatgtcaccccccagccccccgcaacacacacacacaggttcacacctcacacccctgatcttggcggctccctggagcacagcacccgcttcccgtgtctgtggttggcttatgacgccccagccactctaaccgggttaaggggagcccagagcctggggccggataggaaaaagcccagagaagtcaggggatggtcagtcccctgaagctgcccctgggggttcttgatcttctgaactgagttcgaggcaagccctggaggggcgaggaggagaaagaaacagctctctgggccaggacccgctgttcgtgggatgtctggggagctgtgtgaacccacaggccgttttgtttctctccatcagcagctgtgggctgaagcgtgtaccggcggagtgggttgagatcgtgtctgcgcccacttgccaccagctccggcctctggggaggtggtgctgagagggagggagagtggctcctgtttggctcctggagacagacagctgggtgtcccaccctcagagtccccagccccctctcccctctgctaactctgccggtggagctcacgccgcagctcatgccaaccctgcccttctgttttgcctctcatgactctccccaaattctgcccccaggcccccagccagccttcttgccactttcctgccctttactcttgccccttctacctcttgccagggcagcgtcactggctacgtgaggcccagcttggggatgcatggggaggtgtaagaacagctgtgccatgagctgtccttccgggcctctggggctggagaaaccccggggtcagcagtaccacgggttttgctggggattgcacagtgggtgaggctcagcttcctctttgcagctttctaaaaatgccctggttcccagcagggccacaggcagggaaaatgagtttcagtttctgtggcaagggagctggggagagaagcagtttccttgtccccagccctcaccctagcatcctgtgattcagccgcgaagacgtggccccaagcctcccaccgccctccttctgtcctgactgcccactcccagggacaccaggtgacgcctcgcccacccgcggctccggagccaggctggaagcagcttcccgcccagggggtggtttccccacatcctgtcttcagatggcttgagccccctaaacttcctggtcatatccagtggataataatggtctccctctttcctgtctggaggggagggggctgcttacttcttatccaagggcctgtcccgtcccacccctgtgtccccatttctggccacacgcaggctcagcccttgcatcaagcctctgcctgtttccctctgggctgcacctgtcacgctctccctgccctgccccataaagcccatagagcccagggcttgtggggactgcacccttcattagcaagactcagagcttctagaaacccacttgtgtgggggtggggagtgcagggagattggtggcaccaggtggagagagggaactgcacctgggggagttgggaggggcagtgggctgggcccgcgtggaggagtgtggcttgtacagtccgcatggcggggggacccttgtaccctgcctggactggctggtagagctgttggggacctccctgggggtggccttgcttacccagctgtgcggaacaggcttggttgggagtgcctggcctcaccctttgtggggaaaccagattctctgggcagcagtggtaaatggtgtctgagtctgtgtttcgttggatgtgtctgaggtccgctgctgccagctgggttatgctgtctccaaagctatctgcagtgggggaggccctgagcctgggcaggggagggtacagaggcctcaacccatgggacctgggggtgatctgaactctgcacttcactttttttcaggatttcccccgccccaccctaaaggaggaggaaatagagtctgtcccaccctaagccccagtccctctccccaggtctctttggcatctcccagctgggctggggctgaaggcccttctctggggttggccacagtgaggccaggatctggctgggcaggtggcagtgttccgcctgtgggctgggtgcggaggcgggcctgggggtcttagagagagagcggcggatgtgactgcgggccaggaggaagcctggtcccaggatgtcaccatttcccctgcagtgagcaagcatctctagggctcggagataagtgctgggtggggtagctccagctctccagcgcttttttctgtctggttcctgccatctggacttgagccatgaggaaggccagagtgggtctgacagtccccactcctttccccgctgagccccaaggaaggggctgggcctttgcacccccaccccaacttctgcacgagttggaggcagttgatctcaatggtggaaagtggctggtgcaaagtcatgcttccatactccatgtttaggcttcatgggtgtcaaagctgggccgtgaccttgtcccattccctcagagaagggaactgaggccagagggtggagctgctctcaggccgctgcccaggcctcttgtgctctgcggttcagatggcactcccgatgccaggctcctgcccaggaagacatgcccacccgccctggccctgtctctgctgtctggtgtcaggccacctctcttcgggacccccccccaactgattgccctggggctgaccaggctctcctctccctcagtgttgggttttgggagcctctctcatcaggaggttggcacagatgccagccatgcagcggatcctgggcaggggtctcagctgggatggcctggccttgggacagggaggctggctgggcagaaccctagaaccaaaagcggtgcctgtggtgggctagggagctaggtggggagtctagtggggagtctagtggggaggtccactagacactcgttctggcacagcatgcagcgtcctccatcctggccctgctgtgggtacggagccagcagggcaggagctctcagtggagccctccaaagagggctgcttcctggaccagctgcaggatgagggagaccccttctgtccagggctgacataggctgaccaccgccagccccaccctctcactagcttcccattcagttagccattgatgagggctcactgggtgcaggatcctgggctgcccggggttgggtaggggactcctacatgtaggtaaatccgcgagatgctggagagagcaggcaataaagtggttgattctctctggaggtgacattttactttcctagtagggcttggccaggcaggcaaggtggagcctggtgtgccaggcgcagcgcttcagatgagaggaggtgagagcttggggatggcacagggaagtgttttgtctggtgagggtgtggcagggagggcaggcctgaagggacctccagggaggtgtgatcagatctgggttccagaaagatcctacctgcttggcgaccttaactgagctggagtctggaggccccacccttgcacccagctgcttccactgcttgcctcccatcccccagtgccagttccccagggcagtgccctccccatgccctcttggtgtaccctggtcccaaaggaggccaagctatgaacttttcttgcagaggtcccaggtgaggctgttgtcctggagctgtccccagagcaggcttaggatgaggggacctagccacagcttcaaccgagtggggtcccggtgtggctgccagggctccttggcaccaacccagcccagtgggttgatctctgaggacctcgtcatactcagccgggcagtctgccctggggggtggggtcaggactccccagcacttcgggatggaaggaggcgaagccagcgctgctggactagccttaaagaagcgggagacatcctagctccgcctcaagatttctcctctgcacccagcattctgctccccaaatgtcccaaatatgcagggggtcaaggaacattgctcagtggaatcaatggggagcgtgggctactccccagcctctggtttgccccatagcagccccttgggcaccgctggggacccccaggcctctgaggagcttggtttggaaagcgctggaatgctggaccaagttccctctctggctccctgagagggggtcttctagccccagtcttagggcaagaggagcccgtcccctaggagcctccaggccctggagccagacatcgggcgtcctagctacaccctttcctggctatgtgagcttgggcaagttaccaaacccctctgagcctccattcaccatctacagaatggaagagacgctaatgtcaccctggaaggtgttttgaagggtaatgtgtgtaaagggccaaacaaggccccgcacagttaaggacttaaatcctgcccggccccgggagggcttccggcatcttggggttcccctcaaaggatggcctgggcaggacttcttaaaaacaaacaggcggctgggcgcggtggctcacgcctgtaatcccagcactttgggaggccgaggcaggcggatcacgaggtcaggggatcgagaccatcctggctaacatggtgaaaccccgtctctactaaaagtataaaaaattagccgggtgtggtggcgggcgtctgtagtcccagctcctccggaggctgaggcaggagaatggcgtgaacccgggaggcggtgcttgaagggagctgagatcatgccactgcactccagcctgggctacagagcgagactccatctcaaaaaaaaaaaaaaaacaggaatgcccctgggtttcgtgctttaaaatggttgattttatgttgtgtgacttttaagttcaataaattaccaatcaaagcaacaaaacacttccagatcatttgaactttgccttaagtatcagaaggcagttagtaattcctggactttgaatgttaaatatgtggggttcttttgttttgttttgttttgtttcgagacggagtcttgctctgtcacccaggctggagtgcagtggcgcgatctcggctcactgcaacctccatctcccgggttcaagtaactctcctgcctcagcctcccgagtagctgggattacaggcccaccacacccagctaattattttgttgtttttggttttggttttggttgtgagacagagtctcacactgtcatctgggctggagtacaatggcgcgatcttggctcactgcaacctccgcctcccatgtttaagtgattctcctgcctcagcctcctgagtagctgggattacaggcgcccgccaccacacccggctacttttttgtatttttagtagagatggggtttcactatgttggccagactggtctcgaactcctgacctcgtgatccaccctcctcagcctcccaaagtgctgggattacaggcgtgagccactgcacccagccccggctaatttttgtattcttagtagagacagggtttcaccatgttggccaggctggtctcgaactcttgacctcatgattcccccaccttggcctcccaaagtgctgggattacaggtgtgagcgcctgcaccctgcccaaaaatatgtggttttgtttgttttttgaggcagagtctccctctgtcgcccaggctggagtgtaatggcacaatctcggctcactgcaacctccgcctcccaggttcaagcaattctcctgcctcaacctcccgagtagctgggactaaaggtgtgcaccaccatacccagctaacttttgtatttttagtagagatgggtttttaccatgttggccaggccgatctcgaactcctgacctcaggtgatccacctgcctcagcctcccaaaatgctgggattacaggtgtgagctactgcccctggccgaaagttaaatgtttctgttctgttcaagtaatattgagaaaaataacaggggccatcttgactctaatgttctgctccaatcaggttcccagaccagaggactgttgttaggtgattggctgtgaacaccctgaggccagtgcccctcgctgcttggcactcggagatgcctgattagcacctttaatcccttaccagtgaggcaggtggaattggccccattttacagatggggagactgaggtgaggaaggttaaagcactcagtggtgggcatgccccctggagccggccctcctttcttccagctgtgagtacccaggaagctgcaccgtgtggcctggagctgtctatctgtccttccagccacctgtctgtccagccacccttccacagactgaggcttgacaccggagcatctgtacagagcaaggagaagacaagaacatgctctaaagcccttcacagcaagacccaggaagccgcgggcaaactcagactcgaaggtaggaagctgggcggccgggtggctggacccagggcgctggctgctgtgcccacgtccagatacctcctgcggggcccacgctctctgtctgaacagcggtggacagtgaatgaagaaagtcaattcagggagcgagagggaggaataagggcagggaagggacgggcgcggtggctcacgcctgtaatcccagcattttgggaggccgaggtgagtggatcacctgaggtcaggagttcgagactggcctggccaacatggcaaaaccccatctctactaaaaatacaaaaaatttagctgggcgtggtggtgcgcgcctgtagtcccagctacttgggaggctgaggcaggagaatcgctcgaacctgggaggcagaggttgcagtgagccaagatcatgccactgcactccagcctgggctgcagagtgagactacatctcaaaaaaaaaaaaaatttgccaggcatgctggctcacgcctgtaatccaagcactttgggaggccaaggcgggtggaggccaggagtttgagaccagcctgaccaacatggagaaacccagtctctactaaaaaatacaaaattagctgggcatggcggtgcatgcctgtaatcccaactactcgggaggctgaggcaggagaattgcttgaacccaggaggcggaggctgcagtgagctcagatcgtgccactgcactccagcctgggcaacaagaatgaaactcagtctcaaaaaaaaaaaaaaaaaaaaaaaggcaggaagcgaggtgggaccggcactgctcaaggtggggcaggagggcacttgaactgcaaccaggaggctgagaagagccagcccctcctctgtgtgatggtctgggacagagtgactggctcggacagaggcccaacattatggagcacctgcttcattgagagagaattcacacaccagtcgattcacccatttaaagtgtaccatcagtgtttttatttatttatttatattttgagacagggtctcactctgttacccaggctggagtacagtggcgcgatcacggttcactgcagcctcgaccttcctagctcaagccatccttctgcctcagcctcctgagtagctgggactatatgcacgcaccaccatatctggctaattttttaatttttttatacagatgggatctcactatgttgctcaggctggtcttgaactcctgggctcaagtgatcttcctgcctcagtctctcaaattgctgggattacaggcatgaaccaccgctcccaaccttcagtgattttgatatattcacagaggctgggcacagtggctcacacctgtaatctcagcactttctgagaggccgaagcaaacttgaggtaaggagttcgagactagcctggccaacatggtgaaaccccatctctactaaagatacaaacattacccaggcatggtggcttgcgcctgtagtcccagctactcgggagactgaggcaggagaatcgcttgaacctgggaagtggaggttggcagtgagccaaaatcgcaccactgcgctctagcctgggtgacagagcaagactctgtctcaaaaactatatgtgtgtgtgtgtgtgtgtgtgtgtgtgtgtgtgtgtgtacatatatatacatattcacagaattgtgccaccatcaccacagtttcagattgctttcatcaccccctaaagaaagcctgcaccctttagctgtcaccccctgcccagtccccaccttcccagtcctaagaaccactaccctgcttctgtctatagatttccctcttctattccgagctttcatatgaatggactcatgcagaggtggccatcgtgactggctcctgtccctggacacaatgttctcaaagctcgtccacgttgtagctttgttaggacttccttccttttgtggctgaaggatgctccattgtgtggctcaaccacattttatatttgtgccttcatctgctgacgggcgcttgtgctgttttcctgctccggctctgcagagccgtgctgccgggcacttcctgtccaggtttctgtgtggacacagtgcttcagtgtgtgaagccatctgctcattttttgttgttgtttgagacggagtctcactctgtcgcccaggctggaggcctggagtgcagtggcgagatctcggctcactgtaaccacaccccccgtcctgggttcaagtgattctcctgcctcagtctcccgaatagctgggactacagttgcccaccaccacacccagctcttttttttttttttttttttttgagacagagttttgctgttgttgcccaggctggagtgcaatggcgagatttcggctcaccgctaactccaccttccaggttcaagcgattctcctgcctcagcctcccgagtagctgggattacagggatgcaccaccatgcctggctaatgttttttgtatttttagtagagataggctttctccatgttggtcaggctggtctcgaactcccgacctcaggtgatccgcccgcctcggcctcccaaaatgctgggattacaggcatgagccaccgcgcccagcctaatttttgtatttttagtagagatggggtttcaccatgttggccaggctggtcttgaactcctggccttaggtgatccgcccacctcagcctcccaaaatgctgagattacaggcgtgagccactgtgcccggtgacatcatccactcatttgctcctccagacgcttctctggggaggaaccgttactctcccccttgtgcaggtcaggacttgggtgatgagttgtcaggtgactaacccgacagcaaatgcaagaccattggcccagtatgcgctgccggctccattgcttttgatcatgaaccccacccccagcagagcttggccagtttgagacaatgaggggcccaggaaagctgggtcaggggtaagcaagggcacaggaagagacgaagagaggtcctggaagtcccagtgagacgtttggactttgggtgagaacaggaaatcctgggagagagttgagcagggaagcaacaggtgtgatctatgcttttgggaggtgaccccagctgcggtgcggagaatgatcagtctcagggggcttgaggcagcaggtagaggaattgagagagtggagtgagcctccaggtgaggagatggtggaggtgaggtggagatggtggaggtgaggtagagatggaggaggaggacaggttcagatggctgctgtctcgccgacccgtgcatgccacgcctcagcccacacacgcccttggctgaagggctcccagggagatgggtatggagtccctggcttcgtacaaggagaggaaaaacaaaacttgcccaggaaccttgggatgtgaaggagaggaaacagctgggggggtttatttttatttttatttttatttttgagacgaagtttcgctcttgttgcccaggctggagtgcaatggtgcaatctcggctcactgcaacctctgcctcccgggttcaagcaattctcctacctcagcctcccgagtagctgagattacaggcatgcgccaccacacccagctaattttttgtatttttagtagagacggggtttctccatgttggtcatgctggtctcgaactcccgacctcaggtgatctgcccaccttggcctcccaaagtgctgggagtacaggcatgagccaccgcgcccggccacagctgggggttttaacaagaagacggtcatggggcagagcaagagacgaaacgaagagaatgaaacaggcagagggtgttaattctggtggagtcagaggggaactggggactggtggcacacgcacaggaaagccccagatggggtactgggcaacagccactgaaatttgggatgtacttactcttcaacccagccattctgcttccagaacttggtcttgtaatagttaaacaagcacacgcggtgtatgcaagggtgttagttgcaacatcagacccatgtctcaaattccggaaacatcctaaataaccagcagtctggacttaagtaaatcttggtgcattccacttatgaaatctttgcattcatcaaaaaagacaagaggcctagggccgggtgtggtggctgaaacctgtaatcccagcactttgggaggccgaggcaggtggatcacctgaggtcaggagttcgagaccagcctgaccaacatggagaaaccccatctctactaaaaatacaaaattagctgggcgtggtggcgcatgcccgtaatccgagcttcttgggaggctgaggcaggagaatcacttgaacctgggaggtggaggttgcggtgagccgagatcgcgccactgcactccaatctgggtgacagaatgagaccccatcacaaaaaaaaagaaaaaagaaaaaaagtaggtctgtccgtatgtgttgacagggaaagatgtctacaatgcaggtaaaatgatagagtgtgggctgggcttggtggctcacgcccataaccccggctacttgggaggctgaggcaagagaattgcttgaacctgggaggtggagggtgcaatgagattggctcacagcaatctcttcctctcgggttcaagtgattctcctgcctcagcctcccgagtagctggaactacaggaatgaggcactatgcctggctaatttttgtattttagtagagatggtgtttcactgtgttggccaggctagtctcgaactcctgaccttaagtgatccatccaccttggtctcccaaagtgttgggattgtacgtgtaagccaccacacacagctgtgtgattttttttttttttcaatgagcatatgccacttttattgttaaacagtgttctcactatgggggagaaaagtgccagacaggtggcagtttcagttatcttttttttttgagacattttctcactctgtcgcccaggctggagtgcagtggcatgatcttggctcactgcaacctctgcctcctgggttcaagcaattctcgtgcctcagcctcccaagtagctgggattataggcatgcgccaccacacctggctaattttgtatttttagtagagacagggttttaccatgttggccaggctggtctcaaactcctgacctcaggtgatccacctacctcggcctcccaaagtgctgggattacaggcatgagccacgcacccagccagttttagttatctttgaaaaatgaactggggctgggcacagtgagcttgcacctgtaatcccagcacttgggaggccaaggcaggcagatggcttaagcccaggagttccagaccagcctggctaacatggagagacccccacctctacagaaaaaagacaagaaaaataaactgggtggccttgggggacagggaccagcacagtaggtttctcatctctcggcccacctcggcctccccaagtgctggtattacaggtgtgagccaccgtccctggcctgcatcttcatgctcttttcagggtttggttcttgcctcaagcggagagatcagaaattgaatgaggtagtaagttgaggacctcccagacccatatggtccgggatgcaaatgatggtcagaaatagacctcactccaaccactgggcctgaggttcagcctggttcaggctgggtttagtccccagggatggtttgtttttggttttgtgtgtgtgtgtgtgtgtgtgtgtgtgtgtgtgtgtgtgtgtgtgtgtgttttcagacagagtcttgctctgtcgccaggctggagtgcagtggcgcgatctcggcttactataaccgctgcctcctgggttcaagccatcctgcctcagcctcccgagtagctgggattacaggcacgtgccaccacgcctagctaattttttgtatttttagtagagacggggtttcaccatgttggccaggatggtctcgatctcctgacctcgtgatccccccacctcggcctcccaaagtgctgggattacaggcgtgagccaccgcgcccagccgcccagagatgtttgaaccaactttaggcaagttggttcttggtctgggctgcgtgccctggcgtcagggtcctgacactgcgccaccccgcaccgcccaccgctgctctcccggtctccattccagccctcccgcctcctgcccacaatggcctctgctgacaagaatggcgggagcgtgtcctctgtgtccagcagccgcctgcagagccggaagccacccaacctctccatcaccatcccgccacccgagaaagagacccaggcccctggcgagcaggacagcatgctgcctgaggtaagggggctggcctgggggctcactgttctgccgtaggtaacagatgtacccacgtgacactttctggtcagtttcacttcccagaggggctccttcctgagccacagctgctgtctgtgcagcccttgactcgggccctaccccctccttcctgggcccgaaatatcacagggagtaaagccaggaaccgggctcactctcatcgtggtcaggggcacacaggaagggccagccccaagaaagtgcttgctggtaaccctggggccctggctgttctcatttcaccccctaggcctggactctcagtctctcttctgagggctgggggctttctttgacatgggtgagcaggggacagtgtctccctggcatcagcagcccgcctaggcagtgtccgcttcctttgggaggacgagaacagatcagtgtttctgacagtctggtctagtgccccataaagagctcattgaaaaccggcttgtggcagcgtgggcttcctgcacagtctggagtataaagggaagcgatgttaacgccccccgttcacccgagagctctgcagaagacacagcagcaggcaggagcgtcatggtgcagaggggagggactggatgaggagttaggaaaacacacgctggccttgacggagaaaagttagacaatggcgattttaaattcagaatgaggctgggcgaggtcgcctcatgcctgtaatctcatcactttgggaggctgaggcagccagatcacttgagcccaggagttcgagaccagactagacaacatagcaagactctgtctctgcaaaaaaaattaaaaaagagctgggtgtggtggcacatgcctgtaatcccagctacttaggacactgaggtagaaggcttgcttgagcctgggaggtcgaggctccagtgagctatgatggtgccactgccctccaacctgggcaacagagcaagactctgtcccaaaaaatatatatataggccgggcatggtagctcatgcctgtaatcccagcactttgggaggccgaggcggccagatcacttgaggtcaggcaggagttcgagaccagcctggccaacatggtgaaaccccgtctctactaaaaatacaaaaattagccgggtgtggtggcacatgcctatagtcccagctactcaggaggctgaggcagaagaatcgcttgaacctgggaggcggaggtgtcagtgagtcgagaccacaccactgcactccagcctggacaatacagtgagattccatctccaaaaaaaaaaaaaaaaaaaaaaaaaaaatatatatatatatatatatacatatacaaacacacacacacacacacacacacacacacacacattatatatatatatttccaaatgaaagcaaattggggcataaatcagggttgaagtttgttctcagggttttcagaataggaggctaaagaaaagccagcccaggacctgggctgcacacaccaccgcctgccctccctccttcctccccaagaggaagaacccagcctacttgaagagcgtcagcctccaggagccacgcagccgatggcaggagagttcagagaagcgccctggcttccgccgccaggcctcactgtcccagagcatccgcaagtgagcccccctacacccaagcccagcaccccccacccagcaacctgtggattctcggggcctggacatgattgggcctggtccctgcgtcccctctctggaaggaggaggccggcattaatgagcaatgtctccctgtggcctattatcatggtatagatggggaaatgggtatgtgctttgcggaatatcacggtgtggaggctggggggcttcgaggagctgggtggatcagtgtgggggtgcctggggccctagcctggctcctcacgctcccgtcatcccctgcttctgctcatctggtcactgggctccagccaggggcctcacaggcagatccgccccccacctccctgtaggcacgcgggcacacacgtgccatcaccccttccacacactcaggtgcacaggcgtagacaagcgtatgcccacctgtcccttgtctgcttccgcaggggcgcagcccagtggtttggagtcagcggcgactgggaggggcagcggcagcagtggcagcgccgcagcctgcaccactgcagcatgcgctacggccgcctgaaggcctcgtgccagcgtgacctggagctccccagccaggaggcaccgtccttccagggcactgagtccccaaagccctgcaagatgcccaaggtgggatccatggggaaaggaggcaggggtggggaccctaatggctctgcttaccgcccccctcccttccagattgtggatccgctggcccggggccgggccttccgccacccggaggagatggacaggccccacgccccgcacccaccgctgacccccggagtcctgtccctcacctccttcaccagtgtccgttctggctactcccacctgccacgccgcaagagaatgtctgtggcccacatgagcttgcaagctgccgctgccctcctcaaggtgcggggctccctcctgcagggcccccacctctgcccggcctcccttccttgcccctcccttccactcctcatagtagcatcccctaaagctcacctgggcatctgcctacggtgccaaggacagtggatgtgctgggatccctgggcaaagagggaccccgaagcccagcacccaggcgtccatccttctgtcttaaatctcgtgtgaccccctgccaagttttggaacctggtctctgcactgactcttaagctggggaagtgggaagtgagatgcatacttgctcctcatccacccgggttttccaagtccctgttacgtgctgggcaccgcgtgcagagccatcgccatcctggctgagctcgcagcccagggtgagggtcaccattcagggtggtcagtttaggagagcggctgttatcagggaagacattgagttaagcccagaagacacaaggagacgttcactagggaaggaagggaacagcattctcagcagagggaatggcctatgcaagggccaggagcccagaggaagtacagtgctttgagggggcagcaggcggtttgatgtggttttagtgaagggtggttataggagctgtggcaggagatggggtcagaaaggtgggcagggacctggtattccgtgccaagaaacagggacagggagacatggcccaagcctcgggagtgagggtatagaatgtgggttgctttgagtgttagggtaccagcagcccaaggcagaggggcagcagggaccaagggaaaggtgactccaaactgtgccaagagtggtgtgccaacggaagctggtgtctcatttcctggccttccagtctcaggagctcctcttgcccgttcagcttgcagaatctccacgctttgggcaggatccctcctcccaaggcgctgcctgcaggcggatgggcttgatgattccttcggtgttggggctgggggcctaggtggccaggctgtggtcctgatggctgtgcctctgcccgtgcacaggggcgctcggtgctggatgccaccggacagcggtgccgggtggtcaagcgcagctttgccttcccgagcttcctggaggaggatgtggtcgatggggcagacacgtttgactcctccttttttagtaaggcaagcatggggtgtgggacagcaggagttgggtggggtggcctgggagctgggtgaggtgaccttggcattgatcatattcaggaacccctgagggacccagaggcccactgctgggatgtggcatggtcctatgtggagctgctgggcccccatctttctgttgggtagggtgaagacctgcggtggggcacagtgccacccgggaaagtcaccattggggctgacgggcatgtggcttcccaattcattgtgaagagcccgtctgttcagctgtgtcctgcccttgaattgaggttccggggggcagtgtttgggacagactccttacactgtattttcttgtcccccaccccaggaagaaatgagctccatgcctgatgatgtctttgagtcccccccactctctgccagctacttccgagggatcccacactcagcctcccctgtctcccccgatggggtgcaaatccctctgtgagtgctggggcagagtccctcctccaggccagccaccagcctgggggcatccccagacctcaccctggcccccaagccccttctgagcaccctggtggggtctgggagtattttggtgggggattcaggctgaaagccaccatccccaccaggaaggagtatggccgagccccagtccccgggccccggcgcggcaagcgcatcgcctccaaggtgaagcactttgcctttgatcggaagaagcggcactacggcctcggcgtggtgggcaactggctgaaccgcagctaccgccgcagcatcagcagcactgtgcagcggcagctggagagcttcgacagccaccggtgaggtgtcgccctggagcccccaggagagcctggaaggttccaaattcctctgggccctcctgaagcgcccccttactcattcagcaagtgtttcatgagcatcttctgcggatcaggagtgtagtgacaagctcgaaggcgcaccctgtcccaagggttgtgcacatgacctgggaagggccaggggtgcttgctgcctctcttccaccccatgctttctgagcctggtccccagccttgctcccagacagcagtcagtcaacaaatgttcattgagtgtcactgcctgcaggccctaaaatggaacccccagagggtggagcagggagggcagggtcggtcagaggacagttagaagctggggccagggctgggcgccgtggctcacacttgtaattatagcactttgggaggctgagtcagaaggattgcttgagcctaggagtttgagaccagcctgggcaacatagtgagaccctacctctactttaaaagaagaagctggggctgggagggaggggactctgggagaggctatgcagagcccttggggaagaacagggcatctgatttgcagcagcccaataaacactgggcccaaattagaaaataacaagcaggcagggcgcggtggctcacgcctgtaattccagcactttctgaggccgaggcaggcggatcacctgaggtcaggagttcaagaccagcctggccaacatggtgaaaccccatctctactaaaaatacaaaaaattagccgggcgtggtggtgcatgcctgtaatcccagctactcgggaggcttgaggcaggagaatcacttgaacctgggaggcagaggttgcagtgagccaggatcgcaccattgtactccagcctgggcaacaagagcgaaattccatctcaaaaaaaaaagaaagaaaagaaaaagaaaataacaagcaatggccaggcccggtggctcacacctgtaatcccagcacttcgggaggcctaggtgggcagatcacctgaggtcaggagttcgagaccagcctggccaacacagtgaaaactggtctctactaaaaagacaaacaaaattaggcaggtatggtgggtgcttgtaatcccagctacgagggaggctgaggcaggagaatcgcttgaacctgggggcgaaggttgcagtgagctgagatcgcacaactgcattccagcctaggtgacagagcgagactctgtctcaaaaaaaaaaaaagaaaagaaaagaacaagcaatgataggtgtggtgggtgtcccggaggaggatagagagggagagtgaacagctggtggggaggggtgcagtcaggacaaactgtgatgtcatgtgcaaaggccctggggctggaagggcaaagtacatcccaggaaatgcaggcaaagaggccagagaggtggtcggtcaggcaaagctttgcagccagcaagagggggtgattctggaatttgtcccaaggccagtggaaagctatcaaaaggttttaagctaggagagagatgcttggaggctcgtcttaaaagttcctctggtttgagatgagttgacggggcagaacagggagcccaggcgagccatgtgaccaggccagggtggccctgtggccgggactgggggttgggataggagctcggctcagctgacccgaggtgtctctgcacaggccctacttcacctactggctgaccttcgtccatgtcatcatcacgctgctggtgatttgcacgtatggcatcgcacccgtgggctttgcccagcacgtcaccacccagctggtgagtcgggtcaggctccatgctgggggtcccagcctctcctaggaggcctcagtgtcgtgggtacctaatccctcccaccgcaacaatctggccccagcagggtggtgctcaccatagcctggccccttcctggaggctctatcctggggacagctgccccagctccccatgcccagggcccacactgttctgacgccctcctctgtgctacctccacgataggtgctgcggaacaaaggtgtgtacgagagcgtgaagtacatccagcaggagaacttctgggttggccccagctcggtgagggcccaggctgggggacatcatctgagccaggagtccctgtgccctgtcactcccagctgggcaggtgggctcctcacccacccgcaggcccctcatcaggggagactctgcggggcagaggtggagtgatggacccctcccaggtctggggctcaaactcactctctcccctccctttcccttccccagattgacctgatccacctgggggccaagttctcaccctgcatccggaaggacgggcagatcgagcagctggtgctgcgcgagcgagacctggagcgggactcaggctgctgtgtccagaatgaccactccggatgcatccagacccagcggaaggactgctcggtgggggcaggccctccctcctacccctgccagaccctggtcccggactagctccacttgccctgtccttcaagggcagtgaccacgttccctcctccccgccccacctttcccagacccccatagatgagactgagccctggggagatgggaaaagcctctgtccttgcccactccagtgggggtgacctggccccgacatgacccaccagccttcttctgccctccaggagactttggccacttttgtcaagtggcaggatgacactgggccccccatggacaagtctgatctgggccagaagcggacttcgggggctgtctgccaccaggaccccaggtagggcctggagcctctgctgggcctcagggtcaggcatagccatgccatctgagccacccacagggacgtgggtaggtggacgtggcacgctgggtgtgccacagcccaatctgaaccctgtctccaggacctgcgaggagccagcctccagcggtgcccacatctggcccgatgacatcactaagtggccggtgagtgtccctggcggggagtggtctgggaaggtcagggatgggggacctgcctgctgcacagcccacttccctgccggtgccccctcctggcagatctgcacagagcaggccaggagcaaccacacaggcttcctgcacatggactgcgagatcaagggccgcccctgctgcatcggcaccaagggcaggtgagcgacctgggccctggcctcagccatcccactgcccccccgagctgcggcttcctgtgggccctctgctcctccaccgtcaccacccacagccgctgggccgatgccctccaataactgtcctttgctcccctgctctggggctacccatggtgcgagctggaggaaggaagcttgctccagagtcgaaggttctggatgcggcatcccccttcctgccagcgatgcctcctgtagccaggtgctgggctctgggcaaaggtgggcagtggttattcggcgccctgatgtcccctcttgcctcaccacccccttagctgtgagatcaccacccgggaatactgtgagttcatgcacggctatttccatgaggaagcaacactctgctcccaggtgaggcgaggcaggcctggagtagtggaggagaggacgctgggcatggcagcctgctggggccggggctcacgcactccctcccatgtcggagcctcagactcagcctgcttctggggcgctgagcaccatatgcccactcccaggtgcactgcttggacaaggtgtgtgggctgctgcccttcctcaaccctgaggtcccagatcagttctacaggctctggctgtctctcttcctacatgctgggtaagaggctcctcactgcccccgaacccgacccctgtgatggccacccagccggacccctggggaaaggttcctgggccagggcatggccggcccaacctgccgaagcctactgctcctgaagtgcctggctgaaggccgctgcctggtgtgtccctcccccagcgtggtgcactgcctcgtgtctgtggtctttcaaatgaccatcctgagggacctggagaagctggccggctggcaccgtatcgccatcatcttcatcctcagtggcatcacaggcaacctcgccagtgccatctttctcccataccgggcagaggtaaggatgtggaggatgggaccccttccgcacatagggggccagccctgctgctcctattccacccacctgggatctgccagagggacacggtgcccctcctgtactgggctccacagcggagggacagctaatctgggggcttactggctggtctcttaatcccagtgagagggaacagtgatgctcttgagtcaccctgtccctccaccgcctcatttatcttcctaaccgtgcccactgcctgacagtatgctaggtatctgcaggtcgagcggtaggaaatggcctccgtgcgccgtcggcagtctgatcagttccacctgactgatctagtttgttcagtgtccgtcctctccccaccgtgtgcggcctggaacaggcttgtctgtcttgcttattgctacggacccacaccaggcacgtacacagtaggcgctcagtgtttgctgaaagaatgggcggagcaggcccagctttggtccagcagctccagccgaccccctgcccctcagcctcaggggtccccatgcctgccagggaggagctgatcgatgggatgacccagggtgcaggcccggcccaggccacccacctgatgcctgaagccacgtctcccctgccccgccccaggtgggcccggccggctcacagttcggcctcctcgcctgcctcttcgtggagctcttccagagctggccgctgctggagaggccctggaaggccttcctcaacctctcggccatcgtgctcttcctgttcatctgtggcctcctgccctggatcgacaacatcgcccacatcttcggcttcctcagtggcctgctgctggccttcgccttcctgccctacatcaccttcggcaccagcgacaagtaccgcaagcgggcactcatcctggtgtcactgctggcctttgccggcctcttcgccgccctcgtgctgtggctgtacatctaccccattaactggccctggatcgagcacctcacctgcttccccttcaccagccgcttctgcgagaagtatgagctggaccaggtgctgcactgaccgctgggccacacggctgcccctcagccctgctggaacagggtctgcctgcgagggctgccctctgcagagcgctctctgtgtgccagagagccagagacccaagacagggcccgggctctggacctgggtgcccccctgccaggcgaggctgactccgcgtgagatggttggttaaggcggggtttttctggggcgtgaggcctgtgagatcctgacccaagctcaggcacacccaaggcacctgcctctctgagtcttgggtctcagttcctaatatcccgctccttgctgagaccatctcctggggcagggtccttttcttcccaggtcctcagcgctgcctctgctggtgccttctcccccactactactggagcgtgcccttgctggggacgtggctgtgccctcagttgcccccagggctgggtgcccaccatgccccttcctctttctcctcctacctctgccctgtgagcccatccataaggctctcagatgggacattgtgggaaaggctttggccatggtctgggggcagagaacaaggggggagacacaagtagacctcaggtagaacgacactgggcggagccaccccagggcctgctcccagggagtgctcgaggcgcatcaggcccgttttttaccagtttatatcacggtcttcatttttaaaagtaacgctaactttgtacggacgatgtctcatggattaaataatattctttatggcagtaca

SEQ ID NO: 1248 - DNA, 47397 bp, Homo sapiens
gcagtagcgggggtgggcgggagcgcccttccaggagatgggttggctgcagtagtgagaggctgggggtgcggctctttccctgcagtcctgccgaggaagcgtgcgtccctggcgcttccttcttctcttccggcggagaggttagtgtattgccttttctttagcagctcgagtggtccggcttggaggtctgcgccctggctcctggccgcccggaacgtgtacagttacgggttacgccagtgcggctgtgaccctttgcctcttaccgtgatctttggtcagcttagctgggagtaaaaagcactcaattaatgaaccctttttttgagccagtgcaccgcggtaactgtagaaatcgataaaataattttgagtttgaggaattgaacggcatactcccaaagatgagcgccacttagctctcgaatcgtagcctagctgtaatcgattttcttaattggtgtaattgttctctaaaagttgaaatgtgcccgggaactgagtaactgccttgtatttcattttaaaaattcgatcgaatgcctactatgtgctgggcgctattgtcaggagatataataggaaaaaacacaaatccgtatcctcagggagcttccattctggaaggaagacacaaaaatctgccctttcctcttatttttttcctttagctttgtgtctcacgtattttactgatttacctcgttttgtctgtcactcccaatgcaaggttcaaaagattcaaaagataggatttttgtctattttattttcagctgtattgtcagcaactaggacaatacctggcacatgataagaactgagttcgtttgcagtatgaattaataaactaaaaattaaaggtgtgcaagtgatgttaaacaatggagaaatgcaaagtggaggaagataagagaatggatgctggttgtgtttttttttttttttttttttattgatcattcttgggtgtttctcgcagagggggatttggcagggtcataggacaatagtggagggaaggtcagcagataaacaagtgcacaaaggtctctggttttcctaggcagaggaccctgcggccttccgcagtgtttgtgtccctgggtacttgagattagggagtggtgatgactcttaaccagcacgctgccttcaagcatctgtttaacaaagcacatcttgcaccgcccttaatccattcaactctgagtggacacagcacatgtttcagagagcacagggttgggggtaaggtcaccgattagcaggatcccaaggcagaagaatttttcttagtatggaacaaaatgaaaagtctcccatgtctacttctttctacacagacacggcaaccatccgatttctcaatcttttccccccctttcccccctttctattacacaaaaccgccattgtcatcccgtcccgttctcaatgagctgttgagtacacctcccagacggggtggtggccgggcagaggggctcctcacatcccagtaggggcggccgggcagaggcgcccctcacctcccggacggggcggctggccgggcggggggctgacccccccacctccctcccggacggggcggctggccgggcggggggctgaccccccacctccctcccggacggggcggctggccgggcggggggctgacaccccaccttcctcccggacgggggctggcccccccacctccctcccagacggggtggctggccgggcggggggctgacccccacctccctcccggatggggtggctggcctggcgggggctgacccccacctccctcccggatggggtggctgccgggcggagggtctcctcacttctcagatggggcggccgggcagaggcgctcctcacatcccagacggggcggcggggcagaggtgctccccacatctcagacgatgggcggccgggcagagactcccctcacttcctagatgggatggcggccgggaagaggtgctcctcacttcctagatgggatggcggccgggcagagacgctcctcactttccagactgggcagccaggcagaggggctcctcacgtcccagacgatggggggccaggcagaggctgcaatctcggcactttgggaggccaaggcaggcggctgggaggtggaggttgtagcgagcctcgatcacgccactgcactccagcctgtgcaccattgagcactgagtgaaccagactccgtctgcaaacccggcacctcgggaggccgaggctggcagatcactcgcggttaggagctgcagaccagcccggccaacacagcgaaaccccgtctccaccaaaaaagtacgaaaaccagtcaggcgtggcggcatgcgcctgtaatcgcaggcactcggcaggctgaggcaggagaatcaggcagggaggttgcagtgagccgagatggcagcagtacagtccagcttcggctcggcatcagagggagaccgtggggagagggggaccgtggggagagggagaggagggagagggagagggctggttgtgtgtttttaatgtagtggttggggaaggcttcactgggtagaagacattttagcaaacatctgaaggaggtgagggtgtgagcctttcagatccctgggagaagagcgtaaggaacagcaagtgcacagatccagagaccagaatgaggagcaaaataagcaaaggagagtgctgtcaaagtggtgataaaggacagataatgtagtgccatgcaggccattctgaggggtttagcttttttttttttttttcgttacagaatctcactctgtcgcccagactttagtgcagtggcgcgatctcggctcactgcaacctccacctcccgggttcaggcgattctcctgccttggcctcccgagtaactgggattacaggcacccgccgccacgctcagctaatttttttgtatttttagtagagacgaggtttcaccatgttggccaggctggcctcgaacatctgaccttgtgaatcacccgcctcggcctcccaaaatgctggggttacaggcgtgagccaccgcgccaggctttttttttttttttttttttttttttgagacagagtctcgctttgttgctcattctggagtgcagtggcgcaatctccgcctcccagattcaagccattctcgtgcctcagcctcccaagtaactgggattataggcccatgccaccatgcccggctgatttttgtatttttagtagacacggggtttcgccgtgttggccaggctggtctggaactcctgaccccaagtgatccctcccaaagtgctgagattacaggcgtgagccgccatgcctggttggagggctttggcttttattaagtgaaccgtgaagccacagctagatttcgcgttgagattcaacttcaaaggatcactttggttgctgtgttgagaagaaactgtagggggcccaaaacagaatcaggaaaactggttaagaagctattataataatccatgggaaggatagcagtttggatcaggtagtattattactgatgatgagcagtggtccctagaaggcccttgggatttactgagaagttggatatggagaataaagagtcaagctggaccccacgtttttggcttagcagttataaagatacttattactgctcatgaatgggaaagactgggaagaaagggatgcaagggattctaggggtataagggagaggttagaatggtagaccatggagtgtaaactggatatggaggaagtgaagtcatggggagtgagagacagtgaaaaggtggttggatcattgacttgtgggtcctgttggggttgaagaattattggaattgggtaatagaaggagtgagatgcaaagataggaggtggtgcttagagagtaaaatggatgaaactgagatgaggaggtccgatgtattgataatgacaatagggccctgtctgatagaaaaacagtgtaaggcacaaatgtaatcttaggctttctagaaggtgcagtgataaaaatgggctgggtccggtggctcacgcctgtaatcccaacactttaggaggccaaggcaggtggatcacctgaggtcaggatttcaagaccagcctggccaacataatgaaaccccgtctctactaaaaatacaaaaaaattaactaggcatggtggcagacacctgtaatcccagctactcgggaggctgaggcaggagaatcgcttgaaccggggaggcggaggttgcagtgagctgaggtggcaccactgcactccagcctgagtgacagagcgagactcccatctcaaaaaaaaaaaaaaaaaaaagaatttactcaaagagaataaaaagaatccaggactgtagacaaacttctaaaatattttatagtttcttcaaaattaagtggttcaactggcatggcatagtactaattaaaggtgaactacagtagccaattggactagaatgaagcacagaatgcgagcttttgaagggattttggaagcagcaggttctacctcctaaatatcactgtgaatcatctttgtccttatcctgaagagaggtagtaaatacaaggtagtgggtaagagtgttgactttggaattgggaaagcctgggttttattttagttacatctctgcagcttcttaacggtgagcacttagcctctttaaacctcagtttcctaatcagtgaaatgggatcattatgaggtgaagccgagcacttagcatgtagaaagcgctcagagtgatgtcagagtctgtcttgtttcctcctacatatcatcaccaaaaatttgtttcatgaacatgcatttgaccgtgtgactctgagttaaaagctcagctttctccccacctgtagaaactttttaggatgactttatatatcctttggtgatctggccatcggctcttttggtccttacctcctgcagctcactcctacctccccgagatggggagatgaataggactccatgcctggggtgtttaacttgctgatccttctgccctttcaagactcagttcaaatgtcacctctgtgacaatgccacactcttcacatgctcctttctctggactagagcaatttgtgcatctcgttcattttcctctgctagactttgaattctgagatcattgattcatctatctctagcacctaacatattatttttaaaaaaagaattattgattactacggtctaacttttttttttttttgagacagagtctcattctgtcgcccaggctggagtgcagtggggcaatcctggctcactgcaacctctccctccctggtttgaacgattctatatctcagccacctgagtagctgggattaaagccactatgcttggctaatttttttttgtatttttagtagagatggggttttgccatgttggccaggctggttttgaactcctggcctcaagtgatccccccagcctttagcctcccagagtgctgggattacaggcgtgagccaccatgtgtggcctactataggctaactttaaaataacacatttcatactgtaaataagggggaaattctgtttaccttgtctggaatgttcatgtgtgtatctgacatgcctcgcactcccatgcccagccccaagctgaaaagcaccttcgccttctagaatcagcttagatctttctgggaacctttcctgattttttttttttttttcctgagacagaaaaagggctggaatgcagtggtacaatcatgactcactgcagcctcagtcttctgggctcaagtgatcctcccacctcagcctgtgagtagctgggactacaggcatgagctgccatcacacccagctaatttttaaatttttgtcatttttgtagagatgaggtttcaccatgttgcctcagctggtctggaactcttggactcaagcgatccacctgcctcagcctcccagtgtgctgggattacaagtgtgagctacagtgcctggccagcacagatttttatatacttgatatgctaatgaagtaaatgaagtggtcccatcactattttttttaaggttcttgttatgtcagtagctttataatcttgtaatcttccaggaagaaggccaaatgttgctaaaggcaaagtggcagaaacactgtacttatatttttaaccttgttcttttactagaattaacttagaatgtatctgttttacaaatttttctaacagaaatatgcctgctacctagggaaatattatatatgttttaaacattaatttaaaaacttgaactttgaattccttttcttttagcttgggatgtggtaatgccagccacactcctcagagccgtggccagatctcatcatatattatcaaaagcacatcagtgccgaagaatcggtcatctaatgttaaaaccacttaaggaatttgaaaatacaacatgcagcacactgacaatacgtcaaagcttggatttgttccttcctgataaaacagctagtggtttgaataagtctcagatcctggaaatgaaccaaaaaaagtcagataccagcatgctgtctccattaaatgctgctcgttgccaagatgaaaaggcacaccttccaaccatgaaatcctttggtactcacaggagagtgacccacaaaccaaatctgttgggttctaaatggtttataaaaatattaaagaggcatttctcatctgtatcaacggaaacatttgttccaaaacaagacttcccacaggtgaagagaccactaaaagcatccaggaccagacagccatccaggaccaaccttccagttctgtctgtgaacgaggtaaagtaggggtggccgtggctctcgtgcttagtgatcattgctcatgctaaaccagtgtgcgttgcaccccagccttaccgccaacgtaagagaactagcagtcactcagacttcttcatcaaggtctttgaagcctaataaatatccaaagggattcagaatcttaatttttaacaattaatgatacatataaaaacaaaatacaggtgataacacatgaaaatagagtttataaaagatttggttattggtctaaggaaactgaaaaagaggaccaatattaagtccagtctaagaatgggactgtaaaaaaaaataaaataaaaaaaaacaaactagaaattcttcatcaagttaaaaaaaattgtaactctgcagacagataagcctttattaggctgtggcagttgcatggggcggtgaaatgacacggtagggtggactccaaaagcagcaggagaggagggcccagcttttttatcctcttaaggtttaagggggtattttttattcatccttaaggggtttctgggaatttttctgctacaatttgcatttctccttcagtaacaacttaagggtcaagatcaagcccttgataacctttgtatcttgcataatacctagaactgtaccttgtacttaaatgtttataagaggatctttaatgccgatagtcatcaactttaaagatattttaaacttgatgaagacttctgaatctatcagaaaacaggttagaatgtctgtcttcaagtcttgattctgaaaagtagcccctgagcctgtttcattttggctgtgtttttattactgtgcagctgacaccccttggaaaggtatacatacatacctttactcatcctctgattctgaatctagcaatgaatgaatggtttttgtgttggattctggaatgctttcaattcttgtgtggttactctgaactcaggacgtgaaggatgaagtgttgtgcagctactgtttcccctttccttttgctggagctttggggtaacctgggaaattcagtatttaagtgtccgagatggcattaagtgtaaaaacctgaattcatggcagctccaaaaaagagaaagctcaactcactttgttcatttgtaacgtctagcagcacagtgcatcaggtttcttaggaagaagctgataggtcagagatgtccctaggctatttctttgggccatccttagacttggaagcaattttcctaaataccgtatctatttttctttagatttttttttctacttccttccaggaaagaatttgaagtagattttcaacattcaacatagtttcaaatgagataataaatactttcacatattagagcaaatagttgacatgaacagagaaatgttatgaagtacctgaaatgaataatctagttgaacattttgttttgagaagcgcagtaattaaaagaggaactcctcctgggatttagtgtttgttgtttattgttgtgggagagggcagagtaaaaacataaaaatatcttcagagaaataactttttccagcactgaaattaaggagttagttatttcatggattctgttataggagacattatgtaacatgatagacaatgacttcagttggagtttggcaagagcaagtcgcatgctgtctttctgaaagcacagggaaataatagaaaatcagatgtttctggctgggcggtggctcacagctgtaatcccaacactttgggaggcccaggcaggcgattacttgaggtcaggagttcgagaccagcctagccaatatggtgaaaccctgtctctacaaatatacaaaaattagccaggcgtagtggtgcacacctgtaatcccagcggctcgggaggctgaggcaggagaatctcttgaactcgggaggtggaggttgcagtgagctgagatcatgccactgcactccagcctgggtgacagagtgagactctgtctcaaaaaaagagaagaaaatcatgtttctaaagtggtctgagataatgtaattttggaacatcattttttgaagattttacttttcatagagaaagcagtcttggcatgactaggtaatatgtccccaggaccaaagactgactttcctctgcccgaaattgagggccactccatttttatacggccatcatagtggtaaaccctttataccactttataccatcaaaatggtaaaccctttataccattcttgactgagacaaggaaaagactctgctttgtgtcagaaagcatgtggactttattttgttcccatagttgcacccagctcatcttttcagctctgcagaacagcgtgcatctggagttggctgaatgaggtttcagtcaccctgtctgttggaattaaatctttacctggtctcattttcagagatcataatctgagatactcaacccacatccctttggcttacaattcctaaaagcaatagtggatccagtggcttatgcctataatttcagtgctttgggaggctgacacagaaagaccacttgaggccaggagttgaagaccagcctggcaacatagcaagactcccatttctaaaagacttggaaaaaaaaaaaaaaaaaagccgggcttgctggtgcgcagctgtagtcctagctactcaagaggctgaggtgggaggatcgcttgagctccagggttccaggctgcagtgagtcgtgactgcacctcgctccgtccagcctgggcgacagagtgaggccctgtcactaaacaaacaagaaaacaataatagcagtgcttcttgttaatgtccagtctttgaagagaacagcagaggatgggaacggcaggtctgagtggcatggagcccgacaccagggagaatgttttcaggctaatagcactgtgttacagaatcactggtggactgttaaccatttttttgaaaaatgaaatagaatagaaaataacagaatacattgctcatgataaacgtaaatactggtttgtgaagcttttgtggcaattggtgtgtaagcatatatgtgtatatgtactatgtttaatgatttataggttgtagtcagaaaaacttacaggataaagcgtgatcttggtaacgtaaaatgtatctgtgtttttatagctttaatctccaatcagtatgttacaggagaaaaggcatttttccttagtatgatctatctactcacagtacttctgacatcaaatatatggggacctcttcctcctcctaccagccagttctccaattctccagacactaacaaggtgtcctgcaattcagttcaattccagcactagccagagttagtgcagacgccagttagttaagctcagccccacaagactgccctcccagttgacacctgtgcttctgaccaaccagctctatgacaaccatcccctcttcaggtttgattatttgctagaatggcccacagaactcagggaatcattttatttatgtttactgggttttttatataaagtatgcaaatgaacaaccagatgtagaggtgcacagagtgaagtcaagaagggcctggaacttaggagcttctgttcctcatagaactgggctgtgccaccctcctggcacatggatgcattgatcaacccaggagttctccagaccccatcatctgggtgtttttaatggaggtttcattgtgtaagccatgattaatgattaactcaatctccagcccctctccgtccaccagaagttaagggtgaggctgaaagttctaagcttctaatcaaagtttggtctttctggtaaccaccccccatcctgaagctgtccaggacccactgagagtcacctcattaaaacaaaagatgttcccatcactcgtgaaattccaagggatttttagaagctctgtgttagtaactgaaggcaaagagcaaatactacaaccaaaaatgcccctgtcacttagaaaattacaggggtttttaggagtctgtactgggaaccaaggacaaagaccaaatgtaaatgtattatatcactatagaagcaacattgctgtaacacactaattttcttcagtaatacagtgtaaatgaaagtataatttttaaaaaaatgttctgatcagagcatgcgatgctcctaaaacaagaatcatatgtagatttctagccccatctgctggaacatgtcttctttggccagaaaaacaaaacatactaaaatacagtggtttggggtttttgctttttgggttttttaaaacattttgaagtagaaaagccctgaatatcataactattatcggttggtttgacacatctatttaacaggaaggtgtagatccccatcctgaaacccaaaatatgctttacatatatatgtagctaatgcttaataaggattcactgtaaaaatccagaaaaggatgtataaaaatgaaagctgctcagaaaacaacagcatctttaataaagaaaaaaaagcagacaagacattccatgattctctttccttttaccaaataggctaaaataaaaaaagcaaagaaaacaaaaccaaaacaaagtgtctaaaacgtcaagttcatctattaatagaagaaacccacaactaagactcagagctaagaagtttaaggagaatacagaaagtagtgtagcaaaccatataagctgagtgacattggatagaactttgagccaaactaaatgggagatcccaagagaaggaaaggggacagttgacagtctggaaaacctacaacaaagatccttaggatggccaagtgaaaacagattgtgtttaaagatttattcataatttatttggagcttagaatatattttctcataaaaatagtgattgacttgtcctgtccttgagagttgaaaatagtacacattctcaatttgccgttagtgtcggaatattcacataatttgggataccagattgcccaaaactcagttctgaatatattgagccttttatttttatctccaagtggcggtttttaaaactgaccttttaccttgatttaaaataatagtgcctggctgggcatggtggctcacgcctgtaatcccagcacttgaggccgaggtgggcagattaccagaggtcaggagtttgagaccagcctggccaacatgaagaaacaccgtctctactaaaaatacaaaaattagccaggtgtggtggtgcatgcctgtaatcctagctactcgggaggttgaggcgggataatcacttgaatccagggggtagaggttgcagtgagctgagatcgcaccactgccctcacgcctgggcgacagaggaagactccgtctcaaaaaataataaataggccgggtgcggtcactgatgcctgtaatcccagcactgtgggaggccgaggcgggaggatcagatgaggtcgggagtttgaggccagcctgaccaacatggagaaaccccgtctctactaaaaatacaaaaattagctgggcgtggtggcgcatgcctgtgatcccagcaactcgagaggctgcggcaggagaatcgcttgaaccggggaggcagaggttgtgatgagccaagattgcaccattgcactccagcctgggcaacaagagtgaaactgtctcaaaaatataataataataaagtaaaaaacagaataaaataataatgcctgccaccgccattaacagaccttgtactctaatgccaagctgtatatgggacagttgccagcatgtcttcactggcactataaaatatagccaagaagataggctctgagagtaagaagtctgtgttggttaggagtaattttgtcctggctctctggtataaagctctcaaatgtaaatccgggtgggataatggactcagctctgtctgcaacatgccactgtgcagagaagcactctcatgcataagctttttatgctgtaaactatagtagctgaaattaaatgccactttttcagaggtgaattaatggagagcctggtgaaattcaaagctttttgatgtataaaacttgataaatggaactattccatcaataggcgaagtataacaacctgtctacatagatagtatgtaatttctgcacaggtctctgtttagttaatacatcactgtatatcaatctagaatcttgctccaataaaggaacataaagttgtgttttggttttgtttttgtttgaaacggagtcttgctgtgtcgcccagagtgcagtggtgcaattttggctcactgcaacctcggcctcctggattcaagggattctcctgccttggcctcccaagtagctgggattacaggtgtgtgccaccacgcctggctaatttttgtatttttaatagagccagggtttcaccacgttgaccaggctcgtctcgaactcctgacctcaagtgatccatccgcctcagcctcccaaagttctgggattacagacgtgagtcattgggccttgccaaggtttttgggttttttttggaaaaaaaaaaaaaagtagtacacattcttagtgcagatgggcttggccagtaccacatgatggtgaagcagacgtgagacaacagggagaggcagggacagtgtgggctggagaccctgggcccccctactctatcctagtccattattatagccagatcttccactcggtcagatgatgatggaaatctggattttgtgtgaaatctctcagtttattgttgacaagtcaatttgaattttagaaacgtgatgtaggtcaactcttgagttggatggttctccgagctgccagtttacaactccgattctagcaaaagagacagcctctgccattttcagtacagctacaggaagatccttcagtggactagcttgtgacctgcttatctcctttttgtgcctcttgctcttcccacttcagcccaaactaagcacatgagctgtagccatcacagaagtaattctgacatccaacctaatgtactgtgatttcacctagcaagcttgagtgaatttgccaggtcttgcagagtggagcctacccgatgtctcgcctgatgccccttgctaggattcctttctttcagctggccgaatctttacacacatcgtacatcagctagttttaactccatgaagccttaaaaagaactagtgctcacaggtctaaaccttaagcacgtgcctgttccctgtactctggtaactcctgatacatttttatttgtatatccccgtgttcctactttcatatgtgactatgggaattagctaatttggaaggaattagcagttatctgctcataattagggtactacatccatttatccccacattccccagtaatttcagcttgtctgactttttttctaattggattagtctcattttgtttatgagtagatactttattgattttggatttttcagtttgcatggatcctcaggttctctgttattcctctacctttaaaccacgcatcagagctgtggaacagattgaggaagggcaaatggggtcaggccatttcatgagaaagagccaggagatacagaatggaggtgggaggaaggaatgaattaatatatacttctctagaatttcataccaggaatatacagaatgggaaagaattggggagctgagaggagtaaatcctaagaataaatgttgatttagtgactcataaacttgttttggccaactagaatctaacaactactgaacagttgtgttagccacagtcctgagcactttgtttattagcttatttaaactttacaacaaccccataaagtaggcattattgttattctgatactcttttaaaattgtaaccaacttctgtgcctaaaatcttaactcttatgccaatagctttcaaactttattgaccacatcttatagtgagaaatatatttaacattttacatacatagcgacctagagtagatacatagatacatgtaagtgacagaaaacttcataaaatagcatttcctgtgaataatgcactgtaatattttctatttagttttattaaaaaagctgttttgggccaactaaattggtatcagaactcactaatgtgttgtgacttacagtttgaaaaaacacagcattgagccatagtgcttaccatctgtattttatatagacacaagatgactttcctcatgtgtgcaaaggcaagatggggcatgagacaaagtacaaaccaaaccaagacacatgctcagatttacagacctttttgttaaatgttaaccagtgtaaaaatactgtaattcctttggggatttaaaggaatctgcctgtacaagagtagttacaaattaggaaatgacctcaaatactaatgttgctttgaaaaagagtcatggaaactcagggttggagagacttaaacattccatccagtcacccatgtgatgccttaatcatctctattttgcattcaatctgtgcttgagatactaccagttgagtgtggcttccctttcagaataatccattccatctttttgcctggcgggagggagcaagttcttttcaagattgagctgaaatttgcctcccagtaacttcattctcttcatcttcatcccatcccttgtatcacccttggagatgtttgaagaaaattctggagttctagctttgcagaatggagtccagtagggtgctcagcagccgtcacagatgcttcagcctcttggtaacccatgttatgctcatttccctggaacaggacctaatgcactgcacagcatttgcaacggcagatgagtatcatctgggaaatctgtctcaagatctggcctcccacggatatgttgaagtaacaagcttgcctagaggtacttcttcttgaacctggggccaagtatgttaaaatgtattggataattttcctatgatactatcttaagtatgtatttgtttgcaattcattttcttttgaaaggattgtatcataaaagtggatgttgaatctctttataaagatgacaaagttaagaattaaaatgtatttacagagaactcattaaaatcagtatgatttattaagattatttataggatcattattacttgaggtggtcagaggtcatactacttcatttctagcacattaagaagttattttagtttgtgtgtgtctgtgtgtgttttgtgttttttttttttttgttttttgggatggagtttcactcttgttgcccaggctggagtgcaatggcgcgatctcagctcactacaacttccgcctcccaggttcaagcgattttcctgcctcagcctccggagtagctaggattacaggcatgcgccaccacacctggctaatttttgtatttttagtagagatggtgtttctccatgttggtcaggctggcctcgaactcccaacctcatctaatcctcccgcctcggcctcccaaagtgctgggattacaggtttgagccaccacacccagcccgttattttagtcttatagaagaaccatgaagttgatagacatggggagagcctttaaaaaaaaaatttaccagctcaatctaatactttaaaacaattagttagccgggtgcagtagctcacgcctgtaattgcagcactttgggaggccgaggcgggcagatcacctgaggttgggagtttgagaccaacctgaccaacatagagaaacccctgtctctactaaaaatacaaataataataataataaaacgattagttagaagataaaaatgaaaaagaagaaaattaaaatgaacttaattgaggatttttatggtgaaatcaggaaggattcttgagaaatggcttgctttacattaattaaaaataatttaggccagccatggtggctcaggcctgtaatcccagcactttgggaggctgaggtgggtggatcatttgaggtcaggagttcgagaccagcctggccaacatggtgaaaccccatctctactaaaaatacaaaaattagccaggtatggtggcacgagcctgtagtcccagctacttgggagactgagacacaagaattgcttgaacctggagggtggaggttgcagtgagctgagatcatgccactgcactccaacctgggcgacagagtgagactctgtcttaaaaaataaataaataggccgggcgtgatgcctcatacctgtaatcctgcactctgggagactgagacaggcagatcacctgaggtcaggagtttcagaccagcctgtccaacatggtgaaaccccacctttactaaaaatacaaaaattagctgggcgtggtggtacgtgcctgtaatcccagctactcaggaggctgaggcaggacaatcacttgaacctgggaggtggaggttgcaatgagccaagatcgtgccactgcactccagcctgggtgacagagcgagactctgtctcaaaaataaataagttacttagaacattttgataaacttttacagtgaaactcaggatagctcaatacccagaacatttattaatttacctaagagtagcaaaaataggttgaaagccttcctataacagtggaaattcttaagactcaatcccatagaagatagttgaaatatcattgtgataatccaaacagaccgtttgtgtgattaggtgacaaaaacaagcatagttgacttagaaagacagagctatgtctagagccccttggtatgaaaatttgcctggaggtattgttggctgatgctgaaggctgccagctgtgtggtctgtgcttcacagaattgcaggcttcactgccctgggttgtttcagtcgattttattttgcttttggctgtgtaggcaaactctgtcctatgtaggatgtagtaattaacaatttagaaaaaaaaaaaaaatcacagttttggtctgtgtctgaattgcccatcacccagcctttaccagaaatttctgaagctttgaggatcctaattttatgttaattccgttaagacatacaaccttttgcaaattaatagtatattttttaattgatatattaacattggttgtaatttatattatggaatatatgcttatgataaatatcactatactaatatataaagcaacttcttatgatgaatattggtatattagtatatgttttaacaatacttaggccaggccccgtggctcatgcttgtaatgcactttgggaggccaaggcaggcagatggcttgagctgaggagttcacgaccagcctgggcaacatagtgagacctcatctctacaaaacataaacaaaaacttagccaggtgcggtggcacatgcctgtagtctaagctacttgggaggctgaggtgggtggggcgggggggggtcccttgagttcaggaggttgaggctgcattgagctgagatcatggcactgcgcttcagcctgggagacagagcaagaccctgtctcaaaaaaaacaaacaaacaaaaaaaaaactttttttttaaatagttgcaggtggctgcagtggtagcccctgtagtgattaaccttgaaatcacatatgttttgaagtggtcagtatctttatttctgtgtattttctattgccctactttttatactttaaaattcagcaggagtagtagtttgggaatgttaaaattgcattattaatgaaatggtatttataggaagagaatatattaatacttcttcaaattttatttttaattttgtagaaagaagtttaattcttgacacttagttgtatggaacctaagactttattaattatctggactagtgattattgaatcaaaatgggcatgaatgagctctaatattaatatcacaggttgttgaatgttttataaaagtaattgctgatctttttttggtggtcgtatttgcatttttatatattaaatcctttcagaggccttagtagaaagatggtgattgtgttacagagcactccatggtatataaagaaatgatcttaagtactttattacagtgtttataggtgactcttacaacttgtgttaccttgacatagcttttttgttcgtttattttaaatcacagatgcagcaaatattttggtgatgggtgtggaaaattctgcaaaagaaggtgatcctggaacaatattcttcttcaggtaagacaggaaagaaaccccattaggtgatgatgggtttgggtcaagtaattgtggtctttaaaggtgcaggcatacctttcttaacagtaaatgtgttcaaaatgtatttgtgatttaaatttatcatttaattcttatttaatctaggagagtttgtcacttttaggaattctctggtaaaccctcttataaagtaaagaatatttcaaacaagtgaatgatcttccccggggtgtctttctttgtaaattcggattttcatggactaaatttctggaaagcagccaatttcccattcatctttagtgccccttgtcagactcctgccccagggaaactcccgctacctccctgctgtctcttcttgccattttcttttttttctcccttcccctttggtagctctttaaagttttagcttacctctccagaggttttagactaggagactcacatacacacttattccttttatctaaaggccgactcaatactaaatactccacagtagctgcctgggaatgataacatgatagaaccgtgtgaaataatctcatttatcctcagcacaccgatgaaggtctattttgcacctgaggaaactgagggtcatagggattgagttacccatagtcatgagactaatacgtgacagaacagaaacacatggaccatctgtaggaatccaaagttgagtaaagttcttgtggtcataatccttatagttgatgataagtggaagttcttttttcctttcaatgcctaccttccttttgaccccatctttagagagaatcaagattccaacatttaattcaagtagagtaatagcatccctgttgttccgagtgaggaatttagatttgtgagggactctacatcagcactgtctagcagaaatacagtgcaagcctcggctgggcacggtggcttatgcctgtaatcccagcactttgggaggctgaggcaggcagatcacaaggtcaggagtttgagaccagcctggccaacatggtgaaaccctgtctctactaaaaatacaaaaaattagccaggcacatggtggagggtgcctgtaatcccagctactcaggaggctgaggcaggagattcacttgaatgcgggaggcgatggttgtggtcagctgagatcgtgccattgcactccagcctagtgacagagtgagactctgcctcaaagaaaaaaaaaaaaagaaagaaagaaatataatgcaagcctcatatgtaatgatacattttccagtaaccacattttaaatatttttaaaaagataaaattaattttgaacaacacaaatatgtttcttaacatattaacatgaaattaatttaacaatgtattttattcaacccagcatatctaaaatattatcatttcaacatgtaattaataatgatattttttcacttgtcatactaagtctttgaattttgctgtgtattgtacacttacagcgcatctcagtttgcaccaggcatgtttcaagcactcaatagccacatgtggcctctgagtaccacattgcacagcacagtgcattcctctggttggaggaatatgcagttcaccagacctctcttctgcctggaagggattctctgaactgatactgtggctgtggcttgaaatacctctcaaatccgtatcctgaaaccttatccctgcctattgtaacagcttattgtctccctgcctgcctgctcacccaccaccagtctgtttgtctattgtaagcagggtcattcttcagtggccatttctgaccactacactctcctgcctaaatttccacggactatgaacaaattctctatcactgcataaagttcccttctggattgtcccctgcttgcctctttatcctgcttgcccactgcttgaccacatctgcagccacgcagctactggctgtttattctgagatgctgctctgctccgtcccacctcctctctgagcctgtgtgtcccctctgctatgttgtctcctcttgttttctcatttggctgcctctgctagtcctttagcaaaggggtccctctggtgtacatctcatggtatactctgcatactcttgtagcactgatcacacactattgtaattggtggtctaagtgtcagtcccagtcttttctagattgaggataggaatgaaatcatacttatgtttctatcacaaatactaagcatggacccacacatatactaagtactttagaaatgtttcaagaataacgtggagccattaatatttttacctttcttttatttcctcctttccttcctccagtgcactgaccctgagctatagctcctgtttttatttactacctgaaacagcttcaacacgtcaaacttgagaaatcaaaacaaatgcattcgtagttttagaccctaaataatgttaaagccataatcggattcagagggcctcctgtggtgtcactgtagttctgttccaagcactgtgagcgtggggagcattattccatagaggcctttaaccatctgatgcttaaattaaccaccatctctttattccacaaaaatccaggcatagccctttattccttgcacatagtagagtctgcctaatgagagctaagacaaggtctcaaaaaatttccttattctgatttctgtggatcagaattgaaccaggtatgaaagagtctacatacgtgaagttatatagtattacaataatggctatttgtttggcaaaccatgtgagaaatcataaattttgaggaggtcaggttttatcaagaattttattttagctcttattgtaggaagttcacctaaggaccataatatcaaattagtaagtaccatcatattttgaaaaatcgcatcctgtatacattctagaagttacatggttttatatacgaccctaaagaatgtattccatctgtatcttagttgtttcttttatttttttaaatcagggaaggagctgctgtgttttggaatgtgaaagacaaaactgtaagtgtaaataaaaatgtgaaaatataaaaatttagttttgtgagaatgaattgttaattagcacatactgaaacattagaagggaaattaatagattatgcacaacttatttgctctgcattacatgatacttatcagtttcatcttccaaaatatattgtattttgggttaagatttcctgctttttcctttctctagacacacactaatttgtggagaatcagaaccatcctaactatactgcagacagaagtactgtagactttgcatgttgtactatacaaaatgtatgcagttaattggaagctggttgcattgagtgttcttttaagtcaagttgtctagaacttactactcatgggaaataattttttcaagatccaaatcaagatttgtttaatacaaccattttagaggcaaattggtaatctacattaaagctttatatttaacccagtaattttacacctagaaatttatccaaaggaaataatcataactattcgtgatgatttttgtacaaaaatgttcatcagagcaatatttataatggcaaaaattagaaattaccaaaatacacaataatagtttgttaaatcatccatatactacagatatactatagatccccttagaaatcatgtaaaaaaatatctatttctgggagattgcctatatatataatacagttacattaaaagagcagattatacggccaggcatggtggctcacgcctgtaatcccagcactttgggagaccaaggccggcaggtatcttgaggccaggagttcgagaccagcctggccaacatggtgaaccccatgtctactaaaaatacaaaaattagctgggcgtggtggtgcacacctgtaatcccagctactcgggtagctgaggcacaagaatcgcttaaaccttggaggcagaggttgcagtgagccaaggtcagaccattgcactccagcctgggagacagaggcatactcttgtcttcaaaaaaaaaaaaaagcgggttacaaaatataaccaatataatctcagaactggttaaaaaacatgctttatacaatcccaattttacgaaaaggaaacacacacagtaggtggtcgggaagggaacttagagaaaagaaaatataaatgaccaataaatttaagaaaatacaagttggctatttgaagttgcaaagatgtaaaaggctgataaaccccatttcttaagagtagtttcataaatgttgagattctacatttggaaaaactactttggagagcaggctagcaatattataagtgtgggccaggtgtggtaactcatacctgtaatcgtatcactttgggagtctggggtgggaggatcacttaagctcaggagttccagaccagcctgaacaacacagtgagatcccatctctacaaaaagtttttagaagttagccaggtgtggtagtgtgtacctgtagtcccagctacttgggaggctaaggcagggggatcgctcgaacccaggagtttgaggctgcaatgagctatgattgcatcactgcactccagcctgggtgacaaggtgagaccctgtctgttacatatatacatattgtgtaagtccacatatcttttgatctagcaattcctaaagaagtattcccacaaagccatgaagacctttgcacaagtgtggcacatcgcaacattgtaatggagagtagaaaaaattccccatggaggacacacctaggttggttaaataaattgcagttcgtctgtaaaggaaaatagtgttgaaaatgtcatgtgcataatatgatcctattttacataaaaagcagcataaatatgtacatatatacacataaaaagtctggaaggatatgcaccaagtttaatcatggttgcctctggggattaggatttcagtacagaagagagaaagagatgatcacctcccacacctgtgtggcttaattttttattagtatgttgggctttactttttattttttatttatttatttttttgagatagggtcttgctctgtcacaccggctgacattggctcactgcaaccgccacctcccaggctcaagccagcctctcaggtagctgggactacaggtgtacatcaccacacccagataatttttgtatttttttgtagagacaggattttgccacgttgcccaggctggtcttgaacttttgagctcaaggatccacccgcctctgcctcccaaaatgctgggattattaaagagatttaaagaatacaaattataatattactagtgattttccttgggttgtgggataatgataaccttgattttcttctccattctcatctgtgttttccaaatgtaaaaacaaatgaacatgtcatcctgattactttaatatcacaatggatttgatttgccttttccttaaaaacatgcaacagaaataatgcctgtaagtgtaatgaagactgttataagcattaaaatcataacatacttgaactgagggagtcagttatgatttcagattaatcttccttttcttctagatgaagcatgtgatgaaagttctagaaaaacatgaaattcagccctatgaaatcgcactggtacactgggaaaatgaagaacttaactacataaaaatagagtaagcaacttttcatcaaatttatgaaaggggcacttggaataaattaggtaaagcaatagaggagacaaattattatgcatatggaaactttttttttttttttgagacggagtctcactctgtcgcccaggatggagtgcagtggcacaatctcggctcactgcaacctctgcctcccgggttcaagcaattctcctgcctcagcctcctgagtaagtgggactacaggtgtgcaccaccacgcccagctaattttttgtatttttagtagagacagggtttcaccatgttggccaggatggtctggatctcgacctggtgatccgcccacctcagcctctcaaagtgctgggattacaggcgtgagccactggacctggcctggaaacttacttttaagaaaaaagtggccaggcgtggtagctcacacctgtaatcccagcactttgggaggctgaggcaggtggattacctgaggtcaggagttcaggaccagcctggccaacatggtgaaaccccatctctactaaaaaatacaaaaattagctggttatggtggcgggtgcttgtaatcccagctactcgggaggctgagacaggagaattgcttgaacctgggaggcggaggttgcagtgagccgagatcacgccattgcactccagccagggtgacaagagtgaaactccgtctcaaaaaaaaagaggaaaaagattactggtacaaatacaaagtctaaaccatataataaatattagaagataaacataattttttgaacttctcaggctatccacaagttaaaacaagtcagtagtatagccccaaaatggaaatgttaagtttctaatcagcctaatccaataaaatagtatgcatttatcaaatgaacctatcaaattattccagtaaatttttctcttaatccagttttttcctattgattttggggggtgggggtatgaaaaggaagtatagtgaggggtcaatctaagagacccacttgtagaagtgtgggtgctggaagaagtgggacctggtgtaccagtttcactaagataaatgggtaggcaacagactagctgattttcctgactcagccagagggaaaaaatgaagagatgttagggccgagacagaggcagtatgaacaagatggtagtgtctttttcctcatggagttacctgtctagtgaaatatgagtctttgcaggttcttaagaaaggtagtgttagccagatttggtggctcacacctgtaatctcagcactttgggaggccagggtgggaggatcaactgagtcaggagttcaagacagcttggccaacatggcgaaaccccatctctactaaaaatacaaaaattacccgggcatagtggcgagtgtctgtgatcccagctacttgggaggcggaggcggaggcagagaattgcttgaacctgggaggcagaggttgccatgacctgagatcgcaccactgcactccagcctgtgcaacagagtgagactctgtctcaaaaaaaaaaaaaaagcgttaaaagcagagctttgggaagacttggaagagagacagagactagctatagaaagaccagatggggataagagctgagtaatcagcgctcaccaccaatagggccagtcacggttttctaagtaagtgccttccatgtattatttcatttaatcctggggaaaaccctataattgcagctaactggctttccgatgagatttattgaatcctgtcttgccaaagggcacctgactgtgagtcagcctgagcccagtggtggctgcagtcagaggtaaggatataaacctgagagagacagcaaatgagcagcctgtagttttattatctttagtagttactcagcccttggcctgcagatacagctcctgtgaatcccctttctgtgttctattaggtttacattaaaatggcaaaaaccgcgattacttttgcaccaaccaaatacttccatatccaactactgctagacccttgtgtgtgtgtgtgtgtacgcttatccacacacacacacacacgttactgtacagtctgtgaggagtaaaatcctcagtgcttaggatcccagagtcagttattttgtttcgtcagaaagactgtcctggctgccacctacatggttattatgtgagttctgccatgattccagggatctgctcagctctgtggcatgggcccagtttactcataaagcatcttgtgaccaagcacagtggctcatgcctgtaatcccaacactttgagaggccaaggcgggcagatcacttgaggtcaggagttcaagaccagcctggccaacatggtgaagccctgtctgtactacaaatataaaaattagctggatgtggtggtgcactcctgtaatcccagctactcaggaggctgaggcaggagaatcgctggaacccaggaggcggaggttgcagtgagcgaagatcacgccactacactccagtctgggtgacagagcaagactccgtctcaaaaaaaaagacctcttgtgactgctgtctttgctttccttcctccatctgaggctgtcatagcagatgccgccctccatcaggccccttgtccccctccctttggccgtcacttcttgtctgacatcttttgtgaaggtttaccctgtcttttttccatttgcttgtgatgtttatattcacacattccgctcttcccctgtcccctgtctaggattctccacagtcacatactcatttttcacaacttccttgcctccctccccaaccccatcatgtcagtgtgattttagattacactccatatatagttttatatgcagcattttttcacatagaaatttactgtgaacgttctcctttttattaactatccttccaaaacacacttttaagtttttcttgtgtggagtgactattactgagccaacccctactgaacatttggtttatttcctaattttttactcttaaacactgaccttttttttttttttggagacagagtcttgctcagtctcccaggctggagtgcagtggcgtgatttcggcttactgcaagctccgcctcccgggttcactccattctcctgcctcagcctcccgagtagctgggactacaggcgcccgccaccacacccggctaattttattttgtgttttgagtagagacggggtttcaccatgttagccaggatggtctcaatctcctgacctcgtgatccacctgcctcggcctcccggagtgctggggttacaggcgtgagccaccgtgcccagccaacactgaccatttttttaaaagttttcagctgggcaaggtggctcgcacctgtagtcgcaccactttgggaggccgaggtgggtggatcatttgaggtcaggaattcaagaccagcctggccaacatggtgaaactctatctctattaaaaatacaaaaaaaattagctgggtgtggttacgcatgcctgtaatcccagctactagggaggctgaggcaggagaatcgcttgaacctaggagactgaggttgcagtgagctgagatcgcaccactgcactctagcctgggcggcagagtgagactgtctcaaaaaaaaaaaaaaaagttttcttgtatacaaatttttctttgcatcttagattatttccttaggataaactcctagaaagggaattacctggaccaaaggatatgagaacatttgtaacactcttgatacaaattgtcaaaatgacctccagaaagatgatatggtgtctttttcaaaggaaaagttaaagtgctttttaagatttagaaggtattatctttttgcttttcacaggggacagtcaaaacttcacaggggggaaatcaagttaaattcagagctggatttagatgatgccattctagagaagtttgctttctccaatgctctatgcctttctggtaagttactactgcttatgggatagggtactacagttgtcatttcactgagggaagtttaaatagtcacgattttggtatattttcagaatactcaacaaagccttagcattccttttcctttttttccctccatcagaaaaaatatctagtataaaagatagtactgtgctgaagttactcattccttattaattgtattaataaagcttaacctctccaaaagtattttttagatgatgattatattagcctttgtttttttctcttctctctatgcgattgttattcttagatagtctctaatccagacagagaagcccagccttgtgtgactgggcacaggtcccagtgtagaaaaacatactctagtgttccataggaatgggacccagagtcacagtggctataagtttgttctgaaagatccacatcccgaataaaactatacaagttctttaagaatttcttttgccagcagtctaccttaggtggctgctgcagcgtcctgtccatcccactctgaggggcttcggagatttctgaggtttactcttagtcctgaggagtgaaggggaggccaggaaagtcttagtcgcgccctatctgcagagctacccatggtatcaaggtgtaccctaccctcctcagtttccaagatgtaatactagaaaatcaagagttctactaaatgtagctttggtcttccaatagggcatggaaagcgattcagtttcctctatccactttaattctgtcctttatgataattaactattcttaaattatattttcaaggttttagtactttttcttaaactattactgaaatagtagtgaagatgctgtgcaattatgtattttatatacatgtgaatatgatgataaagaaatgttccattattaatttttttcccagtaaaactggcaatttgggaagcatcactggataaatttattgaatctattcagtcaattcctgaggtaattatatcaattttatgcttattcaaggattgatttttatatgtaaaaaatatgaatttcccaatataacaatatatagctatccatcagtatccatgggagatttgttccaagaccccactggataccagaatctaccagtgtccaaatccctgatataaaatggtatatatttgcatataacctatgcatatcctcatgtatactttcaaccatctctagattacctaaaatacctaatataatgtaaatactatgtaaatagttgttatactgtattatttaggaaataataacaagaaaaaacagtttgtacatgttcggtacagatgcaaccattcttttttctcaaaatactgtcaatttgcagttggttgaatctgcagttgcagaacttatagagggccgattgtttaggagtacaacaacattattacaaacaataagaaaactacagtaaacttaagaactcccagttacatataaaatgacaaattaagaaacttcatattgattactttttactttttaaaacttcaaattgtttcctctgttggtgcagtattttttttttaatattaatataattgaaatggggtctggccatgttgcccaggctggtcttgaactcctgggctcaagcgatcctcctgcctcggcctcccaaagttctagcattacaggccacgagccaccatgcccgtcagttgcagtatttttaatgtaactgaattaaagaaaaaagtgaaatgtttctctctgagaatggaaattatgaccacttttcctgatttaagaaagtgttttgctaaattatgagaaaaatagtggtatgaaaaatacatataaagttatattgaaatttcagtatacattaaaaatcatcatattgtaattaactgtgtctttattgtgaaagagtaatctaattatacttcggaaaggaggccctgcttttctactaagagattaggaatgtatatatcattgaaaatgctgatgagaagggaaatgaaaaaagagaatatacaatttctacctaataaaattatgaaatttcaaggtgagttaagacattaatctgggagacagccatcctaaaaaatatttacataggatccaaattatgccacttcagattttgccctgttgacctaatgcttattagaaagagagatacatggttttttggtttttccgattccctctcaactaggctttaaaagctgggaagaaagtgaaactatctcatgaagaagttatgcagaaaatcggtgaactctttgctctaaggtaaaagttttctctctaaataaaatatttcatatatttaacaatctcaagaaaacattcccatagttctgtggtgaagagcaaacatttacacgtttatgggaactgtagctgttttcatttcattgattataagcagggagaactcttacccattagaagtagttgggctgtgttaagactgtactgaaagaaatcacgcatgtgcaaaagagatcacgattcatctacattaaacccacattaaggagcacagtaggtgttctttgaaggtagaaagacatattcctgaatttggttaatgggaattctctgtaaaaatatatcactgcatcataatgctaaataggcttaattgctacagaaaagtttctttgaatctgagacaccaagatgccactggagagaaaaactgctgccagttaaactatgacaatactttttttatcagaggattaaaattttacacttactgaaatatcttttaatcttagctggatataaattatatcacattccctcttgggcatatatgaaaaggaaagcataagaaaataaattatttaaggcaaagacaagtaagtctcaagtgccacctgtcagacaccattaattttaagatgcctcgagatgttaaaatgggaataactatgtctaaaaactgatgaatcattttaaataagtatctggaaaggttttcagcttttattattcttgtagttgtcccaggatttacggaatgaaacatcccggatgttggtgtttttctcacaggcagcattgtccagtttatcccttctagcatgtggaatgagttaccagagctcactgcaaatgttcacctaagacttgtttttccatattctccttagatgctctgcctggagagaagtgatacagtgtttcattgtctgtgtatctctcatagctcaggacctatagttcagggtaccaacaaaacttaaaaacccatccatcaggagcatcctgcagcatatctgaagcctcaaattctctgagaagtagggtagagagattcttctctcctgttctcttggtcatgcaagcagaaattgatgtagtgaattataatatccaaactgaatagttaggactaaatatacgtaggtttgtgaatagtttctataaaggcttacttttactatcctgtttccttacctgtacaataaaaatgcttatttgttaatataaggaatgtgatacatctgtgaaaataaacatggcagataatattagattaaaaaactaaatctaaatttatatagggtatgatcccatttgtgtaagcaaataaaaatattcatgtttatctttatatgcatacacatgtacatgtgtttgcttgcacacacatgcatgtatgaatacagaaagatctggaagtacacagcaaagtgtctctacaggcctgtccttggggagaataaaggatttaagtagtgtggtagcataagagagcctaccatttttctgaatccttctctaggatattttccttttttttttaatcgtgaacaggtatgtatgtgttactttttttttttttttttttaaacagggtcttgcttgtcacccagactagagtgcagtggcatgatcatagctcaccaaagccttgatctcctgggctcagggattcctcctgcctcaccctcctgggtagctgggaccacaggagtgctccaccacacccagctaattttaaaaataatttgtagagacagggtctcaaacccttgctcaagcaatcctcctccctaggcctcccaaagtgctgggattacaggtgtgagccaccacatcagtttatgtgtactttcataacttagatttttatttagttaaacatctaagtgtaaggccaggcacggtggctcacacctgtaatgccagcactttgggaggctgagacaggtggattgcttgaggctgggagctcgagaccagcctggctaacatgatgaaaccccatctctaccaaaaatacaaaaattagccaggaatggtggtgtgcgcctgtaatcccagcttcttgggaggctgaggcatgagaattggttgaacccaggaggcgaaggttgcagtggagccaggatcatgccactgcactccagcctgggcgacagagcaagattctgtctcaaaaaagaaaaaggctgggcacggtggctcacatctgtaatcccaacactttgggaggccgaggccagtggatcatctgaggtcaggagttcaagaccagcctgaccaacatggagaaaccccatctttactaaaaatacaaaattagccgggcgtggtggcacatgcctgtaatcctagctactcgggaggctgaggcaggagaattgcttgaacccaagaggtggaggttgtggtgagccaagatcgcgccaatacactccagcctgggcaacaagaacaaaactctgtctcagaaaaaaaagtaagcacagacttcttatattaaaatgtagaaattaagagagagagtgtgtatgtttatgcttgcttgtctagtgtttgcataaacactggaaggatacagcggaaactagaagggattactgatagggaaagatacagataagaataagagttaagatttatcaatttttacctgtttatatcttgatctgctcaggaggctgaggcaggaagatcacttgagcccaggagtttgaggctgcggtaagctatgattgtgtcactgcaccccaaactgggtgacatatgaagacattatctctaaaaaaattttttaaataaaaaacaaaaaagtgtggacatattaaattttttttttatttgagatggggtctcactatgttgcctaggctggagtacagtgtcacagtcttggctcactgcagcctctgcctccgaggttcacatgatcctcccacctcagcctcccaagtagctgggactacaggcatacaccaccacacctggctagttcttgtattttttgtagagatagggtttcgctgtgctgtccaggttggtcttgaactcacagactcgagcaatctgcccgccttggccttccaaagtgctgggattacaggcatgaaccaccatgcctggccctaaaatttttaataaaaaaagtttaggctgggaatggtggctcacacctgtaatcccagcactttgggaggctgaggtaggcagatcacgtgaggtcaggagttcgagaccagcctggccaacttggtaaaaccctttactaaaaatacaaaaaattagccaggtgtgatggtaggcacctgtaatcccagctacttgggaggctgaggcaggagaattgcttaaatctgggaggcagaggttgcagtgagctgagatcatgccattgtactccagcctgggtgacaagagtgactctgtctcaaaaaaaaaaaaaaaattgaaaacaaaatgagtttttttctgtgtacttcataaataatgttggtattaaagattgaattaatttggttcagaagtttgaaactcatttgtaaattttatttacatgtttgttggcagtattttgcaaaggtcagcattaacaaatgttttcagccacatgcaatgccacatgcctgtagttccagctacatgggaggctgaggcaggagaacagcttgagcccaggagttcagtttgcagtgagttgtgatcacaccactgcactccatcccgggtaacatagcaagaccctctctcttaccaaaaaaaaaaaagttttcataaagcactatgtaaatattaaatacaatagaaacaatgatttttaattcaagataaataaaaagttataattttcctttttaaaggcaccgtataaacttgagttcagacttcctgattactcctgatttctactgggacagagaaaacctggaaggactttacgataaaacgtgtcaattccttagcattggccgaagagttaaggtacgtattttgcacttctaatgagagaaaaagacacgttgtcgcctataagttgaatatgtttaactgcttgcagagaaatatcttgtttgacttccattcaaatctctttatatttccccttcttgtcctctgtacagtcacttcaattttttgtgtcaaaggatcttctgatattagctctacagactagataaggttggtgaataagatgagagtttggaagcctaatggtccatcagtaagttcttgtcaagtttcaagcaagagttcatgactgcttctgatctgtcatggtgacagtgagaatagaaataaatttaagaaagaatcatgtaagacaaatcaagtgatgggtaataagaggccatggagaagaaagaataaaggatgactgatgtttgcctggaggtgacaagtagaaaggtggaaaaacaataatgagaggtcagagaggggaggtgacagactaaatctaagatatgctgagattagagtagcaacaagatatccaattagctccgtcatgcaggcatttagaagggcagaagcaaagtcgggaaaagagacgtgtattaagaaatcccagcactttgggaggctgaggcggatggatcacctgaggttgggagtttgagaccagcctggccaacatggcgaaaccctgtctctactaaaaatacaaaaattagccaggcatggtggcattctcctatagtccgagctactcgagaggctgaggcaggagaatcacttgaacccaggaggtggaggttgcagtgagccaaggtcgagccagtgcactccagcctggatgacagagtgagactccgtctcaaaaaaaaaaaaaaaaaaaaagctgtagtgatggaggtagaccacatggggaaagagcatagaaaacagaaaattgacattagtacaatgtgtgcacatagttctgtgacattttgccacatctatagatccatgcaaccacatgatcaagacacaaaactgtgccaggtgcggtggctcatgcctgtaaccccagcactttgtgaggctagaggtgggcagatcacttgaggtcaagagttcgagacctgcctggccaatatggtaaaacgctgtctctactaaaaatacaaaaattagctgggtgtggtggcgcgtgcctgtagtcccagctactcgggaggctgaggcagcagaatcgcttgaacccaggaagtggaggttgcagtgagctgaggtcatgccattgcactccagcctgggcgttgcagcgagactccatctcaaaaaaaacaaaacaaaaagacacaaaactgttttatcacttttcctcatgctaccctgtatagtcacactgccctccccctacccggactgtccctaacccctggcagtgagtaatctcttctccatctccataattttgtcattttgaggatgttatatagatagtcatacagtatgtgactttttttttttttttttttttgagacggagtcttgctctgttgcccaggctggagtgcagtggctcaatcttggctcattgcaagctctgcctcccgggttcacgccattctcctgcctcagcctcctgagtaggtgggactacaggcacccgccaccaagcccagctaatttttttttgtatttttagtagagatggggtttcactgtgtttagccaggatggtctcgatctgtatgtgactttttaactggcttttttcacagagcataatgccctcaacttggatccatccaaattgttgcttgtatcaaagttcctgtcttcctgtggttactgaaacaattttttggtatttcattttgatgttactttttaatatatctcgttgcatagatatttagtagttgctctggttattacatcttacgtatataacttattacaatctactgatttcaacatcttgcagattaaatgaagtatagaatctttatttccctaatggatgattggatgcagaaaaaaaaaaagaattcttatttcttttatattcctttacccttccgtatttataattttcttaactattcttctgcagacatagaaaacttcatcagataatgttataatttttgcttcaaccatcaaacataatttagaaaactaagaaaagcaaagtctgttgtatgtgcccatgtttttattctttctgttcttttctccttctgatcttctaagatttcttttactgtttttttttttcaagaactttatttagccattcttttaaggtaagtctagtgagacaaattctcttagtttgtcttcatctgagagtgtattaattttctcttcattcttgcaggatattttcctagaaataggattctaggtagacagttttctttctttcagcacctgaaaaatgccatgccacttccttctgacctccatggtttctgacggaaatctgccataattctatgacatctacattttatcttttattatcatttcacaaggtctttgaggctctgttcacttcttttccagtatattttgtctctgttaagattgggtaatgtcctttgtttcatcttctagttgattgattccttcctctgttacattcgttctgctgcccaacattgagtttatttcatttattatatttttcagttctaaaatttccatgtttttttatttgtatcttctgtttctttgcagagacttcctgctttttcgtttgtttcaaatgtgttcagaattgcttgttgaatcatttttatgatggttgctctaacatcatctaataatacctaacctcagatacctcttgatattagtgtctactgattgtcttttctgattccctccaactaattttaatacctccagtttccctcattgcctcaagtgttctggcttgatatacaaggtccttcctattgtttctgtttttcaatcatatttcctaccaatccccacattcaccttgtatcacatcaaaaataagtgattagcctgggaaacacaatgagacctcatttctactaaccttttttttaaaaaaattagccaggtataatggcatgtgcctgtagtctcagctaccctgggaggttgaggcaggaggattgctttagcccaggagtttgaggctgcagtgagccatgatcacgccactacatcccagtctaggtgacagagtgagaccctgtctcaaaaaaataaaaataaaaaatacatgatttataatttcaaaaacctaccatggcttattgaatgctatgttccactttagtgtctacatttttttcctctaagctagacaccgccccttgcaaaaccacatcaaagctatctgcagttgtcactgatcttggcaccacctattcctctgtaggtgtcttccagcacaggacagtagagatcatcaccactcggcaagaaaaccaagctatgttgcttttagctgacacagaaagattgattagtgatggtttaggaatcaaattcagtggactccatcaacacagttttagataacagaggtgtaattagacaccgatttgacagtccaactgtctggtcaaacatgaaaagcactggactttcctggttgtcgactgtgcacacaggctgaagatccagaggaggaaagggagggatactaaaagctttatacagttgaggtatttcctgtggttgtgttagctattgctgtgtaacaaattaccccaaaacttggtggactgaaacaccacttactggctgggcacggtggctcacgcctgttaccccagcactttggtaggccaaggcaggcaggtcacatgaggccaggagttcaagaccagcctggccaacatggtgaaaccccataaattagtcgggcatggtggcatgcacctgtagtcccaagtagctgactctggaggctgaggcatgagaatcacttgaacccaggaggcagaggttggactgagctgagactgcaccactgcactccagcctgggtgacagagtgagactgtctcaaaaaataaaaagaaaaaagaaacaccacttactatttaagtttttgtgggtcaggaatcagtgcagcttagctgggtcctctgattctgtgtttctcacaaggctgcagtcatctcagagattcacttcctagttcactcgtggttattggctggatttggttcctctcaggctattagattgaggcctcagttcctcataagctgatgtccagaagcttctccatagagcatctcacaacatggcagtgtgcttcatcagatgaacaagtaggggagtgatatggtttagatctgtatccctgcccaaatcttgtgtcgaatggtaatgcccgtgttggaggtgggtcctggtgggggggtgactggatcatcagggtagatttctcatgagtggtttggcaccatccccttggtgctgttcttgtgacagtgagttctcgtgaggttgtttaaaagtgtgtagcacctgcatctccccttgttcgctcttcttcgcttctgccatgtaaggtacctgctctcccttcaccttccactatgattgtaagtttctggaggcttccccagaagccaagcacatgccagcatcatgcttcctgtagaacagtgcagaaccatgagccaattaggcctcttttctttataaattaccccgtctcaggtatttctttatagcagtgagagactggactaatacagagagcaagagagactgtcaggaagagaatgctagtaaaacagaagtcacagtcttttgcaacctaatcacagaagtgatttttgctgtgctctctttgttaaaaacaagttagggccaggcacagtggctcatgcttataatcctagccctttgggaggctgagatgggagggtcacttgaggccaggagttcaagaccagcctggtcaacatagtgatacccccgcccatctctttaaaaaaaaaaaaaaattaaaaagcaagttatggccagtcgtggtggctcacacctgtaatcccagcacttcgggaggccgaggtgagtggatcacctgaggtcaggagttcaaggccagcgtggctaacatggtgaaaccctgtctctactaaaaatacaaaaattagctgggcatggtggtggacgcctgtaatcccagtcacttgggaggctgaggcaggaaaatcgcttgaacctaaggggggcagaggttgcagtgagccaagatcagcctggatgaaacagcaaaacttcgtctcaagaaaaaaaaaggcaagttattagactgagcctacgctcgagggtaggggatgacacaaaagtgaacaccaggaggtggggagtctttgggtggcatcttagaaatctgcctaccacattggttttgaaaaagatggagaaaattctggaaacctactttatgacccctgacctacacgatcctcatactaccagttactttaatggttgccagcttcaggccatcaaagttggtggaaccattactgatctcattgtgttctgaattgtcagcaagccaaatgccgctggtctcagcttagacgagaacgttaatgccaaatttaatgatctgatcttttacctgggtggcattttttatctgtccatcctcagtattcaagatggaattactgaagtcaagtctgcaactgaggatacccacctgagtgaagagtaccttgacaactaagtggtcagctgtttcatggctgagatcaactgcagttatagaaaggacacccgttgagaacaagcaggctgcccaagccccttctgcctctactgaatgtgctcttcattctggtatcgaggccaatttgagattgagtccctccatgaaggggttcacatctatacctctgtgcacatgagcagctggaagaatcaaaagccaccccagtccctggcaccctacacctgtggagaaagccataagcaatgtcacccagacatatcaccagtccttcacgggtggctctatttatatccccaagatttaaaatctcttatagggccgggcatggtggctcacacctgtaatcccagcactttgggaggccaaggtgggaggatcgcttgaggccaggagttcaagaccagcctggccaacatggtgaaacctgtctctactaaaaatacaaaaattagccgggcctggtggtgcatgcctgtgatcccaggtacttgaggggctgaggcactagaatcacttgaacttgggaggcaaaggttccgatgagctgagattgcaccactgcactccagcctgggtgacagagtgagacttatctccaaaaaaataattaataaataagataaagtctcctacaggaagaactagaactgaatttatttacaggcagtatgatcttgtatgtagaagacctggaagaatctacaaagaagctaccagaataagtgagtttatcaaggtctcaagatcaatgtataaaaacggttatctttcgttatactgcaaatacacaattggaaaatgaaattttaaaacttctgtttatagtagcacccaaaacttgaattactcaggtttgaattgagtgattcaactattccagaataatattaattaatcaattggagtaatctgagcaagtaattgttctttatttcattccccagtctcactgtgggacatcttttttggtgttaagtcttctgcatgagttatgaagcatacctaaaaggtctcaaactacctttctcagagttttttctcagcatcccgaaggcagttcagactcgttggattatgtcaaggttatttagaaggggttgagagttcaccctgccttaggctcagcatagtgctggcattatacataatacaaaagaaaagtaagaattggtcctgcccttcagccagctttacagtcttctaagaaaacagatggaacaggccgggtgcggtggctcatgcctgtaatcccagcattttgggaggccaaggagggcggatcacaaggtcaggagatccagaccatcctggctaacatggtgagaccccgtctctactaaaaatacaaaaaaattagctgggcgtggtggcgggcgtctgtagtcccagctactcgggaggctgaggcaggagaatggcgtgaacccgggagggagagcttgcagtgagcggagattgtgccactgcagtccagcctgggtgacagagcaagactccgcctcaaaaaaaaaaaaaaatggaacaaagagtagcggggttttttattccccctcaaaaagtagaagaaagggtcttgagaaaataggggtgagtaggcataagacatgctaaaaagttgagtacagaggtccagatgcagagagcagttacacagtgtcatgggacagaaactagttggcagtggatccctcgctccattttctcacgtcagtatcccctgaagtcctgtcgctgaggcttctgtccccatgccaccttctccgtgaacacttgtttgttgtcgtgacttctaatcccaccttctcctggggattttcaaatgtctctctcatcccagtctcttgtctgccttccagacttttccagttgcccctcaatctcacagatcttcctcatttacatatctcgtcgcatccttttaaaaattgtgtgtaccattttccactagaatgtaagccccatgagatcggagaccatgattattttcttgcctgttcttggcaaaggcctcacatacagtatgtccgcaagaaatatttgtagaattagtcaatgattaaaatttcaaaatgaaacttttgaaattcccccccaccccagaaaatggtaaaccttttcagttctctatttcagctcatgggaggaccttctagcctcacctatctagtcattcaaccagaaacttaaaagtcatctgggtgtcctttttctccttcaccttccatatccagtcaaacaatctttttagttccctctaagtatcatggattcattagcaaacatttattgaaagcctgtatgataggccctaggctggtgaaacaggggaataccatactgacccgtcttcaagcccccaactattaatgttcatccacacagcccctcatcttcctttcccacctggacttgtctgattccttcttgactctctcagtctccagactggaccttttcccagtctctctgcaccctttggctgcaagacagacacatgtctatttcaccattctgtctcctctgcccagcgtagtacagtaaatgttaaaacaagtacttccagactgaacaaaggcctccccattacctgcagaatgaagttcagatattctagcatgacatgctactttcctactgctgcttaacagaaatttgtcatcttactgttctgtaggtcagaagtctggcatggcctaaagttaagatgttgattcctctttggagactgcgagtggaatccatttcctcaccttttccagtgactggaggccacccatattccttgctcatggccccctcctccatctagcaaaggcctgtggaatcctcatattgtatcattctgaactcttctgccccgcatttccacttttaaggacccttgtgattacattgggcttacccagataatctaggattatctcatcttaaggtcagctaattaataactttaatttcttatacaatcttaattctcctttgccatattatattcacaggttccaagaattaggacataaatctctttggggtgggggacatggttctgcctataccatatgtagtacacagtacctctcacaatctggtactaacttctttttttctgagatggagttcaatgccgtggtcttggctcactgcaaccaccgactcctgggttcaagtgattctcctgcctcagcctcccaaatagctgggattacaggtgcctgccaccacacccagctaatttttctatttttagtagagacggggtttcgctatgttggccatgctggtcttaaactgacctcaagtgatccgcctgccttggcctcccaaaatgctgagattacagatgggagccaccgcccccagctgacttaccttcttaacctcacttccaagcactttcttctaggttgtccacaatctagctatgcttgtctgtatgctgtttcctatgcttgacatgctcccttcatcccccaataaccccaccagcatcccaccttttcttcatgtccactgccttttaaagcctaattcacatttcctacctctgtgaagcctctcctggttttttctttgctcccttaatctgcatgctcgacgcgtacatgcctctatacctaaataaatagaaagcatgctgtggtaatagtgacttttttttgtgtgtgtgacggagtctcgctctgtcgcccaggctggagtgcagtggcgcgatcttggctcactgcaagctccacctcccggctgggttcacactattctcctgcctcagcctcctgactggctgggacaacaggggccgccacaacacccggataatttttttgtatttttagtagagatggggttttaccctgttagccaggatggtcttgatctcctgacctcgtgatcctcctgccccagcctcccgaagtgttgtgattataggcaagagccactgcacccggccatagggactcttgcttgcacatttcagtgtgttgtcagatgcttggattgaggttcgaagctaagttgttagacttaataatagactttgggacgtttaggagagttgtggtaatataaactaaaggaataaattggatgatgatgaggtagtggaggaagaaaatgttgcctgttttttggcccaagttgaaagaaaatgcaagaggctgaatcagtagtctgaagagagaagcaagcttaaggatgaacattaaagaccaagatcaagcagccaatagaaacagacattaagaaagggcaagaggaaaggaaaacagggaggggaaaggaagagggaagaggcatgctctacacatctatacagattagaaactacagggtgaccataacgcctggaaataggggcaaatggtggagtgtggttcagtcagttagtcctgtggttctgtgagtaagacagtttttttttggagacaggatctcactttggcacccaggctggagtgcagtggcatgatcttggctcattgcagccttgaccacctgagctcaagcaatcctcccacctcatccctgccaagtagctagaactacaggcacacaccaccatgcctggctaatttttttgtagagacagggtttcactgtgttgcccaggctggtctccaactcctgagctcaagtgcgcctcctgcctcagcctcccaaaatgctaggattacaggcataagccaccgagcccagcctagtaaggcagtttaatgctatgtgcaaaaatcgtaacatggtgcagttaacgcattccaatcaacccctgaacacgtacctgtgattcatctcttaatgttcactgaccaaacctgtaacttcagcatacccatgagacaaactgttttaaaattttgctttcaggatttccagtagcaagtgatatataaagatattaggtaggtatttaacagttatcacatccaggcctggcacggtggctcacgcctgtaatcccagcactttgggaggccgaggcgggcggatcacaaggtcaggagatcgagaccatcctggctaacatcatctctactaaaaatacaaaaattagccgggcgtggtggcgggcacctgtagtcccagctatttgggaggctgaggcaggagaatggcgtgatcccaggaggcagagcttgcagtgagccgagatccgccattacactccggcctgggcgacagagggagactccatcccaaaaaacaacaacaacaacaaaaaaaaaagttgtcacatccaaattttgaattcagggactttattttctttgaacccccacagccagcttgtttggaggcatcggaatgcagaactgttgcagttcagttgaaagcaatgccatctagtggtgtgtgtacagcaggtcaaatgttaagcgtagattttctagtagaaagtaaattatctttaggtcttgctaaaaaacattatgtttcaagtttgcctcttttaactgctaaaaagggcagctactaaaaactaggactcaaaaacctatttttagttcttccatcaaaatcttacaaatagaagagcttcagtatgcaaagtatttcttgcagttaaatttgtacattacaaaatgtctctggacggattcacaagaaactgataatgttggtggctgcctttggggagaggactgaggagcaggatttttcactgtatagctatagaatttttatgtgtatgaccgtattaaattgtttaaatacatgttactgaaatttttcttacataggtcatgaatgaaaaacttcagcactgcatggaactaacagatctaatgcggaatcacctgaatgagaagagggcactccgcttggagtggatgattgtcatcctcattaccatagaggtaagatggaaatgctctgtactatgatcagttaccatcttttcacaaatacaggggctatgctaataagatagtttgagatagaaaattattagcagaaaagaggctgactttgttatcattactaactctatttggaagtttcaaattactatttgcaaatgcattaaaagtaattcttgaaaaggttccactttttaaaatttgagagtagacctcaaggttctgcttttaaagacagcatttggaaaaagttctagctgtaaatttataatgtacagctcaacatcaaatcaagcacccgtacctccaattcataggttgccacgtgagaaagggcaaacatttaccttacttcaggagcatttctcattaatcacaatcttggaagtcattttagtttgtacccataatttgcccgtcatgaaataattctcactttctattctaaggtaatgtttgagctgggacgagtatttttctgatcaagtgataaccaaagtgtcactgcaagagatattcaagttctacaatcaaaaattaaatgttcggcccggcgcggtgcctcatgcctgtaatcccagcactttcggaggccaagaagggtggcttgagatgagatcaggagctcaagacaagcctggccaacatggtgaaaccccatctctactaaaaataccaaaattagccaggtgtgttggcacacgcccgtcatctcagctactcaggaggctgaggcaggagaatctcttgaacttgggaggcggaggttgcagtgagctaagatcacaccactgcactccagccagggcaacagtgagactcagtctcaaaaataaacaataaaataaataaataaatgttcactactgggtgatcatttaataggtgtttttttaatcaagaaattatctttttcagcccagtatatcgtgtgaataaaattatgaagaatcta

SEQ ID NO: 1249 - DNA, 16040 bp, Homo sapiens
gtacccaggcgcaccggcaggagagcggcaccgtggctgccgcagcgcgcagaggctgtggaggggcttacggctcccagcccacgggtctcagacccaggggctgggcccccagcccccagtcccgatcccagctgggtcgagccatgctgcgctacctgctgaaaacgctgctgcagatgaacttgttcgcggactctctggccggggacatctccaactccagcgagctgctcttgggcttcaactcctcgctggcggcgctcaaccacaccctgctgcctcccggcgatccctctctcaacggtgagaccctgcctcttggggatatgggatcctgggatggggatgaggtgagagggcggcgtggaagggaaggagaagcgctcctgtcccgaggtccgggattgagtggcgcctcccagcgcctccctgggtcgtggggtctaagggataatttggagcttcgagcacatgagtgggggtacccgcgggaggtcgagggcttgggagaagatggctactgagtctttttacacctccttcccttcccctacaacgcccaccccaggtgagaagaaccgttgctggtaacgggcagggaagtccgagctaagaaaggcccgggcccagcgcagggagggcagaggagggggcacagtctcccgccggcctcggccaagccaggtcactcggtgacccacccaggcagctggtcttcggaaccccgaagtttcccaagaactcacttaggaccagaggaagccaaaatgctggatgtgtttgctacggaggggataggggcggcgatcattttaaggaaacttagaagtttgtctttcagcggcgggactctcagccggcccaccccggcagagctgtggcgggcgggcggagctggcggcgaggtcgttaccgctaattacggtgattaataaatgactgggacagcgcgctctcccctagcgccgcggggaagctgcgggagccggccgccgccagcctgcggagaggccggagcgcgccccctgcctgccgcatcgggaacccccgctttaccgggcgctttcgcgtgtggttccctccaggtgcacgcggtccccatccctctgcctcgacccactcgagtctagtgacgagcactgtgctggggactcgaaggtggagagaaaggagaccctggcaatatgtgtgtgttcatgtgtggggcacatcaggtgctgagggaggagccccagagcctcattagcatggccattagctattcattaggctgcagtcgaagcatctcctgagaccgggaagggtagagggggaaattccagggaaagggcgcctgcagctgtgtctacaggaattagggggaaaaggccgaccagaagggtgtggtccgtatagaaggattggggagaaagacgatgggggaggagcccgattctccaacctcttgaccctcctagatttccaggaggttaagcacagatcccttctcgctggcaccccgcagagtcccgcttctgctcacctagcgcgtttacagagtgttttcaccatactttgtctcatctaagctcgaaacttagtgaggtatgcaaggaaggtgttgacagacacattttgccgccgagaaaacgctttatagagtgaatggtgccctaatcgtcacaaaagcagcatgaagcaaaacctagcgataacagatcagtccatttccattacacctgagggctataccaaggggaaaaaagaatattggggcctggtagaatttgattcaggtagagactgtaggagccaagataaggtgcatatgctgggaacacaagcccttaaataatggcagagtagtgacgtttatcccccaagggctttacatacattatggtcttagagcaaccctatcactgctctcacatcacaaagaaagaaactgagactgagagaagttaaataatttgcccaagttcttacagctaggaagcgtcaaagtctgagattccagccctggttggttcaacagcaacacttgctctcaatcactccagtgttgctcaccacggggtgttccaaaattgggaatgggaggagatggaggagaagagaagggtgaaaagcagagatttccatttggaagggaggagatggagaaaattactctcccaagtgggacagaaatcgatcttcttgactccaggcaattaaaataaactcagaacagcgccagcacgggtcagcctgtccagctttgtctacaacagaacttctaagagggggggcaggaaatgaaacccaatctcacaggcgggctggaagcgggaggttcctgcagattttggaacagggtaggaaggggggaacagggggagggggcagggggcagaacagatgcttgaagtggtccctggttattttacagcaggttattaaaggctgcagtggcacctactggccgccacgggttacaaatccacttttgttggctggactaggggctgagagtgccggagtataacaggctccgggatcctaaccgtgctgcagaaggtgaaacaggccaaagtctgcaggccaagtgacaggtaggacagaatatgtggatgaactgatcggagtgaacaggggaagtagaggaacatcaatcagtagaataatctattggaaactatgcacctgtcaggaaaaggagccttactaacatttctactgctatttgcgttcaattcctgtgacttcacaggacccttgaaatgaagcgtgattatccggggtgtcagtaagaagggccctgtgccgattcatagaatccaggttgacaagcccttctaggcccggccctgtcactcccgtcttgcctttcataagggatcccaagccagtccacattcccaatttcactgagccaggaccttgcagaagtcaagaacaaactgttggctccagtgcacggtttatggtctttcactgagcaaggacgatccgtgaaccagtgcaggtggagatggaaaccactgggcaggaggcgagggagcggtctactcgccaagcgtggttcagccactcccgcttaaacttggcaggagaggagacggaggtctctaggtggtccagaaagccggcctagaagtttgtgtcccgatccctctactaaccggcctgtctgtaggcatcttcctttgagacgaggaacgcggaacgtctgccaataaggacatattggatcctgcagagggagagggtaggcaggtggggactgagctccgcagagaagcataggagatggaacgaccagaggattctctttccctctggagcctcaatctctccccacaatttccctgtctgaacgctctgcgccaccccctgtccccagggtcaagggtaggaccggaggacgctatgccccgcatcgtggagcagccgccagatctgctggtctcccgaggcgagcccgccacgttgccctgccgcgctgaaggccgaccccgacccaacattgagtggtacaagaacggggcgcgtgtggccactgtgcgggaggatccgcgtgcgcaccgcctgctgctgcccagcggcgccctcttcttcccgcgcatcgtgcacgggcgccgcgcgcggccggacgaaggtgtctacacttgcgtggctcgcaactacctgggggcagcagcgagcagaaacgcctcgctggaagtggcaggtgagagtcagttgaccgtcagctggttgcttccagagcctggggtaggcgggagggcactgggcaatcagacccagaaccagccccaaaggacttcagcccactcagcatccttctttgggaccgcgacctttgatctctaatggccacaccacggccagagaaggaagtggatctgactccaggctgatattttctcacctgggaacgaattccagtctgcagcgatcaaccccttcccaagacaacactttccctgtgtcctcagccagttatgtcactctacaccctgcttatttcgccccccaccgccccgcccagtcctccgtgatgatttccggcagtctcctggaaacgtggtggtggcagtgggggagccagcagtactggaatgcgtgcccccccgcggccacccggagccttccgtgtcctggaggaaggacggtgcaagactcaaggaagaggaaggaaggatcacggtgagggcgggattatgattggagaccccaacaagggaggggacatagggtagggaggtgacaaggctggagattgagatcagggcattagctaaccagagactaagagtcagctatacagtgagggataaggaagacggaattggtataaaaaaggggcgggggcatgatgccccaggaacttcccatttgatatgtgggtcaacttccttggtctcctttatcagcttgctgtgaggatcaaataaactttatacatatgtatatacacatatattcaccatatatatatacgctgtgatagctgaaatggaccaaagttaccattattgctctgcagatccgtggagggaagctgatgatgtcacatacactcaagagcgatgcaggcatgtatgtgtgcgtagcctccaacatggcgggagaacgggagagtgcggcagctgaagtcatggtactgggtaggcacagggaattttgacattatgggaacaggtagcctgcagagtaagtagccgtgcagacaccctgactgttcactcactaccactccatagagcgtccctcattcctgcgcagaccagtgaatcaggtggtcctggctgatgcccctgtgactttcctatgtgaggtgaagggggatcccccacctcgtctacgctggcgcaaggaggatggggaactgcccacaggcaggtgagagacccccttctgcctgtaggaagacccaacctgatcaagagactattctgccctagaaaaccggaagacaggcacattctcacttgagaacacagagaagtctgttccctagagcctgtggccccagtcctatccagtccccacctccattgatgggtccatgggtaaccagcttctgtccctgctgggtcctgcctgtctttaagtaccttgaccctggtgtctgtcctgggggagagagaaagggtctgtagctgtggccaacccagcctggggtggggagtggagcaggtatgagatccggagtgaccacagcctttggattgggcatgtgagtgccgaagatgagggaacgtacacctgtgtggcggagaacagtgtgggccgcgctgaagcatctggctccctcagtgttcacggtgagggctgtacttgggactgcctgcagcaggaatggtaggaggggagaaggaggatggttggcaagagactgagggagaaagggcagagaagggcatgtggatggaacacctgagacttctgcaaggagtgggaggaggagaacactaaacaggccgggaggaagagatggatatctgctcctgtacacttgagctaagctggagcttctctctcctgttcctgcagtctcctttcttagtgcctctgactacctgttcctttttctcacctgcccttcccagtcccaccccagttggtgacccagccccaggaccagatggcagctcctggagagagcgtggctttccagtgcgagaccaaaggaaaccccccacctgccatcttctggcagaaggaggggagtcaggtgggtggccatctccaaggagcttcccatcagccttcctctgcggctcagcctccctccctctacattctgcaaacttctctctggggcttctgttttatctttgggagcccccagaaacccttgcaggttatttgagaggattaagtaagataatgaatataaaaggcctggaacacattgggacactttttaataaatgataataatacatttagatggtggagaacagtcctggatggtaggttcttagagaatctttctgttttgggcaaggctatcctgaggatgtaacaaattcagtttatctctcctcctttagaccccttgggctttggctttggacataacacactgctctggaaacagtattgaaccaaagctgctcagggtagaaaagtactcgctcttctatttataagagcaacaagggactttcacaaaggagagctcacagtcatcccttttgaaccttgcaaacaaatctcaaaatccagaagcagaatgaacattaactgaagttaccacataaataactctctctaaaggaagggtaggaattttgctactggaaacagggtcagcaagataaagtaagtatgatgagctccactctgttggaaaacaaggcaacctgctacctcattccaaatcgacagccacaattttctaacatcttttctagcacctgggactgctgaattctaattagattctcacatgaataaaaagggtgacggttagtaggggtgaagcaggtgttacccagggtctcagcatggtgccctttgtcctgagacccaaacctgcttccctgtctaatctaatggattatcttccatggatctatggaatgaaaactgttcaagcaggaagaagaggaatgtgtttaccacaacgtgttagaagactttcatatgattacttcatgtgatctttataactatcctctagaagtcaaatttgggaaattggggctcaggcaggttaaacagcttgttcagggtttccccactagtaagtcacggagctgggaagtagactctgaaattgtctaataaaattccctgatgtttttgtgaatacatttaactactttgcccaagttcacatcactgctggagacagacgatgaactagaatcataggaattctctgaattttgagattgacaggaatggggacctctccctgcccagctgcctgctcattccctaccctggttccttgctctgtccccaggtcctgcttttccccagtcagtcacttcagccgacggggcgcttctcagtgtctccaagaggccaacttaacatcaccgcggtgcagcgtggggatgctgggtactacgtgtgccaggctgtcagtgtggctggcagcatcctggccaaggccctgctggagataaaaggaggtacgtgcccatggagataggactggatccatggcttgggaggaaataatggcctaaagtgatgtgtttctcttggagtctatatactatgtctgcaagaggagagatgtgttcctgaggcatgaccttgaagtttggaaaccagcagcagaagccactaataatggctggtcctgggcagagacttcagatgattatcaaagccccctctgatcaccggaagtttcaggggctggggtagggagggtgaaggagcagagaatgaggacaaggggctgcccgcggggccctaagctcctcccctgaggtgcacacgttcttcctctctcagcctctttggatgggctgcctcctgtcatcctccagggaccagccaatcagacgctggtgcttggctcctccgtgtggctgccctgcagagtgactgggaaccctcaacccagtgtccgatggaagaaggatgggcagtggctgcagggggatgacctccagttcaagacaatggccaacggtaccctgtacatcgccaatgtgcaggtgagtgtcacccctggggccctagtagctgagaatggctatctgctccacgttccttacacaagtaagtactcactgggcctgtagccccatctttacccctctgttctctcagagcacctagtatccaacatcttcccatccttctgctacccgcctccaccccctcactggatcttgctccactctcagtttgccagtgctctgccctctcttccaggagatggacatgggcttctacagctgcgtggccaagagttccacaggggaagccacatggagcggctggcttaagatgcggggtgagttttttctttcttcccttattttgataataccttcctccaaacctgcttcaacaggtagtcgatacctcctcaaactccgggattaactttatgtcacaaatgccatggttacggtggtgaggatgagaaggacagtagtggtacccatgggaggcagatgtgagtaggggttcatatactatagcccactctgaccatcaccgcagctcagagctccatagctcccctggtaaggagacaggttacactaggattatcctttccctatctttctacttaaagattatctcccactgcagaagactggggagtatcaccagacccccctacagaacccagttcccctccgggggctccctctcagccagtggtcactgagatcaccaagaacagcattaccctgacctggaagcccaacccacaaactggggctgcagtcacgtcttatgtgatagaggccttcaggtatggagaaagttttgaatgcaaacctggagagttaaaaggaggggatcctatgcccttagggtctttgctattgtgaggtgggattctccagtaccctcttgcaaggggaagacataatggtcgttcatagagagtggatgagatggagtaggcaggttgggagttcctggcttagacaaccctgtcatctccttcttgttgtagcccagcagctggcaacacatggcgtactgtggcagatggcgtgcagctggagacacacacagtcagcggtctgcagcccaataccatctacctgtttctggttcgagcagtgggagcctggggcctcagtgagcccagccccgtctctgagcctgtccgtacacagggtaaggtcagagtccctgggctcatgagcatgaaatgtaacatcataaagcaaccctctcccccaaaaccatgacaccacggcagttcatacagttctttcctgctatgccaggtctatactggtggcccggcctggaataggagatcatgtttgcctctcacagaagagacaagggaggaggaaggcagggagaggggaggagggaagaaggaaagggagagaggtagtcattcattttggcagcttctgacttctgagccttttacccatagataataatatagattattaagactagaagggaccatggaggggccatcttcatcttagagatgaggaactgaggcctttaaaggatgcatgtgtaattatgctagctggacaccgaggcccatgtctggaagctattttcctgaccagtcccctcctgaccatggggtgtgctctggagtactaagtggagcagggcagaggtaggacacgagcacactctcagccctatctccctgtccctggtggcctctgctgaatgggttccttggtcaacagatagcagcccctctaggccagtggaggacccatggagaggccagcagggactggcggaagtggctgtgcgcctgcaggagcccatagtcctgggaccccggaccctgcaggtgtcctggactgtgagtgtggtatggggaggagattcagggtggggatgattatgaggcacatgagggcctccaagagtgagtatgggagagtgggaggtgagtggctggggaaggcggcatgagtgggaggaggggctgggcctggatggcctggagggcctgtatggccccagcctccccttctggtgtgccttgtcctgtctcccacaggtggatggcccagtccagctggtgcaaggtttccgggtgtcttggagggtagcaggccctgagggaggaagctggacaatgttggacctacagtccccaagccagcaaagtactgtgctaagaggactccctccagggacccaaatccagatcaaggtgcaagcccaaggccaggaggggctgggggctgaaagcctctctgtgaccaggagcattcctgaggagggtaaggagggccaccgaacagatggatggacaagagggaagaaggggtgggggtggaggtggaggggggatgaaaatttgcaggaggagagcagggtgagtgggtgggaaggaggaatggctctcagttccctaagatgttagaacagggagggggaatgttggggcaggaggggcagcttgcaatgactatttgtgtccttctcaccatgctccaccctggcccagcccccagtggccccccacagggagtggcggtggccttggggggtgatggcaacagcagtatcactgtgtcctgggaacctccactcccctcccagcaaaatggggtcatcacggaataccaggtagagggattgaggagggactggatgggagggccaggccgggagggagagggaggacctagtggctagaattagggtggaggaaatctattacaggtttggctttagggttggggatgagtttaggggagaagagagaggtttccaagtgttgtttccaggttgaattacatctgtataaggcttctctaccatttggagccttaagtttcccggtgaggctaagaatcccatttctgactctaaatccgggactcggcctccctagatctggtgcctgggcaatgagagccgctttcacctcaatcgatctgcagcaggctgggcacgctccgcaatgctccgaggactggtgcccggtctcctctatcgaaccctggtcgcggcggccaccagcgcaggcgtgggcgtgcccagtgccccagtgctggtgcagctgcgtgagtccacccgagggcagtgctgaggatcttgacgggggcggggcaagccccccactggggtagctgtgcctgccgggtcgggaatgaccctttcccagttccagggtttcgggcccctcctcccctcacttctctgacccccacagcgtccccgccggacctggagcccgggctggaggtgggcgcggggctggcggtgcggctggcgagggtgctgcgggagcccgccttcctcgcgggcagcggcgcagcctgcggggcgctgcttctcgggctctgcgccgccctctactggcgccggaaacagcgcaaagagctcagccactacacgggtgagctcccggcctcggagcggacggatccgggagggagccaggcggcccatggggaggggcaggggcttagccgctggcgagtgaggaccgggtcgggagaaaggggtcgcacctggagttcagcctcttgggtaggggcgggatacgtggggcgactcgaggagctgccaggactagggagggctgcgggccaagacggggcgggatctggatgacgtttgcctctaagacgccacgaggaggccaggctttgcaaccatctccataaagaaggggcaagttcgaggacggaaagcccactcaaagggcggggggcggggcctggcaagagggggtgtggccaggatcccaggcagtaaattgtgcggcggggtctggatggaaaggcggggcccgctgaaagaaggcgatccgagttctgctacttcctagtaagggacgtctctggagagattctgaggtgtttgaggtcagtggttttcaatcttggttggctacacataggaatcacttgaggggcttgagaaaaataccgacacctgagtcccacccccgagaaattctgatgaaatgggtccagggtgcagcctgagtggtggaactgggaccggggcctaggcgtggacaagtataggggtatttctgacccttctcctcatttcacctcttctttctcccacgggttcctttctggaagcctcttttgcctacacaccggcaggtaagccatctctgccccagtggggttcagaccccccgggacgggcccttctctcactcattcgccccctcattttccccagtgtccttcccgcactcagagggcctctctggagccagttccaggtaattctcttagcccatttcctcaggatgacctccaccgacaggccactcttcttccgccccgctgacgccccaggtggagggagcatggccacctcccaccccaacaccaccgccactgtcctgaaactcccgaatatcgccacctccctttcctttgctggcctcttcaggctctccgtccccaacgctcacctgctctccctcaggccacccatgggccttggccccgccccctactcatggctggcagattcgtggccccacccatctcgaagcccctcggcccaggaacccaggggaagctgctgccctagcaatcctgacccggacgacagatattacaacggtgaggagttctcattccctcacctggcttcagcgcacttctcccgacctactggggcaaaccgaagggcgcccgggagcccggtctctctgaggttggtcagtccctggggaggatgtgagctggggaagcctctcagacctacctccaccctggtttaggatgtaaggcttgtgtgggggaagaagttgatcccgtgggatttccctttgtcttccattctgttgtcctctatgtttctgtctctgcttccgggcctccctctttcttctctgcagaagcgggaatctccctgtatctagctcagacggccaggggcacggccgcccctggcgagggtcctgtctatagcaccattgacccagcgggggaggagctgcagaccttccatgggggcttcccccaacatccctcaggagatctgggtccctggagccagtacgctcctccagagtggagccagggggacagtggtatgactccaactcctgaaaccccgtttagccctgaccagggtatccccaaagaggatcctcctccctgaccctctggcacctagcccggcacttccttctgacctgtctcatctctggctctttcctgcctgttctccgggtgtccccatcctattctcctcaggagccaagggaggcaaagtgaagcttctggggaaacctgtgcagatgccctctctgaactggccagaagccctgcccccacctcctccttcttgtgaactgagctgcctagaagggccggaggaggagctggagggcaggtagagatgctccctgcttccaggcccacacacctgcggccagaccatgggctgctggggaggaaggggagggggcagcaggaaggccaacgggaaggtatggaagcagctgagccctttccttctctcctgcctctttgatcccagctcagagccagaggagtggtgcccgccaatgcctgagagaagtcacctgacggagcccagctccagtggagggtgcctggtcaccccatcccgaagggaaaccccctctcccacaccttcctatggacagcagtccacagccactcttacaccctcacctcctgaccctccccagcccccaactgacatgccccatctccatcagatgcccaggtagggaggtatatagtacctcactcattgcaagccctctatacgtatctactcagtagatgactgggtgggtggatggatggatgggtggatggatctggggtacagaggtctcagggctgtgtcagggtggaagtgtaatttgggcaggaatatggaggctgacaagatctctcatgcccattagactggctcttgctggagtggtcagcactctacctgagacatttcagatatggctctccttatgcttctctagcttgggaggacttacgggcggacgggttgtgtctcgtttatctgttaggttgattgtctagcacagtgccaggcacatagtaggcattcagtttttgtggagggaacagaggctgcggcctcctgtcattgcaggagggtgccccttgggccgagttcccctctcagtgtatcccagcccatgctgggcatccgtgaagcgaggcctgctggcttgggtgctggccctgcagcctcaccccacctcagccccagtcctgcccctagcacagccagcagtgccccaggtaagtctctacaacctccttttgccccccggctccctccagtgcttgcttccccttcacccttaggcctttttcctgatttttgcccttacccattcctcttcccgtctcctaacactgcaggcagaacctggcaggggaatggggagatgactcccccacttcaaggaccccgtgctcgattccggaagaaacccaaggctcttccctacaggagggagaacagtcctgggggtgaggggggatgcacctgggagatggtgacagtagtggcggggggataggcaggaaaccaagggtgcactctgggggctggaggagggaacaggtgaaccccaatcttgggctgttcattggcagcctcctggtgccagggaatgcaggtgagagaaagattagtgacaggagtggcaggaggctccgctgaaaacagctccctccccagacttgcccccaccacccttgccaccgccagaggaagaggcgagctgggccctagagctgagggcagcaggcagcatgtcctccctggagcgggagcgcagtggggagaggaaagcggtccaggccgtgcccctggcagcccagcgggtgctccacccagatggtaagcagggccagggcaggcaggagggctgctgccacaggagactgtgggctttgggactgggggctgatagtagaccagctcagccctccctttagttaggttcatgcatttgatccacatcaaactcccctgtctctctaactctctgagcacaatcccctgaagtcccaagttgtgttcattcccaggatggaagcccagataagaggactgggctctaggtgctctgtccccgctccccacaaggctccctctgattgggagctcccccgcagcgttctgagcacccatgatgtcaaggccatgtgccggtcactctgctgctcctcagccccaggctggctgagccctgtgcctgcccttcatcttcttccagagctgagcctgtggtcagggtggcagggtgggtgacagggaagttctgcttcctgcctgcacctggctacccttccctcttgtgctgcagaagaggcctggctcccatacagcagaccaagcttcctgtcccggggccagggcaccagcacatgttccacggccggcagcaactcttccaggggctccagcagctctaggggctcccggggccctggccggagccggagtcggagtcagagccggagccagagccaaaggccaggacagaaacgccgagaggtaggggccatagattgcagaaaaatgagggcagaggactagggaagggtggaccaaggcgtaatggaaaacaggaaggtgggcaagggcttgtggaggagtgtcaaaaggaggggatcgagagggtgagggggagggaggaatcctgtagaagtgacaaggggactgagcgtggtggctcatgcctgtaatcccagcactttgggagaccgagatgggcggatcccttgagctcaggagtttgagactagcctgggcaatatggtaaaatcccatctctacaaaaaatacaaaattagctgggcgtggtggtatgctcctgtagtcccagctactcagggggcttgaggtgggaggatagcttgagcctgggaggtcaaggctgcagtgagccatgatcacaccactgctctccagtctgggcgacagagtgagactctgtctcaaacaaacaaacagacaaacaaaacaaaagaaatgacaaggggtgaggacaagatgacacataatagaggagcctgggctcaccgtaggagaactgggttaggagagagaaagcctgagcccttcctggacttgtttgccctgggccagggttttacaaaacagcatctctctctctctccctaggaaccaagatgacccttgttggggcattgagaatatcatgagtgccacggggaaggggagtagggatgtcttttcccccccagcagtgatgagtggggctagctgaagcccattggtttccacgatttcaattggctgagaaggcagagagctagctcctccctttctttctttttccacctgagacttgtttataaaaaacaaaacaataaaaagagtctgatcagagccca

SEQ ID NO: 1250 - DNA, 63363 bp, Homo sapiens
tgtcctctgggatctcttacagcttgggaacagagatcatgtcacatctggtggaccctacatcaggagacttgccagttagagacatagatgctatacctctggtgctaccagcctcaaaaggtaacttctacgcctgaggatggacaccttttagaattaaaagaactctcactgtggaacatcttgctggccttcacagagactgatttactttcagctcttttcttcagtcttctcacttttttttttttttttttgagatggagtctcgctctgtcacccaggctggagcacagtggcacaatctcagctcactgcagcctccgactcctgggttcaagcaattctcctgtcttagcctcccaagtagcagggattacaggcgtgcaccaccatgcctggctagttttgggatttttagtagagacaagttttcaccatgatggccaggctggtctcaaattcctgacctcaagggatctgccctcctcgggctcccaaagggctggtattacaggtgtgagccactgtgcctggccctcttctcacattttattcttaagttctttttttttttcttttttttgagatggagtttcactctctctcgtcccccaggctggagtgcagtggcccaatcttggctcactgcaacctatgcctcccgggttcaagcagttctcctacctcagactcctgagtagctgggactacaggtggccaccaccacgcttggctaatttggtatttttagtacagatggggtttcaccatgttggccaggctgatctcgaactcctgacctcaagtgatccgcctgcctcggtctcccaacgtgctggattacaggcgtgagccaccgtgcccagacttagtcttaaattcttacagtaaaagtattactgtgtgggtttaggaggtaaagctaaatactaccaccacaaacagcacaacaaaagccaagaacaactagtgggtttcactcatctatccttgtgattagcccttagcccttcactgtcactaagcagaagtgttcaatttaagatgaaagggctcagccctaccagagcttcttccacacattatttaagatatctttagggctgggcgcagtggctcatgcctgtaatcccagcattttgggaggccgagacgggcagatcacgaagtcaggagatcgagaccatcctggctaacatggtgaaaccccgtctctactaaaaatacaaaaaaattagctgggcgttgtggcgggcgcctgtagtcccagctactcaggaggctgaggcaagagaatggtgtgaactcaggaagtggagcttgcagtgagccgagatcgcaccactgcactccagcctaggcgacagagcgagactccataccacccccctcccccaaaaaaccatatttttctaactttggccaggcttggtggctcacacctgcaccagctactcgaggctgaggtgggaggatcacttgagcccgggagtccaagatcagtctgggcaacatagcagtaccctatctctaaaacaacaaaaaaaggtatttttgtaattttgctccactttcccatccctcaatcccaatcatggctaccgttgattctattttcacttgacttcacttctataaaattattttttgaggatagggcactttatgcactgcccataagtgtataaatgatgcaaccactttggaaaatatttgccattatctagtaaagttgaacgtgtaactctacttttgagtataaaattggcagaaattgcctgggcatagtggctcacgcctgtaatcccagcaccttgggaggccgaggcaggtggatcacctggtcgggagttaaaaatttgcagaaattaactcttgcccatatataccaggagacattaccagaatgttcatagcagtatttttttttgagacagattcttgctttgtcacctaggctggagtgcagtggcgtgatctcagctcactgcaacctctgcctcccgggttcaagtgattctcctgcctcagccacccaagtagctgggattacaggcacctgccaccacacctggctaatttttatatttttagtagagatggggtttcaccatgctggccggactggtctccaactcctggcttcaagtcatctgtctgcctcggcctcccaaagtgctgggattacaggcagaagccaccacacctggcccctgtttttatttctcctgggcacaaatctagatgtagaattgctgggtcatacggtaacactagtttaacattttgaggaactgccaggctattttccaaagcagtggcaccattttacattcctaccagcaacgtatgatgcttctgatttcttcactttctcagcaacacttgttattgtttgtaactgaggtgttatctcattgtatttttaaaaaaatatattctttcttggctgggcaaagtggttcacgcctgtaatcccatcaccttgggaggccaatgcaggtggatcacctgaggtcaggagttcaagactagcctggtcagaacagtgaaaacccatctattctaaaaatagaaaaagttaaggccgggcacggtggctcatgcctgtagtcccagcactttgggaggccgaggcgggtggatcacgaggtcaggagatcgagaccatccttcctggctaacacagtgaaacctcgtctctactaaaaaatacaaaaaaaaattagccaggcctggtggcgggcgcctgtattcccagctacgtgggaggctgaggcaggagaatggcgtgaacccgggaggcggtgcttgcagtgagccgagatcgcgccactgcactcaagcctgggcgacagagtgagactccgtctcaaaaaaaaaaaaaaggaaagaaagaaagaaaaagttagctgggccaggtggtgcacacctgtagtcccagtatttgggaggctgaggcatgagaaaaacttgaacccaggaggcataggttgcagtgagccgagatggtgccactgcactccagcctgggtgacagagcgagactccatctcaaaaaaaaaaaaaaaaggattctttctcgttatggttttgatttgcatttctctgatgaataatcacactgaccatttttcatatgcttatttgccatttgtatatctacttgggagaaatgtctattcaggtcctttgccaattttctttttaattcaggggccagttttgccaatttttaaattggattatttgtctttatattgttggttttaagagttctttgtatattttggacacagttgagaattttgtgcttctgaaagctttaactgttccacaaagtccatgaaacatgaactgactgagataatttttcaagttagaagagtcatagtgataggaaaccgttgttcaggaactacctacctggagttccagtcagtttggaagccacccacatatccaaaaagctaaaagaattcaatatttttcttcagtatcataaaagaaaaatagaagatgagaaaggggaatatttacaagtttattttatgaaaaaataagcttttttaggtttcattacaaacatgtccaatttcacttctgtcatttatgaaataactaaaagtagatgaagtacctttttttttttttgagacagggtcttgttctgtcacccaagctggagtgcagtggtgcgatcttggcttactgcaacctctgcctcccaaggctcaagcgatcctccagcctcagccttccaagtagctaggactacaggtgcacaccaccatgcccagataatttttgttttctgttttttgttttttgttgagatggagtctcgcttttgttgcccaggctggaggcaacggtgcgatcttggcccactgcaacctccacctcccagattcaagcaattctcctgcctcagcctcccgagtagctgggattacaggcacgtgtcaccacacccaactaatgtttgtatttttagtagagacggggtttcaccatgttggtcacgctggtctcaaactcctgacctcgtgatcctccggcctcagcctcccaaagtgctgggatgacaggcatgagccactgcacccagccaatttttatattttttgtagagagggatttcactgtgttgcccaggctggtctcaaactcctgaactcaagctgtctgcccaccatggccttccaaagtgttgatatcacaggcatgagccaccgcgtctggcctaaatatttgtcatatataaatatttttataaaggcatatggtcatgttataattttcttcctagtgaccttaccttcctagttgacctagcaacattattttgcaggttctttggttgggaagttgtatttttttttttcattctaagcacctcagaaacactgttttcggagaaaaaaaaattttgatgtcacaaatagataaaaccacattaagggaatatttttatagcatatattcaaaaattaatctagccagtgactcatgcctgtaatctcagcacattgggaggccaaggcaggaggatcacttgagcccagcctgggcaacatggtgagaccttgtcactataaaaaatttaaaaattggccaggcatggtggcttatgcctgtaatcccagcactttgggaggctgaggcaggcggatcacctgaggtcagaagtttgagaccagcctggccaacatggtgaaacctcatttctactaaaaatacaaaaattagctggctgtggtggcccatgcctgtaatcccagccattcgagaggctgagacacaaggattgcttgaacctgggagacagggagacggaggttgcagtgagccaagacagcaccactacactccagcctgggcaacagtgagagactctgtgtcaaaaaaataataattagccgggcgcagtggctcacgcctgtaatcccagcactttgggaggccgaggcgggtggatcacgaggtcaagagatggagaccatcctggccaacatggtgaaaccccatctctactaaaaatacaaaaaattagccaggtgtggtggcaggtgcctgtaatctcagctacttgggaggctgaggcaggagaattgcttgaacctgggaggcagaggttgcagtgagccgagatcgcaccattgcactccagcctgggcaaaaagagcgaaactctgtctcaataaataagtaaataaacgcaaaaaaataaaaaatatggttcccattcaccatgagatcagagcagacctgggccagtgaacactcacaatgaaaagtgtgctccagtttcctctgcttagaccaagcagaggctcttgtcctaggaggcagctttggggacagtttctcctgaccaaaaaaacaaacgagatggttcttggaaatcaaaaaaagtttttatccttttccttactgggtttttgaagacagtcatgggaacaatccttgtgtaggtccaaattatctaataaggagaaaaaaatagaagaataggctgggcatggtggctcatgcctgtaatcccagcactttgggaggccgaggcaggtggatcacctgaggtcaggagttggagactagcctggccaacatggtgaaaccctgtctctactaaaaatacaaaaattaagctgggcacggtggctcacacctgtaatcccagcactttgggaggccgaagcgggtggatcacaaggtcaagagatcgagaccatcctggctaacatggagaaaccccgtctctactaaaaatacaaaaaaattagccaggtgtggtggctggcgcctatagtcccaggtactcgggaggctgaggcaggagaatggtgtggacctgggaagcggagcttgcagtgagccgagatggcgccactgcactccagcctgggcgagagtgcgagactccgtctcttaaaaaaaaaaaaaatggaagaaattagctgggtgtggtggcaggcacctgcaatcccagctactctggaggctgaggcaggagaatcacttgaacctgggaggtggaggttgcagtgagccaagatcacaccagtgtactctagactgggtgacagagcgagaccctgtctcaaaaaaaaaaaaaaaaaaagaagaagaagaaactaaaaagaaaaattaagtaaaataaaagcctaattggatatttttatctagagaatgtactttctagacggaaggtcgagttatacctcatgctgtgataatatagaaagggtctccagggacccagtaggagtcatttctgtttttgtttttttttttttccaaggcagagtcttgctctgtcacccagggtggagtacagtggcacgatctcggctcatggcaacctctgcctcccaggctcaagcaattctcctgcctcagcctcctgagtagctgggattacaggcacgtgccaccacgcccagctaattttgtatttttagtagagaccgggtttcaccatgttggtcaggctggactcgaactcctgacctcacaatctgcctgcctcagcttcccaaagtgctgggattacaggtgtgagccactgcgcctggcccagagtcatttctcatacttcctgatttcctcataaatacttgactcaagatagatttatgctctctggacaagatgtgatgagacatctaaagggttcaaaaaataggtgtaaaaatactgtccatttactgttttctgggactttaggtaagaatatgaaaactcaaccacccttgagcaggatgaaccgggaggaattggaggacagtttctttcgacttcgcgaagatcacatgttggtgaaggagctttcttggaagcaacaggatgagatcaaaaggtacttagagttctccttaaattttttttttttttttttttttttttttttttgagacggagccttgctctgttgcccaggctggaatgcagtggcatgatcttggctcactgcaacctccgcctccagattcaagcaattctcctgccccagcctcccaagtagctgggattataggcatgcgtcaccatgcccagctaatttagtatttttaagtagagatggggattcgccatgttggccaggttggtcttgaactcctgacctcagatgatgcacccacctcggcctcccaaagtgctgggtttacagatgcgagccactctgcccggcccaaaaataatttttgaagcaatatttctttagtcaatttttttgccaaacatgtcgatagactgtgaccacaggacacagagcatcattaagagcttgggtgataatatttcagtccacagaataagagactggacaggttcctcccctggtcacaactgaggggatggagataggtggaatggtcaaaatttcagaggagaaaagcctgcaggggcaagtaaaagaaggggtctttatttacaaaagaaaactaaagatcgtattgatccctgcaggcatgttgtaagtgctatctatacatttatttatttatttatttatttatttttgagattttttttttttttttttttttgagatggagttttgctcttgttgcccaggctggagcgcaatggcatgatctcagctcaccgcaacctccgcctccaggattcaagtggttctcctgcctcagcctcccaagtagctgggattataggcatgcgccaccacactcagctaatttttagtatagacggggtttctccatgttggtcaggctggtcttgaactcttgacctcaggtgatccgcctgcctcggcctcccaaattgctgggattacaggcttgagccaccacgccagccaatttttatttatttttgagacagagtctcactctgtttgggctggagtgcagtggtgtgatctcggctcactgcaacctctgcctactgggttcaagcgattcccctccctcagcctcctgagtagctggaattacaagcttgcaccaccacgtcagagtaattttttttgttgttttgagatgaaacctcgctccgttgcccaagctggagtgcagtggcgcagtctcggctcactgcaacctccacctcccaggttcaagcaactctcctgtctcagcctcccaagtagctgtgactacaggcacacaccaccatggccagctaattttttttttttttttggagacggagtctccatctgtcgcccaggctggagtgcagtggtgcgatctcggctcactgcaacttccgcctcccggattcaagcgattctcctgcctcagcctcccgagtagctgggactataggtgcccactgccaccactggccgtgctgcccaggctggtctcgaactcctgagctcaggcaatcagcctgcctcggcctcccaaagcgctaggattacaggtgtgagccactgtgcccagccatgcctggctaatttttttttttttttagtagagatggggtttcaccctgttggccacggtagtctcaaactcctgacctcaggtgatccacccaccttggcctcccaaagtgctgggattacaggcattagccaacacgccaggccttaatatttgtattttttgtagagatggggtttcaccatgttggccaggctggtctcaaactcctgacctcaaatgatccccccatcttggccgcccaaagtactgggattacaggcatgacccatcgtgcccagttaatttattagaaatagtattaattagccagccacagtggctcacgcctataatcccagtactttgggaggccaaggcgggtggatcacgaggtcaggagttcaagaccagcctgaccaacatgatgaaaccctgtctctactaaaaatacaaaaattagctgggcgtggtggtgggcgcctgaaatcccagctactcgggagactgaagcagaatcacttgaacccaggaggcagaggttgcagtgagccgaaattgtgccattgcactccagcctgggcgacaagagcaagactccatctaaaaaaaaaaaaaaaaagtattaattcatttaatagtctgaagaggtattattaagaggaaaaggaagcataaagaggttaaataagttgcctgagatcatacctagtgcataacagaggtggaatctctttttgttttgttttgttttgttttgtttttgagacagagtcctgctgtgtcactcaggtttgagtgcagtggcgcaatctcggctcaccggcaatctctgcctcccgggttcaagtgattctcctgcctcagcctcccaagtaactgggattacaagcatgtgccaccatgcctgactaatttttgtatttttagtagagacagggtttcaccatgttggccacgctggtctcgaactcctttcctcaagtgatccgcctgcctcggcctcccaaagtgctgggattacaggtgtgagccaccgcgcctgtcccagtgggaaaaactcttaacttcaaaacatattattatatacagtgatcttagatttctttctttagaaaatggggacctggaaagaaatctgagacggaggtgagggaaggtaaacagatgggaagaatgggagttctcaaagtctggagtctatctctaggacacattttgaagatactggtgtcaatgccttccagccaaggaccaccaggaacataccaacagttgagcaagctgggcttattcattacagctagagaatatgcacaccaggggaactaaaggcatctcagcaaatgtgttagaacttattatagtatctaagctttgtttgattgggtgattttgggggaggatccaaggaaacagaagtttgctccagatttcatgctgtcagaaagcaagcacaattctatgtttcggtatctcaataaattattctttctttctttctttctttctttctttctttctttctttcttttttttgagatagggtctcactctggcacacaggctggagtgcagtggtgcagtctcagctcactttagcctcaacttcctggaatcaagtatcaataaatcttatctacagggagggtaaactagtgcaaggctgaagccatgattggtaaagaagttgcagtcactcatattaacctggagagaaggatgtttggtattttgtgggtggcagtgacactaattttgtctgtaagcagacaaaattaggcagtggacttgttttgtatcattctatcatggttttggagtgaacttgtttcatgttgatgttctgtgaggtgtccaaaagaatagtggctgggcacggtggctcatgcctgtagttccaacactttgggaggctgaggtgggcagatcacctgaggtcaggagttcagagaccagcctggccaacgtggtgaaaccccgtctcttctaaaaatacaaagattatccgggcgtggtggcaggcgcctataatcccagctactcaggaggctgaggcaagagaatcgcttgaacccaggaggcggaggttgtagtaagcaaggattgcgccactgcactccaggctgagtgacagagtgagattcggtctcaaaacgaaaacaaaaacaaatggagatagcacagactagcttcaaacaacactgaggaccagttgtgtcagaccagtttcctaatgtcaagggcagtgttttgctttctcattgtaacccccaggagtgattaagatcttcgtttagaatctgcaggattggccgggcgtggtggctcatgcctgtaattccagtactttgggaagccaaggcgggtagatcactaggtccggagttcaagaccagcctgttcaacatggtgaaaccccgtctctactaaaaatacaaaaattagctgggtgtggtggtgggcgcctgtaatcccagctactcgggaggctgaggcaggagaatctcttgaacccgggaggctgaggctctagtgagcagagatcgcaccactgtgctccagcctgagcaacagagtgagactctgtctcataaaaaaaaaaaaaaaaaaaaaaagaatctgcaggaatgcaggcctccattgtggatcagcactcttcagagttggtgattttttttttttgagatgggagtttcgctcttgttgcccaggctggagtgcaatggcgtgatctcggctcaccgcaacctccgcctctcagattcaagcgattctcctgcctcagcctcccaagtagctgggattacaggcatgtgccaccacgtgcagctaattacagacagggtttctccatgttagtcaggctggtctcgaactcctgacctcaggtgatccgcccacctcagcccggcaaagtgctaggattacaggcgtgagccaccgcaaagggccgatttttttttttttaattgttgagaacttgagaatctagtgacttgagtgaagtcagaaggttgtatgggccaaaaaatctagtttcttggttgataatcaaagagtacttgagattatggatgctaaatggttaatctggattctatgcccctggctttgggcaagttacatagctattttacaccttgttttctttatctgggtataatgatatgtaataataatagctcacacctgaagcccttacagtgtaaccccactgttctaagcattttacatatatatttatatataagcttattaatcctcacaacaatctactgcttttatctttttctatttatctttatttataaatgaggaaactgagcacagaaaggttaagtggcatggccaaagctacagttagtaaatgtcagaacagacgggcagtgtgtcttagtcagctcaggatgccataacaaaataccacggactgggtggctgaaacaacagacattggttttctcagagttctgaagctggaagtctgagatcaaagtgtcagcgtggttggatcctggtaagggccatctttctagcttgctgactgctgctttctcactgtgtcttgggaggtgggagagggagatctcttgttacaaggccacagtcctatccagttagggccccacccttgtgaactcatttaaacttaataacctccaaaggccgggcgcggtggctcacgcatgtaatcccaacactttgggaggccaaggcgggcgaatcacttaaggtcaggagttcgagatcagcctgaccaacatggagaaaccctgtctctactaaaaatacaaaattagtattttgtggttaggcgtggtggcgcatgcctgtaatcccagctactcaggaggctgaggcaggagaatcgcttgaacttgggaggcagaggttgtggtgagctgagatcgtgccattgcactccagcctgggaaacaagagaaaaagtccgtctcaaaaaaaaaaaaaaaagcctccggaacacccaatgtccagatacagtcacactgggggttaaggcttcaacataagaattttgagtggggacacaattcaggccatagcacagtgagagcatagaatcagatagtagcaaaaaaaccatgattttaggtcaagataacaaataaaaattgttactaaaagttataaaggagttatccttaatttggagcacatatacaggggtgtgtagacaagtgggatagaaaaagcaaatattaaaattgttatttatatttgtcacccatttaaacatacatattttgttttataatgacaatttattagtacaaaaacaagtctatatataatttttttaaatgcacacaaatactattggggtagtggctcaactttttttttttttttttttttttttttactaagataagggtgtaatcactgcaataaaataaagacaggtatcacaatggccctgccctcaaagagttacagtgtactggggacagaaggctaatctttttaaagtgtggttaatagatcacggtagatgaatacatattatagatcaattcgtgattatatgtcccaaataacccgtagaaataataactgtcatgaaaggagaagccacgtgctctatttgtccacaggctgaggaccaccttgctgcggttgaccgctgctggccgggacctgcgggtcgcggaggaggcggcgccgctctcggagaccgcaaggcgcgggcagaaggcgggatggcggcagcgcctctccatgcaccagcgcccccagatgcaccgactgcaagggcatttccactgcgtcggccctgccagcccccgccgcgcccagcctcgcgtccaagtgggacacagacagctccacacagccggtgcaccggtgccggagaaacccaagaggggtgagatttaaggctacatcccctacagggctaagacactgggaaggactgatgtgccagccacgttttcctcactgccttcttctgcccaccaccccattttgttcttttgttctcactccctcctttctgcctccctaaaatctttatttcctgagttgggatatcagattcaaaattctaaattcaccatggagtgtcgctgagggcagaatcagacaacaggtcaggagatggagaccatccttgtccaacatggtgaaaccccgtctctaataaaaatacaaaaattagctgggcatggtggcgcgcacctgtagtcccagttattcgagagattgaggcaggagaatcacttgaactcgggaggcggaggttgcagtgagctgagattgcaccactgcagtccagcctggcgacagagcgagactctgtctcaaaataataataataataataataataataataataataataataataaaaaattagccaagcctggtggcacatgcctgcagtcccacctacttgggaagctgatgtgggaggatcgcttgagcctgggaggcggaggctgcagtgagcccagatggcaccactgaactccagcctgggcaacagagtgacactctgcctcaaaaaacaaacaaaacaaaacccccaaaaagaaaactcaacgttgaatctctagagtagacacctcattctcatggccctaaatcaggaatgagtaacctaggtaaaggaaatctacacacagcatttcattaagtactcttattttattagtaagtactcacttattttgcttagtgtggtcctataatttcaagttccatactccagacaaccaaacgcatgcaaaaacaactgaaagtagaaaacttgcatgaatttaaatttcagttccatttaacagttcagcatagctggccacctgttatgtactgggcactagatacaaagatggttagagttagacacacagtctctgccctggacaagcttccacctttcttttttcttcctatttgtacttactcacttgaggatctatagtctggctgactttagttgcagttttttgcaagagtaaaaaaaaaactgctcctcggggaccatttgtcatacaagggtttcacccaggtctcaagactctatgcccagcccttcatgttccagtttcagtacttggtgttccggagggtactgttgcccgagtctgcatcttctgtctaaacttttagggccaagggacaggctgagctacacagcccctccatcgtttaaggagcatgcgacaaatgaaaacagaggtgaagtagccagtaaacccagtgaactgtgagttcttctcatttatcccatgttgttattcctgccactttaattagaaagacatcatttagggaacaaatgaatgttggtgatttgagtcttttcagcatgatcagggaagatgaaagtcgaccctaggtcaaattccaacttcattgcttaaaagtggaaaacaagcgtctctctgttctctgaggaaatgaaaataaaggtccatttctcagttgaaggtattccctctatttacatttatatttttttccttaggtcataattcctttgttgtgttttttttttttttttttttttgagatggagtcttgctctgttgcccaggctggagtgcagcagcgtgatcttggttcactgcaacccctgcctcccaggttcaagcaattctcctgcctcagcctcctaagtagctgggactacaggcatgtgccaccatgcccagctaatttttgtatttttagtggacacagggtttcactatgttggccaggcttgtctccaactcctgaccttgtgatctgctcgccttggcctcccaaagtgctgggattacaggtgtgagccaccacgcctggcccataattcctttatgttttgtttgacatttgaaagctgtattttataagattttcctcgacatgtaccaaggttactgattcacttaatttctttttatatgtgtaagaacccaattctaaactcctgtaacaacagtttctaagtatcctttttgtatttagtgtttctggttctaacagcataatttctttcagcagtgtcataagtatggctaaacccattggtctatgcatgcctaacagtgcccacatcatggccagcaataccatgcaagtggaagagccacccaagtctcctgagaaaatgtggcctaaagatgaaaattttgaacagagaagctcattggagtgtgctcagaaggctgcagagcttcggtaagagtgtggcactccatgcctcaaaccaaaacgaactgaaaaagctaagagattcttatttatacctttcctccatctcagaggaaaagagtgtttgggattaaattcaatcggagtagtagacacggagtccctcgtaggttaagaaatggattaacctgcgggcaccatggatcacgcctgtaatcccagcactttgggaggccgaggcaggccgatcacctgaggtcaggagttcgagaccagcctcgccaacatggagaaaccctgtctctactaaaaatacaaaaattagccaggcatggtggcaggcacctgtaaatcccagctactagggaggctgaggcaggagaatcacttgaacctgggaggcagaggtttcagtgagctgagataacgccattgcactctagcctgggcaacaagaacaaaacttggtctcaaaaaaaaaaaaagaaaagaaaagaaaagaaatgaattaaccttctgggcgcagtggctcacgcctgtaatcccagcactttaggaggccaaggcaggtggatcacctgagatcgggagttcaagaccagcctggccaacgtggtgaaaccccgtctgtactaaaaatacaaaaaaactagccaggtatggtggccggtgcctgtaatcccagctactcaggaggctgaggcaggaaaatcccttgaacctgggaggcggaggttgcagtgagccgagattgcaccattgcactccagcctgggcaacaagagcaaaactctgtcaaaaaaaaaaaaaagaggaaagaaggaaggagggagggagggaaggaaggaaggaagggagggaggaaggagagagagaaagaaagaaagaaagaaagaaagaaagaaagaaagaaagaaagaaagaaagaaattaacctaaaggagataagtttatgtataaaaggatatttgctgcctcactatatagaaggaaaacgacttcatcctcatcaccagatagggattcttagccctctctgtgcataaattcctggaaaacttttttaaaaatgtatttttcagacaagttttagttttatagcaaaattaagcaggaaatagagttcctgtatacccattgcctccatacacacacagcctccccaactatcagcaccccgtaccagagtggtgcatttgttacaatcagtgaaactacattgacacatcattatcacctgaccatcatttaatagtttacattagggttcattcttggtgttgtacattctttttttttttttgagatggagtctcgctcagttgcccaggctggagggcagtggcgtgatctcggctcactgcaagctctgcctcctgggttcatgccgttctcctgcctcagcctcctgagtagctgggactacaggcgcccgccaccatgcccggctaatttttttgtatttttagtagagacggggtttcaccatgttagccaggatggtctcgatctcctgacctcgtaatccgcctgtctcagcttcccaaagtgctgggattacaggcgtaagccactgcgcctggccggtgttgtacattctatgggttttgacaaatgtgtaaggacatgtatccatcattatagcatcatacagaatagctttactcccccaaaagtcctctgtgttccacctagtcatgtcttttacctccagtcctggcaaccactgatctttttactgtctccagttttgcctcttctagaatgtcatatagttgggattacacagtatgtggccttttcaaattggcttctttcacttagtaatatgcatttaagcttgctccatgtcttttaaggtttgaaagctcattttttcaaaacaccaaataacattcgattgtctacatgtaccagtttatttatccattcagctaccgaaagatgtcttagttgcttccaagttttggcaattatgaataaagctgctattaacattatgtgtcgttttttgtatggatataagttttcaacctggagatattttaaaaccacagatccaggccgggtgcggtggcttatgcctgtaatcccagtactttgggaggccaaggtgggtggatcatttgtggtcaggagatcgaaaacagcctggccaacatggtgaatccccatctttactgaaaataccaaaattagccgggtgtgatggctcatgcctgtaattccagctacttgggaggctgaggcaggcgaatagcttgaacccgagaggcaggggttgcactgggccaagattatgctactgcactccagcctgggcaacagagcaagactctgtctcaaaaacaaaacaaaacaaaacaaaaaaagaccataacagatccctgggccccatctctgagattccctttcaattatttggggggtagaattcaggcagtgtaattttaagatctctccaggttattctaatcagcagctagacagggaatcaatgagatagagtggagtgaacccaaatcctccccagtatctctttcaatctttcaaacaataaagaaaacgtgagctcctaggttcaggaataatagtctttttttttttttttttttttttttttttttttttttgagacagagtctcactttgttgcccaggctgaagtgtagtggcaccttgtcagctcactgcaatctccatcttccgggttcaagcaaattctcctgcctcagcctcctgagtagctgggattacaggcacccaccaccacacctggctaatttttatatttttagtagagagggggtttcaccatgttggccaggctggtctcgaactcctgacctcaggtgattcgccttcctcgacctcccaaagtgctgggattacaggcgtgagcccctgcgcccagcctaatcttctttctattattttattttattttatttttattttccgagacagagactcactctgtcacccaagctggagtgcagtggcgagatctcagctcactgtaatctccacctcccaggttcaagtgattctcctgcctcagcctcccgagtagctgggactacaggtgtgcgccaccatgcccagctaatttttgtatttttagtagagacggggtttcaccacgttggccaggatggtcttaatctcttgacctcgtgatccacccgcctcagccttccaaagtgctgggattataagcgtgagccaccgtgccgggtgtattttactattattattattattatcattattttttgagacagtctcactctgttgtcgccaggctggagtgcagtggtgcaatctcggctcactgcaacctccccctcccaggttcaagcaattctcctgcttcagcctcctgagtagctgggactacaggtgcgcaccaccacacccagctaatttttgtatttttagtagagatggggtctcactatgttggccaggatggtctcaatctcttgacctcgtgatctgcccgcctcaacttcccaaagtgttgggattacaggcctgagccaccgcactcggccactattgttattttttgagacagaatctcactctgttgcctaagctgatttcagctcactgcaacctccgcctcccgcagttcaagcgattctcttgcccagtgtccatagctgggatgacaggcttatgccaccacacccatctgacttttgtgtttttagtaaagacaaggttttgccatgttgcccaggctggtctccaactcctgacctcaggccatctgcccgcctcagcctcccaaagtgctgggattataggcgtgagccacggtgcctggttcataatcttctttttaagttttctagcacgttcaaacctcactggtttctctaaggaaacggctgagacctagcttgacattgcaaggtttgtgggaaattatgaacaccatcatttaaaaaagtagttattatcttttctcataacataagcttaaggttagtgatctctatcaaatcttggctggcgtgatgagaaatgggagaaaggagattatttactagactgtacatacaccacatacttgtgttctagtgtgggtaagacgggaaggcaagagacaagagggaggtattcttactagggcatagtcaaggagaaaatgtctttaattctatccatgttcagacagaataatttagcgcctttctctgcagagcttccattaaagagaaggtagagctgattcgacttaagaagctcttacatgaaagaaatgcttcattggttatgacaaaagcacaattaacagaagttcaagaggtgagttgccatcatcagctgtgctttcttggtggggggaaaccccaattaagagattcatattattttctccattttaaatatgagaagccacaattcagaaagacaatttataagtgatatcacacaatttataagtgatattcaaatccaagcctcacaactcggagtctatgcttttcccagtatttcccattagttctctattaagaggaaggctcaagctctgcctgctaaggtgaaataaagtggagttaacttgtgtaagggttacggtcccctacgaagaccacaaccagaatgtgattaaattaggaagccaaaagcagtcacagggaagggaaggaaactagccttttaattagcactttctgtgagctgtactctgtcccagatatttacagtcatgatcttttttaagcctgacaacagccctcaaggtaagtatatttagcattagcacacattagaaactaacatctgattggtggaaatagagtatcaagggtcaaagtaaggtcagcaccatccttttattgaacaaatatttatccagtaccaggaattgcaaagcactgggatacaaagattccaagggtaagtaagaaaaaactgccttcaaggagtttataggagtgagaaaacaagtaaacaaattcaactatcctatgcagggtatgggcaggacacaaaagagagagtagtcagacccaccagtgggtgaggtgctgatatggctgataagtggaggaacaccagggctcttgtctcacgcgaattagataaaacgacacggacacaggtggagcggctttaaggagcggagagtttaataggcaagaaacaagggagaagaaagacggaagaagctcccctgtactgagacagagggagaaggactccaaagcagagaggggagacctcatgtgccgggaaaagtggctgcttatatgagtaggcaggaggaggtagtgtctgatttgcatagggctcaggggattggtttgaccaggcatgtcactcatgtagcctgtggaaaaaactggccctcctaccctagtcttttaatatgcaaatgaagggcgccatgatgttctacacacgtggggatatgtgggggtggccatgttgccaggtacaggtcggggaaaggacaggaagacaagggcgggaatcgccatgtttgggtggacccagtttctaaagacctgtatttgcatatcaaaggttgccttcccggctgtaagagccagggctttcctgctagacaaaaaacgtttctggagctgctttaaaggacgagaaaactttccaaggaccccttttcctctctatctgcctaaaattatttttaataactcctttaacagtgccagatcagaaaaggattaatgactgggtgcggtggctggagcctgtaatcccagcactttgggaggtcaaggagggaggatcacttgagctcaggaattcgagaccagcccagacaacatggcgaaaccccatctctatcaaaaatagaaaaattagacaggcatcgtgatgtgtgcctgtagtcctagctactatggaggctgaggcaggaggattgcttgagtgcttgagcccaggaggcagaggttgcagtgagccgagatcccgatacggcacctcagcgtgagactttgtctcaaaaaaagaaaaaagaaaaggattaataaaggaatagatttgtgagttaaatactgaaatactaaaagattagcttgtgttaataagtgtgtaagagaagagggggctttccatgagagcagaggtgagaaacatcaggtctggtcatgaaggacacactaagaattttttttctcgttgtcattaaagacagaacatgctaggaatttagactttatcctacaaacagcagagagctatgtgaaagggttttaagcaagttgatatgatcaatttttttctctctcaagattatttgaccttttttaaaaaataaaaaataaatttaaaaaaaaagtttgggaggctgaggtgggtggatcgcttgaggtcaggagtttgagaccagcctggccaacatggtgaaaccccgtctctactaaaatacaaaaattaggtgtggtggggggcacctgtaatctcagctacttgggaggttgaggaaggagaattgcttgaacctgggaagccgaggttgcagtgagccaagattgtgccgcagcactccagcctgggcaacagagtgagactgtctcaaaaacaaaaacgaaaacttacctctcatatttgctacaaggattaaatgagataatatgtgtgaaatgattataatgatcatgatgtggcaggtaatgaaacacatagtaacacatagcaactactcaactaattatagctgttgttatgatcattcttttttttttactaaaactgaagagatctttctgaagtgtgctaagtaacagtacctaatttaagattaaacatttttcttggataatccaccaagtacaatgcaaatgttaataaatgacccttcattcttttttgagaaatggtgtgaatgattgcagtcacagactacttggcaagctagggcaggggaaaaatagcaacaattagtaaacaagtacacaaattgatttgttttgtgggatttttataatgtctttaaaaatgttaagcattatattacagtgataaatatatcatgaaattgataaatcaataaaataataataatttctttcttccaggcatacgaaaccttgctccagaaggtacttaatgagaattgagtctctgtttcttagtaaccagaataatcaaacccaaagaaatctatgttcatctccaagtaacataacaccagaatttagctaactaaatcaatgttattatgtcatatagtttctgttaaaaatgatactattatgattatcaaaagatacagatacttattgcactgttttcataaaaattgaaatatgaaattgtagttgagaaatatttggcatggtatttttaagcctattgctggagcaaattatagcatttgctcaaaacttcctaagagtattcttctagcatgtgtgaggtgatgagatataacaaagttgttgcaggtattctcagatggtcttaaatatttggccctattcaccactgtgagtgggctgcatgtgaagctaggtgaatgtctgtgcttaagaatcaccactaagacagagttccaaacgagaccacccagctgtgcctcaccagaggagtccgccagaaacacacacagaacttctggagttaacatgtcacttgtctaggtacaaacgtagtcatcataaaaaagcagtcaaatagcttagaaagtgaaggcagctttggaaggtggcaactaatttaaagctagggattaatttgaaccttgagaaaattaaggctcaagggccaggcgcggtggctcacgcctgtaatcccagcacttggggaggcggaggcgggtggatgacctaaggtcaggagttcgagaccagcctggccaacatggagaaaccctgtctctattaaaaatacaaaaattagctgggcgtggtggctcatgcctgtaatcccagctactcaggaggctgaggcaggagaattgcttgaacccggtaggcagaggttgcagtgagccaagcactattgcactccagcctgggcaacagagcgagactgtctcaataaataaataaataaataaatacaagaaaagaaaattaaagctcaaatgatgaactacaattgcccagaatggaaaccctacctaccagggaaattatacttccagagaaatgctagggtgaaaaacaaggttaacgaacagtacaaaggtaataagctattaatcaaagtcattctttgtgacatctgttagagaatgctagggttgctggtgtctggagaccactcgtgctgagtgatatgaccattcccagaggtactttccttttgacccagaatcagggaatcctgagtgcagcccatgaggccctcctcaagcaagtgaatgagctcagggcagagctgaaggaagaaagcaagaaggctgtgagcttgaagagccaactggaagatgtgtctatcttgcagatgactctgaaggaggtaaataataatagttgaaagataccatctacatttcaacttcagggatgttagaatgtgtatcttagcaacaatatgagtattgcattttttcaaatgacaaaaacgaagctccgagtagttaaatcatttgcttaagattacaccattagagggaaagcttggatttgtacttatgtctgtttttcaaagtccttgctctttcataatgttttgctgcttccctagcagtagaaacccagaaacagtgaagacttattttggaaaatcctcattaatcccaatacaagtttctagccgaccttcaattggttcaagtctttctagttggatggcttctcagacactggagatggtgatagaaagcctctcacccacgcccctccctgccatggacaggggaaatcctgtgcaggggaatagattttaacattttatctcaagggctactatcactcttagtttcaggagagagttgaagatttggaaaaagaacgaaaattgctgaatgacaattatgacaaactcttagaaaggtgagtaccacatttgggtcccagagcagtgttactatgaaagacattatagaaagttcattcctaatacctagcattaataaatatatggggaaattggtactcaatattgttagtgagaatattaatcggcagtcttttggaagggaatttgacactattaaaatgttaaatgtgcatatcctcttttttttttttttgagatggagtctcgctctgctgcccaggctggagtgcagtggtgcgatcttggctcactgcaacctctacctcccgggttcaaacgattctcctgactcttcttcctttttatttttttaaccagcaattccttttttctttttttgagatgtagtttctctctgtcacccaggctggaaaacagtggcattctaggcttactgcagccccagtctcccaggctcaagcaatcctcccacctcagcctccccagtagctgggactacaggtgtgcactgccacacctggctaatttttttctatttttttgtagagacagggttttgtcaggttgcccaggctggtctcaaactcctgggctcaagtcatctgcctgcatcagcctcctaaaatgctgggattacaggcacgagccaccatgtctggcccccaaattttttggggggctggggggaatcaaaatgaaaaaattctcttgtgtatgtgcaaatatatgtatataataagaatgttgctgggtgcagcagctcacacctgtaatcctaacacttagggaggcagaggtgggaggataacttgcgcctagaagttcgagacctgtctgggcaatatagtgagaccctgttctccacaaaaagaaaaaaaaaaaaaagaatgtgaattactgccctgatagtaatagcaaaaaaacaaaaacaaataaacaaataaaaaggaaaccactgataagagattgatcacataaagcatgttgcatcctcacaatgaagtgctatgcagctgttaaaaatgagatagatggccaggcgcggcggctcatgcctgtcatcccagcactttgggatgccgaggcggccagatcacgaggtcaggagttagagaccagcctgaccaacatgatgaagccctgtgtctactaaaaatacaaaaattagccaggcacagtagcgcgcacttgtaatcccagctactcagacagctgaggcaggagaatcgcttgaacccgggaggcggaggttgcagtgagctgagattgcgccactggacttcagcctgggtggcacagcaagacttcctctgaaaaaaaaaaaaaagatacattgtaaaaagaaaaagcaagctgaaaatgaatatgttaactctgacatggtttatgttatgtatctttatggttccacaaacctttgatgagataagaggattagaataaggcaaaggggcaccttcacttttattcttttttttttttttttctcttgagatggggtttcactctgttacccaggctgtagtacagtggtgtcatctcagctcactgcaacctccacctctcaggctcaagcaatcttcccacctcagcctcccaaggagctgggaccacaggtgcacaccaccatgcctggctaatttttgtattttttgtagagatggtgttttgccatgttgcccaggctggtcttgaactcccaggctcaagtgatttttccacctcagcctcccgagtagctgggaccacagccacacgccaccacacccggctaatagtttctatattgtgcagagacagggtttcgccagattgcccaggctggtctcaaactcctgggctcaagtgatctgcctgccttggtctcccaaagtgttgggattacaggcatgagccaccgaccctgggctattctatatgctgatgtattattctaatttttcacaatgagcatgtattcatgcattaattttataattaaaaagaactggaagtggcctggcatggtggctcattcctgtaatcccagcactttgggaggctgaggcaggaggatcgctggagctcaggagttcacgaccagcctgggcaacatgatgaaaccccttctccacaaattattttaaaaattagccagccaggcgcggagaatcacttgaacccaggaggcagaggttggggtgagctgagatcaggccattacactccagcctgggcaacaagagcaaaactctgtctcgaaaaaaaaaaaaaaaatagccgggcagctgggcgcagtggctcatgcctgtacttctagcactttgagaggccaaggcaggcagattgcctgagcacaggagtgtgagaccagcctgagcaacattgcaaaacactgtctctactaaaaatacaaaaaattagctgggcgtggtggcaggggcctgtaatcccagatacttgggaggctgaggcagggcgaattgcttggacccgggaggtggaggttgcagtgagctgagattgcaccactgcactccagcctgagcaacagagcaagactctgtctcaaaaaaaaaatttggctgggcatggtggcgtgcatctgtattcccagatactcagaaggctgaggcaggaggattgtttgagcctaggaggtcaaggttgcattgagccatgtgcagtgcagtgcagtgagaaagtgagactctcaaacaaaaaaaaaacctgtaagtaaaagaaaaaagtttttaaaacttaaaagtgccaggctgtgcgcggtggctcatgcctgtaatcccagcactttgggaggccgaggtgggtggatcacgaggtcaggagatcgagaccatcctggctaacacggtgaaaccccgtctctactaaaaatacaaaaaattagccaggcgtggtggcaggtgcctgtagtcccagctactcgggaggctgaggcaggacaatgtcgtgaatccgggaggcggagcttgcagtgagccgagatcgcgccactgcactccagcctgggcgacagagccagactccgtctcaaaaaaaaaaaaaacaaaaaacttaaaagtacctttgatctagtaaaaggcagcagggggtagattgaggaggtcttacgggagcatctgggaacaactgatgttcttcagctcagtgaaataaagcagtgtggggagtatccacttcgatagacattactctgtgatagacattactatttgcctctccccttcatcactcaaaatactattttcttgagtccttacatgatatatggtcaggcaatgccaagaaatgttaatacttgcctaagtaggttattattattattattattattttttttttgaggcagagtctcactctgttgcccagggtagagtgcactggtgtgatcttggctcactgcaacctctgcctcctaggttcaagtgattctccttcctcagcctcccaagtagccgtgaccacaggtgtgtgccaccatgcctggctaatttttgtggtttttttttttttttttttgagacaaagtctcactctgttgcccaggctgagagtgcagtggcgcagtctcggctcactgcaacccctgcctcccgatgtttaagctattcttctgcctcagcctcctgagtagctgggattataggtgccggccaccacacctggttaattttttgtatttttagtagagacggggtttcaccatgttgggcaggctgatcaccaactcctgacctcgagatctgcctgcctcagcctcccaaagcactggaattacaggtgtgagccaccgcgcccagccaatttttgtatttttaatggagatggggtttcaccatgttggccaggctggcctcgaacccctgacctcagataatctgcccaccttgacctcccaaagtgctgggattacaggtgggaaccatccagcctggccggtaagttatttatttatttcttgagacggaatctcacactgttacctgggctggtgtgcagtggcacgatctcagctcgctgcagtgtccgcctgctgggttcaagcaattctccagcctcagcctcccaagtagctaggattacaggcacctgccaccacacccagctaactttttgtattttcagtagagacagggtttcactatgttggccaggctggtctcgaagtcctgacctcatgatctgccctcctcggcctcccaaagtgttgcgattgcaggcgtgagccactgtgcccagcctggtaaattatttttaaaccacatttactaaaatgataaataagaaataagacataaaaagaaataattgtttgattattagtgtcatttcatttgtatgaatgaccaagaactagccatgtggctgggcatggtggctcacacctataatcccaacactttgggaggccgaggcaggtggatcacctgaggtcaggagttcaagaccagcacagccaacattgtaaaaccccgtctctattaaaaatacaaaaattagctgggcctggtggtgggttactttaatcccagctactcaggaggctgaggcaggagaatcgcttgaacctgggaggcagaggttgcagtgagccaagattgcacccctgcactccaacctgggtgacagctcgagattctgtctcaaaaaaaaaagaaaaaagaaaaaaaaaggaaccagccatgtgtattttatactcaaaatgggtctgctctgacagcttgatacaatagggtggaggatacagttgttgaaaagtttaattcccgcccttcagcatagtaatttataatctaggtcaaagacaaatattctctaaactcaccgttggtgaaggtagatggaggcatggggtttgagaaaaggaagattttgttcctcatttctaatccggcaggcctgagaaggtcttgatacatagttccctgactaaagaaagccatcatggtggagaagttccttgggaaatggatatgacttggggtgtttgctcagtcagatatctgagacctaaacagaaatggtactgagcaataactcagtaggactcaaaagttccaaggcagttggtaaatgacagttatgaataaagcaagggcagaaaaaaacatgtaggggagagaatgaggaactaggtccaggagatgctgaaactggataataaagacgtcatatcacaccccttggggtatccatctgagagcttgctttccattgccagcatgctggacagcagtgacagctccagtcagccccactggagcaacgagctcatagcggaacagctacagcagcaagtctctcagctgcaggatcagctggatgctgagctggaggacaagagaaaagttttacttgagctgtccagggagaaaggtaggctggaccttgaagagctctctcaaatgtggcatcctctacctctggtttgggagaagataacttgagccatcatttctttaatcccctcacttgatcctattcttttgtgggttgtaggtaactagaatgagaacactagcaatagatcagatctacaatcaggaaaacatgacacttacctacctctcatgtatactttttcctatataatgtctttccatttgagaagatgctagtttttgtttgtttgtttgtttgtttgtttttgaggtggagtttcgctcttgttgctcaggctcgagtgcaatggcacgatttcagctcactgcaaccttcacctcccaggtacaagcgattctcctatctcagcctcccaagtagctcggattacaagcatgcactaccacgcctggctatttttttttttttgtatttagtagagatggggttttaccatgttagttaggctggtcgtgaactcctgacctcagatgatccaccagcctcagcttcccaaagtgctgggattacaggcgtgcgccactgtgcccgacctgccagtttttaatttattatgttttttaaacgttcagtttattgaaagttttcttttgtttggtttggtttggttttgtttctgagagagtctcactctgtcacccaggctggagtacagtgatgcgatctgggctcacttcaacctctgcctcccaggttcaagagattctcctgcctcagcctcccgagttgctgggattgcaggtgcccaccaccacacccaactaattttttgtatattttagtagagacgagggttcactatgttggccaggctggtctgaaactaacctcaagtgatccacccgcctcagcctcccaaagtgctgggattacaggtgaaagccactacacctggctgaaagtattgaaagtgaatttctttgtcttttatccttctcatcattttagaggtaactggaatacttttttttttttttgccatccaattcttgaaattgagtagcaaattactattcttggttaccactgccagttcacccccgtcttaactcttggatctcaggagataggtatttggaacatttttaaatactgtcaaaaagaccttcatcttactactttttcctagcctggaccttaatatttagttttatcaaatttatatctcatcaagttttagtgtattcaaatagggaacggaaggaaaagaaatgtgtgaaatcaagaaaaatagaggcaagaaccatgtttaggagcacatgccaattagtatgtttgaagcacaaatgaagtcttgtaaggaccttcagggcaatctaatttaatcccttctctaatgcatgatggaaatgatctgctcactaaacaccgattacctttattccctgaaaaacacacacacagcctggtgtggtggctcatgcctgtaatcccagcacattgggaggccgaggccagcagatcacatgaggccaggagtttcagaccagcctggccaacatggtgaaaccccatctttactaaaaacacgaaaattagccagtcgtagtgtcgtgcgcctgtaataccagctactcaggaggctgaggcacaagaatcgttgaaccctggaggcataggttgcagggagccaagatcgcaccactgcactccatcctgagtgatggagtaagactgtctaaagagaaaaacacacacacacacattggaacacagaaatgcccatcctccatccaggccagggtgggtgtgaagatgggtgccacagagagctagtaacctagaagtcagaatggagtgggggtggagttggtgagatactggtttcgatgctgctgtcaaaaagtttggattaccctagtcaagtgattccctttctgttttgtgttgttattgttattccactttccactctaccattctgcaggtgtcttttgttttcggagtgcaagtagtatcacctcagtttactgagtcaataagctagagtcctcctctgtagaaataatagagaattgcttctcaaatttataacattaattaaaccttagtgggaagattaaattcacacttgatccaactctgaccatggtgataaataactacagaatttcacatttctggattatttttccccagcccaaaatgaggatctgaagcttgaagtcaccaacatacttcagaagcataaacaggaagtagagctcctccaaaatgcagccacaatttcccaacctcctgacaggcaatctgaaccagccactcacccagctgtattgcaagagaacactcagatcgaggtaagagcctctttaaacaaactagtccactctgcagagagatctctggcaaatatctctagggaagatgatgagattagaaaactaactaaataatattttgtcctgactgaggacactctttttttttttgagacagagtctcgctgtcgcccaggctggagtgcagtggcgcgatctcggctcactgcaggctccgccccctggggttcacgccgttctcctgcctcagccttccgagtagctgggactacaggcacccgccacctcgcccggttaatttttttgtatttttagtagagacggggtttcaccgtgttagccaggatggtctcgatctcctgacctcgtgatccgcccacctcggcctcccaaagtgctgggattacaggcgtaagccaccgcgcccggcccactctttttttttttttttttttttgagatggagttttgctcttgtttcccaggctggagtgcaatggcgcgatctcggctcactacagtctttgcctcccaggtttaagcaattctccttcctcagcctcccgagtagctgggattacaggtgcttgccaccacagccggctaattttttgtatttttagtagagacagggtttcgccattttggccaggctggtctcgaactcctgacctctggtgatccgcccaactcagcctcccaaagtgctgggattacaggcacgtgccactgtgccctgcttgaggacactttttggaaaactgtgagaaggcagagcgtagagaacttcatgagctccacccatttcttccactctttgcagctcataaaatttagaatctttttcagatgaggacttgaaaagatctgtggaagagcaaacagccattagtggctgtatcatctcccttcactgctgctactgaacatgagaactaggggaaagagcacttgtgaagtcatacaggtccttgtttacattttggagtagtttctgctgctggcattttactactaccaacaactgttttatggagaatcattattactttacctgtcatatttatactcccttttaccaatgcgtttccctctacagccaagtgaacccaaaaaccaagaagaaaagaaactgtcccaggtgctaaatgagttgcaagtatcacacgcagagaccacattggaactagaaaagaccagggacatgcttattctgcagcgcaaaatcaacgtgtgttatcaggtgcaaggaaagatggtacaggaaggggatggataacaggaacgtgggaaccactcacaggactgggaatgaagcaagacctaagtttccagggctgataccaggtgatgtgctatcctgagcaaacacacaatggctgtcctttgaagaacttgaggactcacacatgcccacggcaccttggcactaggagccagtgatggggccagcccatgccaatggcaagcgtaaggcttctgggttcaaattttgccagtcctaggaaccaccctacctcaatgatagcacaactagtcttggaggggtctgcaaggaaatcaaaccttcttctagtgggtgaacctgcccagctaaggatagcagtcttcttgacctagccagtgccacattttttatgctctttggttttaggccactgagatagaaaagttcagacattattttgtttcaggaggaactggaggcaatgatgacaaaagctgacaatgataatagagatcacaaagaaaagctggagaggttgactcgactactagacctcaagaataaccgtatcaagcagctggaaggtattttaagaagccatgaccttccaacatctggcaagtcttagtcctttgttctcctcacttcgggacccttccacagctaacgcctgtgttccactctgtgtacttgtcaagaagggtgcctctcatacccttagcatatgacttatccttcttgttctttatcctatcatttttgttgtttttttttgcttgtttgcttttgagatggagtcttgctctgtcactcaggctggagtgcagtggtgcgatcttggctcactgcaacctctgccttccaggttcaagcgattctcctgcctcagcctcccaagtagctgggatgacagttgtccaccaccatgcctggctaattttttgtatttttagtagagatggggtttcaccatgttggccaggttggtctggaacttctgacctcaggtgatccacctgcctcagcctcccaaagtgatgggattacaggtgcgagccactgcgcccggcccatctttgttgttttaatacatgttagcagcttctttccctccatcatgtttttctgatttctctgtagagtttcaagtgggcccagcaattgcttccaggggcttaattctgttgtgagaatgagtatcactgttggctctcagggtggtggtgtaacacacaatctctctctctctctctcattctttctctcttgctcctctcccctgtccctctctcctagtcactgtttcctcaaagcagttttagtcggataatagaacttcatcactcatctcctgttattcttgtcagtgatttctctcttaaaagctctaaaatctttgttgcaatttgaggatgctgacagtgacagggcagctggctggacactgaatgcaagtttcatattgtggtgcctcctatacttagtgtagtcactgctgaccagagcctggtctcaggcttgtttgtcaagacacttggctttgttattatacccagtggtgaaagatctgactcacgaaaaccaaattaaccagaagctgatatttaaacccaaatgtttgttattttacaatagtggctattccactgcttccatgaggaacttggaaccacagttcagggcagccctctttcgggaagcaaaatcagtaagtaggtttcttagtgagcatggaatagaataaagggacatggctgggcacggtggctcacacctgtaatcccagcactttgggaggacgaggcgggcggattgcctgaggtcaggagttcgagaccagcctgaccaacatggtgaaaccccatcgctactaaaaatagaacaattagctgggcatggtggcgggcacctgtaaccccagatacttaggaggctgagacaggagaatcgcttgaacccgggaggcaaagttgcagtgagccgagaccaggccattgcattccagcctaggcaacaagagcgaaactctgtctcaaaaagaaaaaaaaaaaagaataaaagcacataagtgtctctgggccgtgatttatccatgtcagcgtgagtctgataaaagatcactgcttctacctacgtctgaagatttatttgctttagctaatagttctttgatcactggtaagactaaagagtttttctatgttcaccagttatttgtattattccttttgagaattgaccgttcctatcctttgcctacttcttaacagtatcctattgatttatagaaattctttttatgctgagattattactcctgcatcatgtaatgcaaaattttaagtatattatatttaattatattaatcttgttaattaagaaagtagtctccttattcgtgtgtgtgtgtgtgtgtcatgaagacattccgatgtgtccagaatattttattctactgctttaactcttaaaataggaccttcggcagcagcacactgtgttgactcaaatattccccaatttgaagcaggctatatatcaaagtttctgattggttggacttgggagataatacccagatttgctagactgtctacctatctttgcgtcccactgccaatatttcctacctctttccagtaagtctcttttcccactttttactccattactctttaacttataatgtactttttgccttcttatgttgaaaccaaattctgaacagaatgaaagatctcctgactgacctggctagagaaggagaagcatttcttggtgggactcaatgtaatgtcatagacactatgtctgcaacttgctattatctccacggccaatataccaaacttgtagaaatattcatgtttttgtgtttctagtacttctcttatggaattaccagttaatcatagggccacgatgtacaccaaaacaatgtcatatataagataaaatgtgcccccagtgttttcctaagtttagcatctactttccagtcactccttttgtaccttctccctaaagctggcattggattatttggctatcggaattcaatgctcctggttgtccttctgttgcttttccttttgaatcacgtggtttcttgaaataatcacaacttggacttccaccatgtgttttatatttcttttgtccaccctcctctaccctaagaaagagctccctaccctttaacggataggcagctttctttcccctctagaacagctcaaagatgttgcttatggcacccgaccgttgtcgttatgtttggaaacactgccagcccatggagatgaggataaagtggatatttctctgctgcatcagggtgagaatctttttgaactgcacatccaccaggccttcctgacatctgccgccctagctcaggctggagatacccaacctaccactttctgcacctattccttctatgactttgaaacccactgtaccccattatctgtggggccacagcccctctatgacttcacctcccagtatgtgatggagacagattcgcttttcttacactaccttcaagaggcttcagcccggcttgacatacaccaggccatggccagtgaacacagcactcttgctgcaggatggatttgctttgacagggtgctagagactgtggagaaagtccatggcttggccacactgattggtaagtgccgttggcttcctgcggctcctaagcaccaatgcagaatttcccaaagcctacagttgcttttctggtggtttcttattttcttcctttgtcttgttcttgatccttgccacaccatctgtattccccctgctttcacactttctgctacccaggagctggtggagaagagttcggggttctagagtactggatgaggctgcgtttccccataaaacccagcctacaggcgtgcaataaacgaaagaaagcccaggtctacctgtcaaccgatgtgcttggaggccggaaggcccaggaagaggaggtgagaaaaaagatgtgccgaggcatctcagaggagcctcagccaaacagctcatgagcacagttcagtcttccactctcaataagtgtttgttgaatgtgaatgaaagagaaaactgtcacaccacaactagtctggattattcccttggtcaggcttgagtctgaaatgaaagtatgcctttggagcgagctacatccttcatccttgctgtgaacagaatagcttctctgtgccattctctaagttaagtcgtgagtgccagtatctccctgaaataactgccagagccagtttgcaggcaggtgaagatcattaggtttcttcctgatccagttgggatagctgttctctagatcatagctcttcctcaccacagatcctaggcttcacctacaacagtctcaagctgcccttttcctcaatccatgaccaacatctttccagttcagatcggagtcttgggaacctcagaacgagctgtggattgaaatcaccaagtgctgtggcctccggagtcgatggctgggaactcaacccagtccatatgctgtgtaccgcttcttcaccttttctgaccatgacactgccatcattccagccagtaacaacccctactttagagaccaggctcgattcccagtgcttgtgacctctgacctggaccattatctgagacgggaggccttgtctatacatgtttttgatgatgaagacttagagcctggctcgtatcttggccgagcccgagtgcctttactgcctcttgcaaaaaatgaatctatcaaaggtgggagttcgaggttattacatcttcacgccctcttcccagtgttgtctccctgtcctgattctacttttctttgattacttgcttgaaacagtctctcttaaaacctgaagataaaggatttagaatattgtcaagagcaacagagcagaagacttagagcctcactacttgtgtggaaacactggcttcttctgcttcttttcagccacaaagacaacattcctaagtgggtagagccagcaacctgaattctatacctctgtatctgaataaacttctttgttttttgagatggagtttcgctcttgttgcccaggctagtagctgggattacagacatgcgccaccacacccggctaatttttgtatttttagtagagatgggatttctccatgttggtcaggctggtcttcaactcccgacctcaggtgaacctcccacctgagcctcccaaagtgctgggattacagacgtgagccaccgcgcctggctgaacaaactttttcaagctctgtaatgctgtctagtatctgtctttactaaaggcctgttgtttcttagtgcatgactacatagatatctgattataaactgagaccttaacactcccccatcattctctcacttcttttaaacactggacacaagttagagagatttccacaccagatcatgacaaacacaaatttcttggattttttttttcctcccaatgtggagctgagctccatactgtctttcctaacttttatacctaggattgtgggggtgtaccaagaggggtcaactctttgactacagtcctgggagggtgaggtgggggtatccatgttttccttaggaagtggggatagctgcagtcagaaacaaccatatttaacaagattctggatgctccaggacatgtatgcagctctctcctcaatacaactgcttaaaaaaaggctgacacttctggacacaactcctttgccaaacaggggaggcagtataagccacctgttaatcagtgttacaaatcagacatctggcatttcgaaagagccattttgcttaagttttcttgggaccacttgagggtagaggtaacagttttcttggtacaactaaggcacagtaagcatttgataatagtaataataatgcagccttgttcattggctggatgactgatgacaagcaagctgtactccttttcatacacccttcactatctcttcctgaatcctagagataacccatcttccctgattaatattctaactgcactgctgtttgattttacttctgagtgtatcatcatcgtaattatttaatggatgttaattaattgctgataaaatatgttgaaattaaaaatgggaaggaagtagataaggtgctgacaaatgctcacttgcttatttcatgtgatcaggtcttattaatatctgtttgtttctcaggtgattttaacctcactgaccctgcagagaaacccaacggatctattcaagtgcaactggattggaagtttccctacataccccctgagagcttcctgaaaccagaagctcagactaaggggaaggataccaaggacagttcaaagatctcatctgaagaggaaaaggcttcatttccttcccaggtaactctccaggactccacaggtagcagatctctgccaatcctatggagcagatttgaaggagacagtattatagttgaagtaggtgcagtggctcacgcctgtaatcccagcactttgggaggccatggcaggcgaattacctgaggtcaggagttcaagaccagcctgaccaacatggggaaaccctgcctctactaaaaatacaaaaaattagctgggcgtggtggcacatgcctgtaatcccagctactgggaggctgaggcaggagaatcacttgaacctaggaggtggaggttgcggcgagccgagatcacgccattgcactctggcctgggcaacaagagcagaactctgtctcaaaaaaaaaaagaaaaagaaattccctctgtgagtgtcatgtgtcctgtgaacttaatatatatccctcataatgccatgagactactgatggagcgaaagcctgggttttactgcggaaaagagagagaaatagcatttctcagctccatgaggagagaaatgaagtctaacactagttcccaaatccctttcttgtgtttctaggttgttaaactaccagcttgtaatgctatctctgatctttctattcaggatcagatggcatctcctgaggttcccattgaagctggccagtatcgatctaagagaaaacctcctcatgggggagaaagaaaggagaaggagcaccaggttgtgagctactcaagaagaaaacatggcaaaagaataggtgttcaaggaaagaatagaatggagtatcttagccttaacatcttaaatggaaatacaccagaggtaagaccttaaaaactctgaagcactaaattgtgggttgtagtgtccccagatgtattattctcagaggtagaagcagaagcagaagcagacacacaagataagcactaatcggccgggcatggtggcttcggcctgtaatcccagcactttgggcagttgaggtgggcagatcacctcaggtcagcctggccaacacggtgaactcctatctctgctaaaaatacaaaatgaggcctggtgcagtggctcacgcctgtaatcccaacactttgggaggccgaggtgggtggatcacctgaggtcaggagttcgagaccagcttgaccaacatggtgaaaccctgtctctactaaaaatacaaaaattagccaggcatggtggtgtgtgcctgtaatcccagttactcgggaggctgaggaaggagaatcacctgaagctgggaggtggaggttgtggtgagctaagatcgcgccattgcactccagcctgagcaacaagtgagaaactccatctcaccaaaaaaaaaaaaaaaaaattagccaggcatggtggtatgtgcctgtaatcccagctactcagtcgggaggctgaggtaggagaatcgcttgaacccaggaggcggaggttgcagtgagctgagatcgtgccactgcattccagcctgggcgacagagcaagactccatctcaaaaaaataaaaataagataagccataatcatagctaattgtggctagcttgtgtttccacaaacacaagtagtttaacaaacccctggactgttcatttcaatgtaatttaattcagcatattatgtactctacagtttatgcttaaagttttaatactatatatatttttaaacaagtactcactttttttttttttttgagaccgagtcttgctctgtcgcccaggccagagtgcaatggcatgacctcggctcactgcaacctccgcctcccaggttcaagcaattctgctgcctcagcctcccaagtagctgggattacaggcacgtgccaccacacccagctaatttttgtatttttagtagagacgaggtttcaccatgttgatcaggctggtctcctgacctcaggtgatccgcctgcctcagcctcccaaagtgctgagattataggcgtgagccaccatgcccggccaacgagtactaacttttaaaaattaaaaagagccagtattgtctgggcatggtgactcacgcctataatcctagcactttgggaggctgaggcatgcggatcacatgaggtcaggagttcgagaccagcctggccaacatggtgaaaccccatctctactaaaaatagaaaaattagtcaggtgtggtgacgggctcctgtaatcccagctactcaggaggctgaggcaggagaattgcttgaacccaggaggcgaaggttgcagtgagccgagatggtgccactgcactctggcctgagtgacagagggagactctgtctcaaaaaaataataataataaaaattaaaaaaataaaaagagctaatatttaaaaagaaggcaggaaggaaggaatgaagaaagaaaaccaagatattaccagctatgtagtattgttgttcttattctgaagcaggtgaattacactgagtggaagttctcagagactaacagcttcataggtgatggctttaaaaatcagcacgaggaagaggaaatgacattatcccattcagcactgaaacagaaggaacctctacatcctgtaaatggtattgtcttttaaaatctattttttttcctagcactttgggaggccgaggtgggcagatcacgagatcaggctttcaagagcagcctggccaacatgatgaaacccgtctctactaaaaatacaaaaattagccgggtatggtggcaggcgcctgtaatcccagctacgtgggcggcggaggcaggagaattgcttgaacccaggaggaggaggttgcagtgagccgagattgcaccactgcactcctccagcctgggcgacagagcgagactccatctcaaaaaaaagaaaaaaatatatattttttctgtttaatcatttaattgttttgccaagctagttatttacttttctccttcaccttagaatgctaaagttttcatggaaaattagtatgtaagacctgaggcccagttttgtgttacaagtgtgatggttgggttaaccaaggctggaattcttaaataagtaactttctcagtgtttataaaatgttattttgccccaggatttttttgttttgttttgttttgtttttgagatggagtctcattctgtctcccaggctggagtgcaatggcaggatctcagctcactgcaagctctgcctcctgggttcaagcaattctcctgcctcagcctcccgagtagctgggattacaggtatgtgccaccatccccggctaattttgtatttttagtagagacaggttttctccatgttggtcaggctggtctcaaacttctgaccttaggtgatccgcccacctcagcctcccaaagtgctgggattacaggcgtgagccactgcacccgacctagttttgattttctcattaaaactgtttgttggctggttgtggtggctcatacctgtaatcccagcactttgggaggcatgggcgggtagatcacctgaggtcgggagtttgagaccagcctgaccaacatgatgaaaccccatctactaaaaatacaaaaaattagctgggcatggtggcatctgcctgtagtcccagctactggggaggctgaggcaggagaattgcttaaacccaggaggcagaggttgcagtgagctgagattataccactgcactccagcctgggcaacagagcaagactccgtctcagtacaaaaaacaaaaaacaggacagtgtttgtcttgattattgagtttttggcaccccttcaaattttatgcctaaggtcagtgcctcacatgccttcctctacttctgacagtggtcagaatagtggttactgctaggagaaggggaagagggttatcaggaaaggacaccctttgggcatctggagtgctaccagtgttctatttcttggctgaacggtgatagagatgttcattttacaacaatttaataagttgaacatttatatttcatgggcttttctatgtgcttgaaaaatttaataatgagaggaaaaatataaaggtagatatggaaatattatgaaaagagagtctttactacttaaaaaagctttttttctaaatctctagaagcattttatatatatataattttttttttttttttttttgagatgaagtctctctctgtcacccaggctggagtgcagtggcacaatctcggctcactgcaatctctgcctcccaggttcaagcgattctcctgcctcagcctccagagtagctgggactacaggtgtgccccactatgcccggctaatatttgtatttttagtagagactggatttcatcatgttgtccaggctggtctcgaactcttgacctcaagtgatccacctgcctcagcctcccaaagtgctgggattacaggtgtgagccaccacgcttggcctaaaagtataatttttaagcttttgaatgtatttggcataacttcttaaatgggaagagcataaatgatttttctcatgagaaggataatttttctattgattatgtaatctgatttctccgtcaaagtttactcaatgtaaggaaggttaacaagaataaccaagcccaaaatttcccagagccaaatttacatgactggcaagaaatcctggttataagagaacaattccattcttatgatttgcagacaatggaatattatttagtcataaaatagtagaataaatagtaacagtgtatctagatagcttcagtgtatccagacctgaatgcggggttccagttatctccatactcccaatttacatttcttcaggtatttgattgagtataatctatatccactagctttttctccttgtagaatgtgaaatatgggaccagaaggtaatctaaacctcatgtactatatggtcatctatttatagtcataaataataaaagaagactatttctgtggaagcctaattgttagttattgttttaatatcgctgttctccatgaatttcaaaagatcaagactggccaggcgcagtggcttacacctgtactcccagcagtttgggaggcagaggcaggcagatcacctgtcaggagcttgagactagcctggccaacatggtaaaaccccgcctctactaaaaatgcaaaaattagccaggtgtggtggtgggtgctggtaaccccatctgagaagctgaggcaggagaatcgcttgaacctgggaggcagaagttgcagtgagctgagaccatgccattgcactccagcctgggcaacaagagcaatgcttcatttcaaaacaaaaacaaaacaaaaacctcaaaagcaccagttagtactcgcaagaagctaaaatctgcctggtttcagatgtctgagtggagctatcaagcaggatgctgtagttgttgaaaaagaagcttattaatcttttagacaaagatctaagggtattaggtaaaggccatcaagaaatgaaaagggcctgattttaaggccatttccacatatgtagacaaagccttgtgtcttttagcagcctttgcttttgctgcccgctcagaccttttccctttgagacctcagtgaaacagacaacccaagactttgaaattttacagaagaggcacagcttgccatccagttatctaatgctatgtaacaatctactccaaaacttaatgacttaaaacaattgtcatttctttggctcactactcggcatgttaggcaggtctcatgaagaaggctcatttctcctctctcaatgtggcattagatggggtagctcagctagggggctgatgggttcatcttgcaagatagctcaccctactagctgatcaggtggtcctggctgtcagtggttgcttgggcttcctcacaggttggtagctgagttccaagacagcaaggtacaagtccatggcatttttgtgttctggccttagaagtcacatagcatcactcctaccgtactctttcagttgagacagtccaaaagatccaccttaattgaaggggaggggacaaagaccccaccactcaataggagcagcgtcaaggtcagtcgcattgtaaggagagcagctgagataggagagaccatttgaggccacctttttttttttttttttttgagacagagtctcttgtcgcccaggctggagtgcagtggctcgatcttggctcactgaaacctctgcctcccggattcaagcaactctcctgcctcagcctcccgagtggctgggaccacaggagtgtgccaccaagccaggctaattttgcatttttagtagagacggggcttcaccatgttggccaggctggtctaaaactcctgacctcaggtgatccacctgcctcgaactccaaaagtgctgggattacaggtgtgagccaccacgcccagccagagaggccatctttggaaaatacaatctgccccacccaattgcacagctttacctcaagcttggccattttcttcagcccccacaaaaggacttcctttcttccttccttactctcacccttccttcctgtcttccttcctttcttcctttctgtttttccttctttccctttctttttttgagaagtgaatcctgtatgtttggcaagcttctgaataagtgtacctttgaaaaagagggtttgattcttagtaagtgaaggcaaaatctagacactcggaactagtgaccagacagtggattggagatgtgtgtgctgggtcttttcttgggctaaagtgctttgaaacagttctataactgcaacctcttctctagcagacaaagaatcctctgaacaaggttctgaagtcagtgaagcacaaactaccgacagtgatgatgtcatagtgccacccatgtctcagaaatatcctaaggcagtaagtacactggagtaatcattgcatacgagataagacgataaataatgacagtggccagtcatgggggctcacgcctgtaatcccagcaccttgggaggccgaggcaggcagatcacctaaggtcgggagttcgagaccagcctgaccaacatggagaaaccccatctctactaaaaatacaaaaaaaattagccaggcatggtggagcgtccttgtaatcccagctactcaggaggctgaggcaggagaattgcttgaacccgggaggcagaggttgcagtgagccaagatcacgccattgcactccggcctgggcaacaagagcaaaactctgtctcaaaaaaaaaaaaaaaaaaaaaaaaagcaataatgacagtgtgcttagtggccacacaagtgaagggcaatccagttttaatgaagctgatggaaaatgcaaattgtttagttaaatttatgtttcgtgtgaatgaaggtcggctggtacagtcagataaaaggatcattttcttgagatagtgtaaatgatgacttgcttcaatacttctgtcctatctggatcctttgcctcttactcccatatcctccattgtgtcctgtaattcatgcccagcctgaatggtacccctgcctttaagtccatctaaggaaaacgggtttgctttgggagatggagtctggaagagaggacaggattcttcatgggagggctcatggagatcattccatttctgctgttttttactcaacctgtaattatctattaaacagttcagcctcaaagctctttcagaactgatttaagagacacgcatcaaaaaaatataaaaaagaaaaaaaagccggttgcggtggctcacgcctgtaatcccagcgctttgggaggccgagacgggtggatcacgaggtcaggagatcgagaccatcctggctaacacggtgaaaccccgtctctactaaaaatacaaaaaaattagccgggcgtggtggctggcacctgtagtcccagctactcgggaggctgaggcaggagaatggcgtgaacccaggaggcagagcttgcactccagcctgggcgacagagcgagactacgtctcaaaaaaaagagacacacatatattaataaatatccacacatatattcagtaatcattgtgttctaaccttgtgggttacacatgaggtagaaaacaattactcttaagtcgctgctgcctgacacatttgtaggtcctcaatatttgttgagtgagtgactgaataatagattcagagtgaattgatgattatgaacttcattagaaacattaaataagaatgtaggatgacctaaaaccaaggaggtagattgtgtaatataaagtctgttgtaagaaatcagaaaagggaatttatggtttcttttgtagaggttggaaaactcttccttgaaagctggaacatgtgcttgagaactgcaggaaaatgaaggatattggagtgaggagaaaaaactcaaagtcagtagacttaaacactgaatataacacatagttcaatttcagctgaggtgtggtggctcacacttgtaatcccagcactttgggaaactgaggcaggcagattgcttgaggccaggaatcaagaccagcctgagcaacacagcaagacaactgtctctacataaaatttaaaaactagctaggcgtgttggctcacatctgaagtcctaagtatttgggaggctgaggtgagaggattgcttgagcctgagagtttgaggctgcagtgagccatgatcttgccactgcactctagcttaggtgacagagagagaccctgtctcaaaaacaacagcaacgacaaaaccagttaagtttctctttgtctgaacttttatctatcatatctttttttagatattatgtagttatctgacaagtgtttgtaagacagactggagccacagaatgttggaattagataacacttctatattaccaaggtaaagaagattaaatgatgtgtacaggattattgagttagtgaaagagctgaaactccagttgaggtttttaaactgcgcaacctctcaagtaaccaaaaaaagcagccagctgatcagcaaactcatcttgaactgtaacaagccagccagatttcattaaaaacattacctaaattaaaggctcctaagtaagatatccttttagaaaacttccttgtgtgccccaaagtgttacttgagaaattaaatatgagaaaggagcctatctaagcaaaaaattagtgttattatcaagttaaacgtacaacacaggcacatatatattaaattattgttatattccaaaatgtccaggcatgaaaggtagagggggttgaaagctcagagtcaaaacttgagttctgtcactcttctgcctggggtcagctgggataaatggaaatgcagtagagtgtaatgtttaagagcatggagatttggttgagacagtgatttagatcccagctctgctacttaactagatatacagctttgagagagttttttaacctctattaggccttgtctccttatctgtaaaatggtagtattaagtatacccatctgatactgatgtggcaagattaaaataagggtttaatacagtgcccgagacaaattaagccctaaatgatagtgaggatgagtgtgatgataatagtagtctcatttctctgacctactggagttctcaatgttaagctttttttttttttttttgagatagagtcttgttctgttgcccaggctggagtgcgtgcagtggcgcaatctcggcttactgcaacctctgcctcccaggttcaagagattctcctgccacaggctcccgagtagctgggaccacaggtgtgtgtcaccacgaccagctaatttttgtatttttagtagagacggagtttcactatgttggccaggctggtctcaaactcctgacctcaggtgatccacccacctcggcctcccaaagtgctggaatttacaggtatgagccactgcgcccggcctaggttaagcatttttttttttttttttttttttttagagtctcgctctgtcacccaggctggagtgcagtggcaccatcttggctaactgcaacctccgcctcccgggttcaagcgactctcctgcctcagcttcccaagtagctgggactacagacacacgctgtcacgtccagctaatttttttgttttgagacctagtcttgctctgtcacccaggctagagtgcagtggtgcgatatcggctcactgcaacctccgccccccaggttcaagcaattctcctgtctcaccctcccgagtagctgggactacaggcgcacgccaccatgcctggctaattttttgtatttttagtagagatggggtttcaccgtgttagccaggatggtctcaatctcctgacctcgtgatctgcccgcctcggcctcccaaagtgccgggattacaggcgtgagccaccgctcctggcctccctcttcttaacagttactaatgaggagggagcaatcattttcatttgctctatggtcccagattactgtttctttagcaatagtgaatatcgagaacctcaaaattttttctcttatcgtgtcaatttcaggtgtcaggaatttcctgacccttatgtatgccaggtagtaagttttggcagccctgccccccagccaaattaggtggcacatctgagctaataagccaaagggtgttatctggcactaatccttgcagggtttctgccagcaagttcaaatgagttgatatatatttcaatggttaatattactaattgcatactttctttgctgttcagccccaataaaattacataatggaattagctcatgtaaagaaagtattctgaatccaacaaaaaatattagattgaaccatatattgtcatactcatagataaaaaatggttgacaattgtcagttctgtatagtccaacctaatatgaatgaataaaacatctgtgtgtacttggatcaaattttaatcttattcatcctcccatttcaccattgttaccagaataaacttgatgtagtctgcatgaatatggacttctgattattgtcccaggattattagcaagtttaaaaaatttgctgggtgtggtggctcacgcctgtaatcccagcactttgggaggtcgaggcgggcggatcacctgaggtcaggagttcgagacaagcctggccaacatggtgaaaccctgtctacaaaaatacaaaaattagccgggcgtgatgacgggtgcctgtaatcccagctactcaggaggttgaggcaggagaatcgcttgagcccaggaggtggaggttgcagtgagccaagattgcaccactgcactccagcctgggcgacagagcaagactctatctcaaaaaattgttttgttttgtttttttaactaggcaggtgtggtggctcacgcctgtaattctagcactttgggaggccgaggtgggctgatcatgaggtcaggagatcgagtccatcctggccaacatggtgaaaccccgtctctactaaaaatacaaaaattagctgggcgtggtggcgcgtgcttgtaatcctggctactcgaaaggcggagaaaggagaatggtttgaaccaaggagtcggaggttgcagtgagccgagatggttcccctgcactccagcctggtgacagagcgaaactcggtctcaaaaagaaaaaaaagaaaaataattttagatgtacaggaaggtgctatgtaatgtttatttagttttactcttttttcttcttttttggtaatgttatgaaacatgtatttttcaatcaataatgttttggggttctatccatgtcgatatatttagctttttatagttccttcgtcttaactgctgatcgatattgcattaaaataatacatgacctttcgtttagacagaactctaatgggtaatgattgagatttcatactgtgtgccaagtgcttgatattcatgactctctcgggcttcacagcagccttatgagttattctttccttcaagtaattatgaagtgcctgttttagtaactgccgggctctgtgggcacaaaatggtggataagacagacttggtctcttctctcttgaatcttacatactactgagggaaaatatgtacatcagtgagcaaataagtaaagcagatagctctgagattctaagtactatgaaggaaataaatagggcgatataatagcaatgcgaggagttgaactaggataggtgttgaggaaagatttctctgaggaggggacgtttgaactgaaatctgaagaacgagaagggaagagctacccatgtactgggtagactgtactcatctcaggcaaaggaattggtaagtgtaaaggccctgaggtaggaaagagtttgatttacctgaggagtgggaaatcaaaagaaaattaaagtttctcttgcacacatgtatattattattcccccaccccctttcaaaggaggacagtgaagtctagggagaagagcttgctcaagggaatatttaatacagttttactgagtgtatactgtgtgccagacattatgccaggcattgtgccaggcactagatactcggtagagactttaatggggccgggcgcaatggctcacgcctgtagtcccaacactttgggaggccgaggtgggtggatcacttgaggccaggagttcgagaccagcctgggcaacatggtgaaaccccgtctctactgaaaatataaaaattagtcgggcatggtggcacatgcctgtagtcccagctactcaggaggctggggcaggagaatcgcttgaacctgggagtcagaggttgcagtgagccgacgtcgcaccgttgcactccagcctgggcaacagtgctagactccatctctaaataaataaatacagattcccaggagccactctagacagtctgatataacacagaggcttttatacattttttatagcaatcactatgagaaatacatttctgcagtatccaatactcttataaaagaacaagtttcaagaaaccaggcttactattaacatttgccatgcattctcctattccactagatagtgtcttatcctgtctatcctatcctattgtttcttttttaaaaagctagtgaaacccgctaatctgacccatcaaagtgtcaaaaaaaaaccagatttttcaaaacactgtatagtcaatagttttcttgatgtttgggagagttggatgttatgggagggttattaagagaaaaacatcaaatatcgtttttttgtttgtttgtttgttttttgagacccagtctcactctgttgcccaggctggagtgcagtggcactgcaacctccacctcctaggttcaagtgattctcatgtcagcctcccgagtagctgggattacaggcatgagccaccatgcctggctaatttttgtatttttaatagagatgcggtttcaccatgttggccaggctggttttgaactcctgacctcaggtcaactgcccgcctcggcctcccaaaatgctggtattacaggtgtgagcctctgcaccccgccaaatatcttcatttttaagaagcaccccagatgattctgatgcagaatcattgagagatcttgcctgctgaatttcttaggggcaggcacaggagctccacttgctttctaagagaagaaaagatggggtaagagccggtctttggagaagtaagggcattggcctggccagctagtgaaaagaagcatacaggagggcactcacagatagaggggagagcgctatggctggtagggaaccatcctggattgactcattactggtgtcacgatactgacttgcctgccacactgtggaaggaggagacttctgttggccttggtgtacttctggaaacttcctcctggtatccctgatgccaacatggacacagggacaattaaaagaaaggacagggtgatggcagcgactgtgaagtgggattgaaaatattggagttcctggccaggcgcggcggctcacgactgtaatcccagcactttgggaggccgaggcgggtggatcacgaggtcaggagatcgagaccatcctggctaactaaaccccgtctctactaaaaatacaaaaaattagccgggtgtggtggcgggtgcctgtagtcccagctactcgggaggctgaggcaggagaatggcgggaacccgggaagaagagcttgctgtgagccgagatcgtgccactgcactccagcctgggcgacagagggagacactgtctcaaaaaaaaaaaaaaagactggagttcctgtgggagggcagggtggtctggtggcctcctcagtggcatgcacttgagtgggcatgggaagccctgggcagctctttgctatagtggctgaagcagctactgaatctccagtatcagtcaggaggtcttttaggtcctaacctcaggaaaatactagcttggttttcatgaagaacactgtggccagttgcagtggttcatgcctctcatctcagccactttgggaggctgaggtggacagattgcttgagtccaggagttctagaccatcgtgggcaacatagcaagaccatatctctattaaaaaaataaaaataattgtccctatgtggtggtgtacctgtggtcctagctacttgggtgactaaggtgggaagactgcttgagatcaggatgtcaaagctgcagtgaaccatgatcacacaactgccctccagcctgggcaacaaagcaagactctgtctcaaaaaaaaaaaaaaaagttgagaaatagctgtttagaaatttatttatttgtatataatcatcgggtacaagcacagttttgctgcatttatatattccactgtggtgaagcctggagcgacgcacattgttcccaccaagcaacctcccatcatccaccctccccgccgctccgaatcagacatttttttttattctttctatatgtggagatgactgagaaaggctgtcctggagaaatgatccactggactgtgagagagaagagctgggttctctttataaatttcctatcaattaactatggcaattaagtcaagttgtcttttgatgccagttttacctataaaaggattctcagggaataatatagtagatagattatacctatggttgatttctagagagtaccgtaatgggttaattggatggcgtataagcacttggagcctcactaacctttaggaactaaataaacattttccttatcaggattcagagaagatgtgcattgaaattgtctccctggccttctacccagaggcagaagtgatgtctgatgagaacataaaacaggtgtatgtggagtacaaattctacgacctacccttgtcggagacagagactccagtgtccctaaggaagcctagggcaggagaagaaatccactttcactttagcaagggtgaggcatcctgtgtggttactggggtgaggaagtctgatgaacattgagactgagggtcagaattactctggatttttgtggggtgaatccagccatttcactttattattttattgttcaaagtgttgtgtgcatgtggtttaaaaacatcgaatggggctaaacattttacatgaagcaggcctttgtcccagctcttcacagatcacttcgcctgttcccacccttcctcaatccacggcttcccacatttcagctatatttatttttactttttgaggtggagtctcgctctgttgcccaggctagaatgcagtggtgtgatcttggctcactgccacctctgactccgagattcaagcgattcacgtgactcagcctcccaagtagctgggattgcaggtgtgcgccaccgtgcctggctagttttttgtgtttttagtagaggcggggtttcaccattttggccaggctggtctcaaactcctgacctcaagtgatctgcctgccttggcctcccaaagtgctgggattataggcgtgagccaccaagcccatcctatctcagccatttcttctgttatttacttccatcatatttctgagtattgatttttgttcttcctcttttcctgtttttttttttttttttttttttttttttttttttttttttgagatggagtctgaacatgttgctcaggctggtttcaaactcctggactcaaatgattctcctgcctcagcctcctgagtagctggaattacaggcgtgagccaccatacctggcttctgagtaacatttctattgcaatctcctgattcaccggctttagacttcctatctcggaccttaaaagttagctcttttgcactacactcatgtccctttccttcccatcgtaattgtatcataatttttatttaaatccatttaaattggttctgttattatggatatgtaaatattaattcttgcagaaccaagtagtatgcaatgattatatttctttacacgtattttttgcagcaatttttcattcgccttattttcattatacatattgtaattattttcgtgtccttcaacagtcttcccaaattttgaaataatcaaacctgtcaaattatctactcatctatttttttcctgaagacctctctccatcctcttgttctgctctagcccactgtttcattattactgctgctcatggagaatacgatcaaattctctcctataccagatttcttatctcctggttatcctctaatttattttcttattttaatggatcatattttcagtagtttttaaagaaagggcatatcacaagtgaaaatttgagaaagtcgtgcatgaaatctttttttcctaccctcatatttgattcaagtgtggaaatctttttcattcagaatttcgaaggagcctgggtgcagtggctcatgcctgtaatcccagcactttgggaagccaaggcgggcagattacttgaggtcagaagttggagaccagcctggccaacgtggcaaaaccctgtctctactaaaaatacaaaaattagccgggcatggtggggtgcacctgtaatcccaactactcgggaggctgaggcaggagaatcgcttgaacttgggagatggagactgcggtgaaccaagatcacgccactgcactctagcctgacacagtaagaatctgtcacacacacacacacacaaatgattttcaaagcagttggtccatgttattctagatccaggcaaggagtctaatctttttatgaaaactaccatgaataccactaatgaaagtcttggggctcacactgcaacagtatatgattctttgcttttttctcttacccttaatacagtaatagacctggacccacaggagcagcaaggccgaaggcggtttctgttcgacatgctgaatggacaagatcctgatcaaggacagtaagcatctgctttccactttgaaacaaaggagatattgagacagaaattcaaaagtttgagtttggttttgtgctgatgctgaatattttaataacttttttgagttaatttactcttaatgaatttcctatgtacttgagtataatttatatttgtgactacctaatccattacctaatcttataggttatttatttatttatttatttatttattttcgagacagggtctcactctgtcgtccaggctagagtgcagtggtgcgatcttggctcactgcaacctccacctccccaggctcaagggattcttgtgcctctgcctcccaagtagctagggttataggcatgtgccaccatgcctggctaattttttgtgtttgtagtagagatagggttttgccgtgttgctcatgtctggtcttgaactcctgcgctcaagcgatctgccctcctcggcctcccagagtgctgggattacaggcgtgagccaccgtgtccagcccatagtcttataggtttagttcatttctcacccatgccagcctgatgggccctttttttgtagcagcagtttacttgaatattgacaatgcccaaatggaataacaaaaagtgttgacattcttcttttttttgagacagtgtctcactctgttgtccaggctggagtgcagtggtacaatcttggctcactgcaacctccacctcctgggttcaagcgattcttctgcctgagcctcccaagtagctgggatgacaggtgcacgccacttgcctggctaatttttgtatttttagtagagacagggttttgccatgttggccaggctgatcccaaccccaggtgatccttctgcctcagactcccaaagtgttgggattacaggcgtgagtgaccacacctggtcaacaggaattttttgatgttgacataactaagtgaattttagatctcctttaaagttttaggaaagctggttgtccttattattccaataatctgaagaaggcctcctttcagagtttccagataaaatgtgggacatacccaaaaaaaaattatttggtcgggtgcagtggctcacatctgtaatcccagcactttgggaggctgaggcgggcagatcacttgaggccaggagtttgagaccagcctggccgacatggtgaaaccccatctctactaaaaacacaaaaaaatcagctaggcatggtggcacatgctggtaattctagctactcaggaggctgaggcatgagaatcatttgaatttgggaggcggaggttgcagtgagctaagattgtgccactgcactccaacctgggtgacaaagcagactctgcctctaaggaaaaaaaaaagttatttgttgtttagctgaaattcaaatttaaataggcatatggtttttgtttttgaaatctgttatccataccgcctgtgcatgtgtgtgcataagaaataatatggggctggtgttttatcttatttttaatttttttgtttgtttgttttagagacaggatctcactatgttgcccagctggtctttcagctcctgggctgaagcagtcctcctgccctgcctcccaaagtgctgggattataggcatgagccactgtgcccgacctggtgttttaattactttttgaaaggcccaatacttttgtttcatctgcttttactttgtctttggttagtcatagaaagaactgaaaaaggagccagatgaaataaacagtgactctgacttcagcatcactgtgggcttaaacagatgtaagcttacagagaacttttggacatggaaagtgatttggttctttcctttctgtgctaatgtcaaatttagctttcacttttttttccccagcatttccagaactctctcttcctttattcccttacagtgataatcattttctactcaattttagattcgattggtattacctttggctttctttttgccagtatggtctagcagacagagcaggctttgtaatcagaccaaccttgtttttattccagactctttgacttactagctctttgatctttttgatattacttaatttgaaggctcttgtgagaataaaattgagctaatatagtttacataaagcacttggtattgtgcccggcacattgtaatgctagttatcatccctttcctatgcaaattgggatgagggagtcagcattatcacttcgcattgttgaagttctcaataatgacatagaaacatagttacaaatgaatattgcctaatgggctgagaatggatccctttaaagtaattcctttgtttcagtttaatcatatttagctgtgcttttaaaagcttgaatttttagtcctattcctggcactctgtattagctaccaatatttgcttttaaaaattaataaaaatatgaaaaatcaagaataggcaaatccagagagatagaaagtagattagtggttcaggagctagggaaggagaatggggagtgactgcttaatcagtacagggtttctttttcttttttcttttagagactgggtctcgttctgtcacccaggttgaagtgcagtggcatgaacacagcccactgcatcctcgacctcctgggctcaagtgatctcacctcagccttccaagtagctgggactataggtgtgtgccaccatgcccggctaattttttattttttttgtagagacggggtgttcctatgttacccaggctggtcttgaactcatgggcacatcccatgatgttccctcttctaaaaggactgttactgcttaaattataccaattcctgacttttttgcttattgtcattttgtaaaatggaggcaagggaaaagtgattcagagaagacgttgtattgtttatgattacttttatccttattttatttttgaagcattaagagtatcaacagtgctgaattaaatgcaatttctttttagtttaaagtttacagtggtaagtgatcctctggatgaagaaaagaaagaatgtgaagaagtgggatatgcatatcttcaactgtggcagatcctggagtcaggaagagatattctagagcaagagctagacagtgagtcatttttttttcagttctaattatttccaaggaaatcatcctaatagtgaatatattttatcttcaatacataattattactatgaagttgataagacacaaagtggattgaaatcttatccctacaactgtatttatttctggatccaacattaaagtagtcagttgtgtatttttacccccatatacctgattacaactagaattgattttgaatctacaatgtttgaaaaggagatttttaaaaagacaagttattttcatttcaaatttatacatcagaattttggacctctcttgagcattttcgtataggcagctgatgcccattctttatgttatcatgcatccagtcttttttttttttttttttttgagatggagcctcactctgtcgcccaggctggagtgcagtggtgtgatctcagctcactgcaacctctgcctcccaggttccagctgttctcctgcctcagcttcctgcctcagcttccatggtgtgccaccatgcctggctaatttttgtatttttagtagagaccgtgttttaccatgttggccagactggtctcgaactcctgacctcaagtgatctgcttgccttggcctcccaaagtgctgggattgcaggtgtgagccactgcacctggcccatcttgtctcttaaaaagacattaactgtctcctctttcctcacattcactggtcattaagtcttatccattctacttgtgaattgactatgctctccttactacaattttttttttttttttttttgagacagagtctctctctgttgcccaggctggagtgcagtggtgtgatctcggctcactgcaacctccacctcccaggttaaagcgattctcctgcctcaacctcctgggtagctgggactacaggcacctgccaccacgccagctaatttttgtatttttagtagagacgggctttcaccatgttgcccaggctggtctcgaactcttggactcaagcaatccaccctcttttgcctcccaaagtgttggcattacaggcataaaccactgcgcccggcctccttaaatataattactataatttctttcttttttttttttttttttgagatggagtcttgctcttgttgcccaggctggagtgcaatggaccgatctcagctcaccacaacctctgcctctttcttaatcaagcgattttcctgcctcagcctccctagtagctgggattacaggcatgaaccaccacgcccagctaattttgtatatttagtagagatggggtttcttcatgttggtcaggctggtctcgaactcccaacctcatgtgattcgccctccactcagcctcccaaagtgctgggattacaggcgtgagccaccgcgcccagccatataatttctaaactggtcttcctgccaccggtttcttctaccccatttccatctactatagtaaatacataatacatttgatcactgccttcttcttaaatccttttacagtttgctatagatcagcatgttttaaaaacatttgtatttgagtacctttagttgggactgcgctgtccagtcttcactgttcccattaccttacatagctgggatgtcacctatcttatctgctaggaccttcagacacttaagattatccactagatcaatgtttttcaaacttccagacacacaccccattagtggatgtgaaactgaattagtaaatcacaaggaaatttgaaaaatgcaaaccaaaactgtgggaaagaaaacaggaattaaaggccaggcgaggtggctcatgcctgtaatcccagcactttgggatgccgagatgggcggatcacctgaggtcaggagttcgagaccagcctggccaatatggtgaaaccccatctctactaaaaatacaaaaaaaattagccaggcatggcggcggacacctgtaatcccagctactcggaaggatgaggcagaattgcttgaacccgggaggcggaggttgcagtgagctgagatcaagtcaccgcactccagcctgggtgacagaacaagactctgtctccaaaaaaaaaaaaaaaaaaaagaaaacaggaattaagagtacatagcacatattgtcttgtgaaacttgttttatgtattgtttaatgaatcatggtataaaattattcttactgatcattataaacattttttgaggaatactcctcagaccctaaggtttacaaagttcaaatgttagataagattctaattatattcctctagtatctttccaactgtgatccttagtctttttcctcatctataaaacgggaataacagcagtctctatcttactgagttgtgaagattaaggaagcacttaaataagggattaaggggcttagggtagtgcctggcataaggcaagtgacgttatctttgtgggctattttccaactcactcctatccccattcctaaacatgctatgttcttcctgacctccatgccatttgtatgtgcacagggaaaatccacttaagacttttctggtgatttctccagaaatcctttccaatttgtccattctggtgcagatgcctcgttatgtccccaaagcaacttgtgcttccatttattatatagcacctatacactataccattttcctttctccttcactagattgagtcctcttatgaaatgggtaatttcattcatttagcatccccagtacctaacctgacaaataccaagtatcaaagtgttcaactgagtgatgctgtttttttccctttcccaacagttgttagccctgaagatctggctaccccaataggaaggctgaaggtttcccttcaagcagctgctgtcctccatgctatttacaaggagatgactgaagatttgttttcatgaaggaacaagtgctattccaatctaaaagtctctgagggaaccatagtaaaaagtctcttataaagttagcttgctataacatgaa

SEQ ID NO: 1251 - DNA, 202696 bp, Homo sapiens
attaattgtggctggacgcagtggcgcggcagtttaattctccggcggctgcagattgacgggacgagatggtcctggcagggctcatcaggaaactcggtaactgtcagcttgcccctcgcccaaggcaccccccgcgctctggccacttgctgagaatggtcgtgtcacgtttccgcggccggccgctccgcgaccgctccctctttcacccccgctttgtcaggatagcccccggggacccatctcggactttgtgtaaacttcgcggttcgcgtcccgaaggcaccagtggcctgcttctgaaaaaaactggtttattccgtcttcacgccgctcctgcccacagcataaataacgtagtctctttgcagtcgggaaataaaatagttttgtgccgttcgttgacaggtcatcagctggccgagatcagggagcgcgctctcaagagtattctctgcaagattgagcacaacttaatctgctacgctgatctcattcaggagaggcaactttttcttcatttgctggaatggttcaatttcccgtccgttccgatgaaggaagaggttctgaacctgttaagcagattggttaaggtagggtcattttgaaataaagaaaataatcagacgagtgacttgtttcttagtcatttaattgtagcgtttattgaaagttaaataattggggttaaaagtttttttaatcaaccagagatgtttaattttaattaatctgggtatatggttcatcttttatttgtgatactgaatcccacatggtctctgctgtgctcagaagtaacacagaacttcttttgagttttggtatgttctgtgtttttgagttatctttggaggttaatatttgtattctgtttttgttttctgacatttacatcttaaaaactagatatgtcagtatgaaagggagcactttaaaaataatgttacataaccgtgattcataaataccaatgttaagttgcttgcccatatgcttttagattggtattcttatgcctacctcaagagtagttagttatcggggtcagatatcaaagtgtaagtttaacctttcaaaactaaatcactgtacaatggtagaggaatcttaaactactttgacatcctgttgaccggttggggctgggaccataaggtgagtgtcagtggaaaaaagtaacccattaaaaaaataagagtagggattgataatgtgcatttctagcgttcagtgtgttggctcatctttcataaatgttatcaagtgttggatgtatgtctctataggtgtatgtgctcctcatggaagtgccttacttcggggcagagccatgaaggatttgtttttcagaaaaggaacatctgatataccaaaaataattttatgttttgattgctgtaagttatagagattttgatacagttattctcaagatcatcctcttcttattttagtatcccccagcagtccaacatttggttgacgttggtgcagtagagttcttatctaagcttcggtctaatgtggagccaaatctgcaggctgaaattgatggcattctggatggactttttcttcttccttcggaagttcctgcactatcttctgcctcataccaaaccaatcaaactggtaactctttggaatctgttaaatacaaatatattaattctaatggtaaattttaaggaaagggagattagatttttttaaaaaggatttctcccacctcccccaaacttatttttcttgtgttaacttacatgattttgacctttttcccctcctctactgttagtcaaaggatggtacatttgcattaattgctttttgggtcaggcctaaacgatgccagtgactttgcttttatgaggccagtttgacagattatttttttggcaataacaatgtatttttattgagcacatgagtgctcattgttcttagtgctttatatttgtatttttgaccttgttcgtcatattggagtataatgatatctgtcctagctcatgatcttgttgtggggaccaatcaaaacgacataatgcaagtatttttatatgctgcagtccatcatgatatacttgttaaaatccaagtcaaagagacatggatttaagtctcagttctgctgctagttgtgtgaccttggctaaggtaattaacccttccaggcttcagttttctcattcaaaaactgggataataagaaagaacaccgggctgggcatggtggctcacgcctgtaatcccggcactttgggaagccgaggcaggtggtcagaagttcaagaccagcctgaccaacatggtgccccgtcactactaaaaatacaatacaaaaattagccggacatagtggcgggcgcctgtaatcccagctagtagggaggctgaggcaggagaatcacttgaacccggggggcggaggttgcaacggtgagctgagatcactccattgcactccagcctgggtgacagagcaagactccatctcgaaaaaaaaaaaagaacactttctcatagaatcgtcatgagattagatgagacaatgtctgtaaagtgcttagcacagggcccagcatgtatgaaatgtggctgtgttggctgctgtgctgctgctgttgtgttgttgttaatgcctagtatagtgccttgcacatggaatgcatttgaattgatttgaagaaaaacatcttcatgcaatttatgtgactgagtagtaaaagtaaaaaaaaaaaaaaaaagttttgatgcttaacctgttagaccatattttcttctctgccagtactgttacagcttcagctgtgggtactgcggttcacaacaacaatagcagctgtcatttattgagttttgttgtgggcattgaatacattgatttaaacacatcatcttgttaaatcttaaagcagccttttgactgagatgttattagtcttactctatagctgagaataaaagtataaagtaacttgccccacagtaccaagttttctaacctgtagcagatgcaggattctaacattgctttatctggctcccaaacctgtgatttttaacaatatattttacagtttcgaagacatcacaaataaagtagagtcttacactgtgaatttttaatctgattccttgcgggtgaaagtagaggaatggtttagggctaaatgttatttttctttattagtgttaggaactattgccatgaaaacttaaaattacaaactatagttttagccttttcctcattttcattgcagctgaactgctgaacatataatcgcatgttatagggaattgtaaaggtattgaaagataatatttgactcctttgtttttgacaactttctttttaaggtatgaatgaaaattgaagtgatcaggaactatataattggagtcaagggagagggagatggattaggaagtagagagggatagtccttgaatactttgtagcagattcttcgtgtacattctaacaaataactgtgtttggctaacagtaaaagtgagagggaaaaagcttcttaactggaagtgggctcaatgtgcacattttttcctctttagcaagatagatcattcagaaaaaaaactggacttttttttaatttttaaaatgattccaatacttaagagaaaacattaccacttaaagaaagtaagtttcacttttagcaaataaggaatcgacaatacagtaatgtttatttccttttcagaattgtcaaaaaaccctgaaatcttaacaggatattttccccaagacaaaagtaatttccagcagatggaagtgccgccacgaccagtgggtgtgtatatgtcgggaagtaaatcctgttgacttgggaagttgaaaattaatgtacttttttcgttattgtgaagatgtatttttaccaaacttgaatgtttcagcaccaaactatcattaaatgttttagttgtttcaagttagtttaggatatcgagtagaaatgataaaattttgtgttattctaaccatatttgaacaactgtgtagatggatggtattaatggcagtagtatgtcgtactgaatgaacatgagtttttttttttttttttttttttttttgagatggagtctcgctctgtcgcccaggctggagtgcagtggtgggatctcggctcactgcaagctccgcctcccgggttcacgccattctcctgcctcagcctcccaagtagctgggactacaggcgcccgccactacgcccagctaattttttgtatttttagtagagacggggtttcaccgttttttttttagccgggatggtctcgatctcctgacctcgtgatccgcccgcctcggcctcccaaagtgctgggattacaggcgtgagccaccgcgcccggccgaacatgagttttttgaggcattgtgccctgcactacacatgtcatctcatttgttctccagcttaacgatggcaccatctatccagttacgccagccagaggctgaagatcattttagtttcttttcccatttcctcaccacccagttaattaaaaagttctgatttagaaccctgtttctggaatctggaatctcatctccatctttttgtatctggctgtgttcagcctcagctcacatgccacctcatcagagaccttcctggtgattctagccagtgatcacttcctatgtgtagttttcttcctaacacattattttttattatttttgttttaagtttgataatagccgtgaacattgcattattttcagtgtctggaacaataccaaaaaatgtattaggcactcagtatatattctttgaaggaatgaatgaatcctcctggagtgtctttgagattggtattattagtgaccacattttactaataaagacactgagattagaaaggttgaaaactttgtccttggtgaggcagttaggaagtagttaagtaatcacgtacttaccattttcttgcctgcacagttaagttgaaaaggatatgttcaagagtatatctgctgatgtcacatattcaaatgaactccatttggaagcctctgttattaaaaagctttcatggaaactcacaggtggaataacaagaaagaactgaaaacttgttaagccattagaatactttaccttttcattcattgttaggcttgtagcaagctttgtttttgaggccagatggctgagaggcttaattccatcaagatgagagacatctgaagggagggggaatctctagggttggtaaaggatgggtgtctgaatgaagccgatgaaaacattaagggggattgagattgttacacttttatgtgagttgcagtttgtcttgattgagggtctggcttattttggacacatttttactgtgtggtgtaagcctgtccttccctccacccacctctccttatttccttagaaagtaaatcctgcttttatgttagcaattttgaaagaagtaactgtgctatgtttgggaatttaataatactgctatccacatttagcgattccatgctcttttcaaagcacttggcagaaagactgccatttggaaggacttatgtagatgctatttctcagtgttgccaccttaacttgtactatataagatctgttaaaaataacttgcatggggatagtttaaaactgttgctttctcagatttcttttaatcttgttcgaacactgatacttgttttttgaccttacggtcttcaagtcatcttcgcagaggtttaaaacacctgacaccatataggatatttgaacatggctagatatggtatatcattatgttttatcatttttaattttgaaaagttaaggttttccctaaatgtcagttccttttatgttgaatttaagtttgatgttctggtcagccacagggtaaaatagaaaatttaatggaaacttcatatgtcagtctgtattggattgtgtttaatgctcttcttctaatacttattttgatatcatatgagttctgtttaaattatgaaaagagaactctcttatttatcctgtgatagaacaaatttgcagctgaccttgtttggtatattttaggttactgtaagatgcagcctttattttgggacttgttttaaagggaaaacttactcttaacattgtgaatctgtcatctctttattctttgataccataagatttgctctttcactgacagtaaatcagactgtgaagtgcttgaagttttctacatttccttggctacccctgaccaccacagacagacatgtcctctcctctaatgaaaggtacggtgcttgatgtattttcaggtatttttgttcacttatagtcattaagtttgatagttattacaatatgttttaccaggaaaagatactagtggcagtgaaaggtagtaatggtcatatttaaatgatttttatttttcaaaaagctagccagaaaaaaattcctatttgcttttaatcaatctacacatcaagtttcttttatttatttatttatttatttttgagacagagtctcactctgtcacccgggctggagtgcaatggcaccatctggctcaatgcaacctccgcctcctgggttcaagcgattcttgtgccacagcctcctgagtagctggaattacaggcacgcaccaccacgctgagctaatttttgtatttttagtagagatggggtttccccacgttggccaagctggtcttcaactcttaatctcaagtgatccgcccctcttggcctctcaaagtgctgagattccaggtgtgagccactgcatttggcccacgtttctttttgtggttggactcttgtgtagtccttggtgacaggagttttctcttattggccagattctcttattggccattgcttatgcccttgattgataaaaatggaaaattgaacataaatgtagtctttttggcagaatatatttcaaaatgtgggcttcattaggagacaaattaaaccatgtggataaggttgggtaccactgatccaatctaatgtaatgactgttaattgattgctacccacaagagtaaatagctgatatatagagatttagagagtattttaatgtccagattcactttgtgcagtttcataaatgccacaatacacgagttatctgcttttttggggtataaatctggaaaataaagaccaatttactagggctaagtccagattacaggtggatgccattaagtgatttttaataatgacatgaattctcttggaacaacatattcgagaggcaaagtgcacatgggaaagggttaggaggttgtatgatctctcagttttgagtcagtcccaaaggcagagatggcgataatttctaatgcatgcctgtagatagtgaatggtggatagtataatggaactgggctgagagaaggggtgtgatttttttggggtggggagtgaacaactgccaatcctaggtgggcagaagttgataggtgtcctctgtatgggataagaggggagtcctaatctgattcaccttgagtggggaagatcagtaaggactttaattcttagaatttgcctctgtacttttgttctgtctcatttcttaatttatttggcagatttcctagaattgtgtgctctttgacctcattgaactcgttttgcagacttgtgataatctctgagggtacagtgtttagtatgatgtcgttcctgctcttgagagggtctagtggggaatgcaaaatcaacaggcagttaacaatatcacaaataatggacaaacggaaggagcactgccctagagttgtttattggttagggaaaagatctaggaaggcttttctggagaagtgatatctcagctgagacccaaaagattgttaatggagtcattgtgtcagtaggctacttagaatctggaatagatgaactcttcttaaaaatgattaacgctatgttttgtagctctttaagaagtagtaaccacactttaatctggaacacctgtgaactattgaaggatgttatcatgcaagattttcctgctgagattttccttcaaaggccaaaaattgttcaggtcagtgccctctataattgttttagattttgaactagagaactttttgcaataaagcaaattttgcagagtaggagttcttgggaaggaactttgtactcatgtttttaaaaagtgaagtatttggctatttaaagcacttattcgctaacttgggtggatagttatagttcttccaatagtagtagtttcatttgacacttgcagtccagtctggccaccttgagttaccatttatggatcacctaaatggtagagtagactttggacattgagattgtgcaggagcccttattaaaagtaagaatagcattgcttcttgagtatctcgtttatttaacgcacagtgctacatgctgggaaaatacagtagcggtgagtaacgcagatggattcttttctttttttctagtttattgcttgtatagtagagagagagggatccagggtggggaattgcaacatcttcacagcagccagtaatggctcagcattctcgctccacactcccagggctgaaatggactccagtgggtgccaactgttaatacctaggatcaaagctggcaaatgatcgcagaggaaagctgttaattactaaaatgtggttaaatggtttagatgcttgagatgaaaagggcttgctgtgatttttaaaatgttctctgtaatgtaatgtcctgagtggggaataatttctgtcttctctcagaatggttactcaactaacagattttagaaataggaaacactgactattctatttaaatgttgttgtcttattttattttgacccatctccttgctttatgccaagtcatatttgcccatttcagtttcttatgtcttacaaatatttggcaacttattttctcttgattattcacttaggcttacttacttaagctccacattctgctttgaagttgagctctttgttcccttagtaattttcacggctcttcttgatttcagagccttttatctctgttgaaactggcctttggagatggaaagcatcgcctggcattacagtcggtgtcctgcctgcagcagctgtgcatgtatttaagaaacagacttaactttcaccgagatccaggttttttctccaataaacacggtatttatttttatctgttcattagccactggtgttatttgtagattcttctgggaaccttccattatagttactgttagggtttattgtgtacgcattttcacaacataaactccccactcctaaatgtattcaaatgattatctttacagattgcgtgaatgacagaaactgccatgatctcttgagcctttttttttttttctggataagagatatttacaaggtgtttttcttttttctcccaaacttgcagagattctatatagtgttgttgggatgtagtgactcggatatttggtatggctattcatgtaggactttggacaatttagcaagttacatatagtgttaatacattgttttgtttgaaaaatattgatttgaattttatgaagagtatttttatgcaacttgcaatgtagtcaagtgttgcagcaatgtgagacttcagagaaaaagtgccacctaatggccaaatagagtaccagcctggcttcgacaaaaccagtaccatttaggatttttgtgagcttaatgcaacctgcatcgaaagtcaaatattatagtcatttgtcatcatgtttcatagttaatccctatttcattgggagtttcactgatcctgtgctacttgaatatttatgctttaccttggttttattctagatcttagagggtatggcattgtacaaatgactggtaatagagaacgtctgggtaccccatacttcaacagaaaaagagttacaatgttgatttaaaaagttgatatctctgaagaattgttaatgtatttaataagtatgtatttattacctgttttatgcccctgatattctagcctctagggaagtataacactgaacaaacgaataagatccaagcccttatgagcttctattttaaaaggctgggcacaggtgataaacaatcaagtttgcttgagataaggagaagtacttgaaggaaataaaaagggtgatgtgacagaatgtggttgggtaaacatagcttcatttaggatagtcagggaaagtccctcagaaagcttctattttaaaaggctggggacaggtgataaacaatcaagtttgcttgagataaggagaagtacttgaaggaaataaaaagggtgatgtgacacaacgtggttgggtaaacatagcttcatttaggatagtcagagaaagtccctcagaggaggtgacctgaagggtgacaaggaatcgtcactcgaagagctgcaagaagagtgttccagggaaggccaggcctcaaggttagcactgagggtgatgtccttgagcaactgaaataaagcccatgagagtggactgcagtgagctgggcagaagaggagaatgaggtgacatcagagaggtagttaggggccagagtatattggggcttgcagatctttttaaagattttatattttctttgaagtgtagtgagaagctcttggagagttttttttccccctctctctgactgtaaatgcttttattacctaattctttttttaaattggggtaaaataggtataatataaaatatgccattataaacatttttaagtatacaatatagtgacattaataacattcacattgttgtgcagccatcaccactatctgtttctaaacctcttcattatctgaaacagaaactctaatcattaagcagtgattcctcatttttcctttccccaaagctggtaaactctaatttactttctgtctctgattttgtctattctaggtacctcatctaagaggaatcatacagtatttgtccttttgtgtctggtttatttgtaatgttttcaagcttcatccacattgtagcttgtatcagaacttcattcctttatatggctgaataatattcctttgcatgtatatcccacattttattcatctatgcatttgtcgatggacatgtgggttgtacccacatttggcggttgtgaataatgcttcagtgaacattggcatgcaagtatctgtgcagtgcctggtttcaattcttttgggtaatacccagtgaataatagtgaaattgctgcgtcatatggaaattctatctttagctttttgaagaatcaccaaactattttccacagcagctgtaccatttacatttctatcagcaatatataaagcttccagtttttccacatcatcactgacttgttcatttttttcttttttaaaaataatcgtagtcatcctagtagatgtgaagtggtatctcatggttttgatttgcatttctctaaagacctaataattaatgaccaatgaatctctaataactttttatgtgcttattgtttgttcatgtatcttctttggagaaatgtttattaaagttctttgcccattttaaaaattggactggtttctttattgctgggttttaggttacttatatattctgaaaattaaacccttatcagatatatggtttgccaatatttcctcccactctataagttatcttaacactttcttgtaatgttcccttggtgtaccaaagttttagattttgatgaagtccagcttatctgtctgttccttggttgtttgtgctttcgatgtcatagttaacaatcgattgccaaattcaaggtcatgaagatttattttttccgctaagagctttatggctttagcttttatatttaggttgttgatccactttgaattaatttttatgtacagtatgaggtagccattcttggagagttttaagcagacgagtgcatgatctagtgtttttctgctttggtagtctctaatgttgtaactgaatgccattgactagaaggtcccatgtaatcaagtcagttagatataaacctaaatgtactaagtgaatacttatagaaaagtttgatctttgcttttgtttttacccctgtagaaggattcctactatcttaatttgttaatgtttttggaagaatgatacataaataccacatagtcagaagtctgtttctactaaagaataattttattttttctttgtttccccagacacagtttcccaaaattcttctttgtcttattgtcatgaagcaagaggtactcatcattcccagaatccttccccaggaagcagcagccctcggccttctgtggttgggcgcacaggccagcgacccagaggagatggccaggactgggatgcagcgtcctctaggtgactgctagcagtgtctctggggaaatgagaaatgccggttaacttgtgtgtgtgttaatttcagaaggagataattatttttctgtccttttttttttttttttttttgaaacattaacacaggtataggccttgtgttaaaccctggcttcatactttttttgaccatgatccacggtaaggacagataaatattacatcgcaactcagtgctcagtacttgaacatatgctctgtttatgtatatatatgtgtgtgtatgtgtcccccaaaacaaaatgttcacataatagtattctgatactatgtttgacacactgaactatattttcagttccgatttcattagaaaagaaatgattctgacccaataaattgtttttaccagctgcaaacggaatatgatcaagtttaaaagaatagctttaaatgatagatacattgttgatagtattttacacatatttttgtaagtcttataacaaatggataagtgtttactgttaaaaggaatggttggagaattttataaaataaggactccttcaaggtgaacaatttatggtatttgtttgtgtaaatacagatttttttcttttttttttttttttttttgagacaaggtctcactctcttgcctaggctggagtgcagtggcacgattatagccttgacttctgggctcaagtgatcctttcgcctcagcctcctgagtggctgggaccacagatgtgcactaccatacttggctaagccttttattttttgtagagatggggtctcactatgtttcccaggctggtctcgaactcctgggctcaagtgatcttcccatcttggcctcgtaaagtgctgagattacagacatgagtcaccatgcttggcccccagtgcttggcacccagattttcatacaccaactctgcttaaaaggattggtgtggtatttgtatgttaccttatccttgggtgcaaatgtgttagaaacatattagtctctttagtgtcattctaaaaaatgttcactaagttaagcattggtctgttggcttaattattttcttgcaatactgctactactgttaacaagctaatactgattcatacctgctgtgtgtatggtgttatgccctgtgctttgcatactttgtctcctttagttgtcctagaataggattgatattatatatagcattagtattattattatcatcctcattgaggtttagagaggttaagagcataacagttggtaaagagcagagctagggttaaataaaatgataggagagtctatgctcttagtccttatattgtagttggttgttcagccatgtttttctctttctcctgaagcctttctgcctcattctcttgtgtgcttcatgcttctaagttttcactcctgagtgaacagcttcctcactgaaacttcctttcagagttacagagaagcccgagttgtttccatattttggggtgcttggtatcttgaaattgaagaaacgacaaagttggtttataatttgggcaaatttaaatgttccatagcattaatatgtctcttgtgatccagcttcggttgtggataacatcaaaagacaaaattttgaggctctttgtaagtgtgaggctctagcctttctacactttttaaatccttactccagcactttacatccgaggtaagaactttttaatgaagaaagccaaggacaatgggatgttccgtttttttgggtgcatttttgaagtcactacatgatgtcgaatgtactaagtgaagtaatacatttcccatgaggtttttctagaaacatccttcatttactaacactggcttactcagaacagtggtgaaactcagaaaatctaggaaacggtatgaactattggttttgtctctacacgttgattacagaagagctttcctataaatctgcttatttccttttggaaatgaatgggttatcagtgctaatattgattcctactataggaatgttgacatgttttgagatatcagcctgacaagcaaaatatagatgcatttttggcttcatttacaatttagagtctttttttttttttgagatggagtcttgctctgtcgcccaggctggagtgcagtgtcgctatctcagctcactgcaacgtctacctcctgggctcagaagattctcccgcctcagcctccccagtagctgggattacaggtgtgtgccaccatgcccagcgaatttttttttttgtatttttagtagaggtgggatttcaccatgttggccaggctggtcttgaactcctgacctcaggtgatctgcccgccttggcctcccaaagtgctgggatgacaggcatgagccaccactcctggccttgagtcatctttatggaatttaatttcgtaaatttgtcaaagtttctacaaatctgaccagagttgaatgaagcagtagagttgtgacttgtatgaggcttctaatatgcgaggcagcagatatgcagtaaatctgtttggggattgtttctgtatgcaaggtttatcatttgtttatcttgcagtggaagtagtagtcatgctcatgtaaactccaggatatccgttcattcacctttggatatgggacacatagatctgccagagctggaaactgaagacacattggaactacaattccagcagctcagtcttccccagttttgtgtctccattctggaatcagctgttcctctcttaagaacaggttagttgttttagaaatcgtaattctgatataatttgtgtctgttttgtatttcgttaggattttcctttttttctcttctatgttagggcctttggaatctgtatttacttatcttttgggatataaatttctaaaaacctaataaggtctttattatttttaaattaaatgtggatgccttggagggctattcagcttgcccttccattttatgagtttttattggcacaggctttcatgcttattttttttttagaatttttatctattttttgcatttattcttgctgtcatctatttttttcttttttttttggactgtatggctattttaaatttgagcagtgacaacattcagcaactggaataaggtataaaaggtggactggcatgaatagaccagaataaaaaaatctttggcttttgctctttggaaactttttgattagctgtcagttgtttactcttcccattcatttcttgctacttaagccacttaacatgttaaaaacaaaactccaaaactggattcttacctttgtagtaatttttcttaaaaaagccacaaatattttgagatcccatttttgttcagatgtactaggaaaatttgaagaggttgactgaaatatacactggtatttaattgtaattgtactgaacaatggtaacagcaataacaatatgacagaggtctgctgagtctagtaatgaaacaacagttagcacgtgtccctactgggttctgccttcatacttggttttgtgtgcattatttcgtgtatttttcatatcaacccattttgttttttcactggtagttaactaattttatctccatttttacaaatgatgaagctgagtttttgagtggtttagaaacttgcctgaagtcaaacggctaaaagcagggacttgaaccacgattcttttgaatctaaagtccatgcttttaaatactttagcattttgcaaggtgtaaagaaagttttagaaagaaaacagtcatgatttttattctcaaaatctatacattttcaacgtttgataaactcatcaggatataaataagataaccaagttttgccctttttactttatactggcaaagtaaaaatatatattccaagttaatggttctttaagtcccatgtctattttttgccacttggaggtgatggaggagaaagaagcaggaaggtatatatttggaaaacatttaaaatgtttttatcctgaggaaaactgtgtactcatactttttactcagtaagtgcttctactagctggaactatatattaattcatatactaataatgtgaaatgaagaaagatctgaactttggcatcataaagtacatatgtttatctgtctggtaagctgagaagaacagtcttagactttaatgattttgcatttaacctttccttaatttgctttaaaaagtcagattgataattataaagctatatcttggtacataaaaactaaatgttctcctgcccttttgtggtaaattatggcatgatttgtaactgttcaatatcgtaagagatttgtaagagaatttggtccagctcttctagtgaaaaaattaatctagatccttccaatctggtagtttgttttactttgattcattagaacttaacctttgggatgcggggtgggaaagtctcgtgtgaatgttcgtctcacacaggataatggaagtggagtctttgttattctgtctctgtggagaaaggaggttgctctggtgggtgtgactttgggaagtttttttgagtttaaggtgagtacaaatagtttctttagcaaatgttagcatgttcatttattcctttagttgctccagtccaagcttagcttcccaggcaactcctgtgtgggaaaatactaatttatgagaaggctcacgccttctagtactaagtagaaattattggaatacgttttctaaacctttctggtgctttgtcacatattacgtgtaaaatggatggtccctaaattcgaaaaattattttaatctatctcacagtacttgttagattattgctactttcaatatcttttccaattataaatgtatttgatttgttatgtagtaaagtagtactgtgactggaacagaagccttcagtgtgattgtaaattgtgatttctctacagttctaagaacattagaaaaaaagagaaaatgttggagcatgactaactagaaaattgagcaatatgatattcagctgattattttaaagttaagtaacttcttctcctttacttttttctgtttgtattcctaggtagcagacaagtgataataagagttctggaattgcttacagaggatatgacacttattggtgaagcaatttcaacagatatctgggatgacagcagcctttttggtatagatatggtaagaatcaatgttttctttgggatatagggaatagtattttttaagattttggttcttttaagccggtttcattgtctcattcgtgttcaaaatcttttttctttttgactcaatatgtcccaggcttatgttataaatagcctggaacaggcctatttttccaaaggttctggttacttctaatagtggaacgtatattaagaccaaaaccaggccattagaggtggttatagctactgtgatatcattcttttctttcaggaacaattaggaaatacgtatttttaaagatcgtgagtttattgctatttttcttattttaaatttgtatttcttatccttgcgcttgtagaaagtcttcgttcctagcaatatcagcataattgcttattagctttgaccttaaacatacataagatagtttcagaacagcaatattaacattgctatgaacaattctaatgaaaagttcaagatttcctggcagttctttttgagatagactaatctcactaaggatatacagtcaaaatactgtgccttaaagctaccgttacccattcagcatacagttagatttttttttgtttgttttcactattgggaattgttttttcttcataaaaatgtagctcagagatgcctctctcccatccagttacctttaagatgttttccttattggtagtcatttttattttctggctatttttttctatttttattttatttttgcaaatgtaagcaactaagtatgtagattcttatcctctccccatcctgcataaaaggtggtatattatagacactgttttgcaccctgtttttataacttaaaaatacgtcttatgtgcatagaatagtaggtatgaggattattccctatctatctatacgtgagattttctcgttcttttttataggtagcaaatgcttcgttgtgtatttgttaacctagtctcttgatggatattattgttaatataaattatgtacaaagaataatgggcttatgctatttcataaatgtgcaggtatgtctctagggtagatttatttaagtgggcatgctgtttttctaaaaaacttttatttagcttcagcggtacgtgtgcaggtttgttatgtaggtaaactgtgtcatgggggtttggtgtacagattattttgtcacccaggtaataagcctagtacccgataggtaatttttgtggtcctcctcccactctctgccgtcgagtaatccctggtgtctgttattcccctctttgggtccatgtgttctcattgtttagctcccacttataagtgagaatatgtgtatttggttttctgtttctggattagtttgcataggataatggcctccagctccatccatgttgccgcaaaggatatgatctcatgcatttttatggctgcatagtattcattggtgtgtatgtaccacattttccttaatcagtctcccattgataggcatttaggttgattccatgtctttgctattgtgaatagtgcagcagtgaacatacacatgtatgtgtctttatggtagaatggcctcaagtgatctgcctgccttggtctccgaaagtgctagaattacaggtgcgagccaccgcgcccggctgagccatgttgtttatgtagtagtacagcagttcctcacttggcatcatagataggttttcggaaactgtgactttaagcaaactgacttataacaaacccagttattttttctcatcagcatttagtgaaatggcatggaacttgtaatgctgtttcattaaagtcagtttccaagaacctgttgaccaagttaagtgaaggcttactgtagtttattcattttatttctgagtagtattacattgtgtggacataccacaatttgtttatccattcacctgttggtggacaatggggttgtttctagttattacaaataacattcctatggacattccagttgttccacatcttcaacatctattatgttcagttttttttttttttttgggggggagagggcattctgatagatgtgcaatggtatcttagtgggttttaatttgcatttccctagtgactgatgattatgagcatcttttgtaatttttagagagcaagtctaggtttttttttaaaaaaacacttattcttaagtattcttttcaatgccattgtgaatgaaaattttaaaagtttttggattgctcattgttagtatatagaaatacaattgatttttgtgtattgatcgtctatttggtggccttgctgaacttactagttctggtagttttttttgttttgttttgttttctggtagatcccttaggattttctatctataaaatcttgttatctgtgaataaaaacagttttaagatcatcttatctgtgaataaagacagttttatttctttctattcactctggatacctttaatttttttaaattgcctaattgccctggctagaagccttagtataatgttggatggatgtggtgagagccttcttcatgatttagagggaagcattcgatctttcaccattaaatacaagattagctctagtacatttgtattttgtagatgcctttataaagttgaggaagttccatgtattcttagtttgttgaaagttttgatcatgaatgattattgtattttgccaaatcttttgtctctattgagatgatcatttagctttttgaagagcagaaaaacttaattttgatgaggttcagtttcttagtttttcttttatggatcatgcttttgatattttatctaagaaatctttgcctaacttggaatacaaagagtgtttcctatgctttcttttagaattattacatatgttttaggttttatatctttgattaattttgagttgatttttgtatctagcacaaggtaaggaatgaacttttttttttatgggtatacaattattttctcagcactatttgttcaaatgactgtcctttctttcctgaattccttaccaactaactatatgtgggtttacttctggaatctatttgatcggttttctcttatgatgccaatacccaactgacttaattattgtagcttatagtgaaggcttatagttagctatagtgaagcttattgtaagtcttgaaataaggtagtataagtccttcaactttgttcttgttttttttttctgatatgtagtcctcgctctgttgcccaggctggagtgcagtggcgccatctcggatcactgtaagctccacctcccaggttcacgccattctcctgcctcagcctcccaagtagctgggactacaggcgcccgccaccacacacacacacacacacacacacacacacacacacacacaaaaaaaaaaaaaacctgctgtggttttgaatggaattgagttgaatttgtagatcaattcaggaaaaattgacatcttaatagtattgaatcttctgatccatgaataccatatatatgtcttcacttgtttagctcattatttatttttatttttattttttttaacatggaatctcattctgtcacccagactggagtgcagtggcatgatcttggctcactgcactgtccgcctcccgggttcaagtgactgtcactacagcttcagcctcccaagtagctgagattacaggcatgtgcccagctaatttttttgtatttttagtagagacagggtttcaccatgttggccaggctggtctcgaactcctgacctcaggtgatctgcctgcctcggcctcccagagtgctgggactacaggcatgagccactgtgcccagccttatttagctctttaatttgtctctgcattgttttgaagttgtcagtgtataggtcttatacatttgagtatttcagttttgggtcttgtccactggctgacttttctctttatggatcttaatatttgatatgtgtagtaatttctgattggatgctggaccttttcaatgttaccatgttgagtgtcttgattttttattttacccttttagaagcactttgggagggttctgaagcactttgggaggccagcatgggagcattacttgaagccaggagcttgagatgaacctgggcaacaaagtaagatcttgtctcttcaaaaattagtaacattagctgggcatgtaggtgcatacctatagtcccagctatttggaaagctgaggcaggaggatcactcgaacccagaagtttgaggctgacaggtggttatgttacttgtagagcagtttcattttctcaagactttaaaaaattttgctagaatgggtctaaaatagtggttttcaactggggggtaattttgcttcccagaggatgtttggcaacgtcgggagccatttttgattgtcacacctggagtggtgctgctggcttctagtagatagaagccagaacagctcaccacaacaaagaatgttttagctcaagatgtcagaaaaccttgaggaagtgttaaggttgagaaaccctgatctagaagaacctttgcttggggttaaactctgctcctgagatgtgatcctttgggacctctattgaatgtccaaagtgatgattgatgactgtctactctgcctggttgaagactgagttttattgtcttgtgtgagccctgggagttgttcaatttaaatctcagtaatcatctttggcctgtatttacagagtatctacctataatctaagccacctaatctcagcatggtctgggtggaaacttgtttaggtctctgaaattctttctttgcatagctctcccacaattcctaaccatgtcagcttccacaggcatcttcatctcctaaagtcatcgagactgtcagactctttggatttctcttgcctgtgtttgctgtacagtaattgttttcaggtatagtaggactctcattgcttattttccttctctctggcatcacagtcctgcaatgacactatgccactttctagttgatttctggggaaggacaggagatgtccttgttattatttcatggccagaattggaagttttacgtaaagtttttaattatgtcatttaagcaactggcctatctgtgagttattaggagcttaaatgtacatttatctagagtgaaaattctggatcaactttagaataatcattcaaagtgtggagagttcaggataccttgttttttgctgtttgtatttcagtagagtagataattttagaaaatatggaattaaattttgttttttttgtaagaagtgttttgataagtaatattttgcatgagtaatcaacatgtgtacagtagtagccttaagaatgttatattacaacataatatttaagagatctatggaataccagagtatgtctccatgtaactggaaaacatatcttttttaacatttcaaaatatcataaatcatttgtcatttaatatctttcattttgaaattgtcatctgataaccttgccttccttgaagatttggcattctatctcttctgttaatgtgaattcctaatgtctggtcttccttcctctccctttcttccttcccctctcccttcctcccttcccttttgctgccttgtcagggcagtagaatcaaaatttattagtcataaaaatatatattgactcttacgtttatcagttttttttctctttatgctattttgatgtaagtcggtctatatttaattaaacattgttacaggctgtctgaaatccttgtgaatagaggtctgaatataaaaaaataaattacagatatttacataataacaatacccatgtaagaaagaaacccaaacttttatttttttcataacacgagcctcttaaaaagagaaacaaactgcatattttaaaatgggtgtattttcaagtctttcattttctgataatagttctgaatcttggtttttctttagtccttaaggttatcacactattttgtagtacttttaggagatttttcacatattgaagattttcaacaagtaaatttttcctttgaagtgtgaggaatgctttatcagttgtttcttaaattaacttaaattttcttggccagaacatttatctgtaaaagttagtcattcacttttaacttttggctgctggtactttatgattcaatgaattatttttactttaaaggttaattctgttgtacaagtgccagttggtatgttacaaatgctaaataaaacagaagtacttcaaattatatttgatttacttttacttgtttaaaaagaataaatgtctcttttctttggctatattttaaaagaagcaaacaagtaaaatttcttaatgttcatacttttgccagttttcaaaagaaagacggaagcagtatttttgttgagtcattaaaggaacaaaataataaatgttgctatcaatttagaaattaagtacctgaggatatataatcaaatctctaggtatttccacacagtactaatatcagtaacatcaatcatgtctggaaccctgtaactcagcatggaagggaatttcaatttccccccttaattgaatatttttatattactcgaagtaaataaaagaaaaaatattttcaccaaaattagttatgctgacctaaagtatgtcatatgtcattccccctagtcctccatcatcaaatcaggtctattttttccctatttacatgctaagtcaggttcaagatgcaaggagaaagtagctttcacctcctgccagataacctagactcttaggtctatattctgtttcttttccgcatttcttctgtgtcattcctgtcattgcagtcattggaaagcagtcttttcatctttatgactcattgcttctaaattcccatctgacctgctgtgaactggtaacttcaacatcaaggcatgttggtagaattgtagaatgttggtaggacttcaagaggggctaagaggattgtgaaagaaactaaagatctttgtatccagtaagggctcattaaggatatttggaccagattgtgaattgataactggtgtagtgggatctctaattacatagaccttccctgctgctgccaccattccaaagacagttattttaactcacatttcttgattgcccgttattaatatatgctaggcacttgggatatcaaataagatgtagtgctttttatgcctatgggtgatagatacttttaatatgacattagtaaaatagagataagcataaaggaataacacgtaaactaagatagtttaaatatagcacttactgtatgtcagacactaagcactatttatgaggtcatttaattatcatgaccctgcaaactccataactgaggcacagtttatttttcagggtcacttgtggttttgtatttatagccattatgttttattgccaatggtgctttgaaaacactatgaactatgaacttgggatgtcagtgagggctttttttttttttttttctcttccccagactcagagtctcactctgttgtccaggctggagggcagtggcgtgatcttgactcactgcaacctccgcctcctggattgaagcaattttcgtgcctcagcctcccaagtagctgggattacaggcatgtaccaccactcctggctaatttttgtatttttagcagagactgggttttgccagattggccaggctggtctcaaactcctgggctcaaggcaccactcctggctaatttttgtatttttagcagagactgggttttgccatgttggccaagctggtctcaaactcctgggctcaagtgatcctcctgccttggcctcccaaagtgctgggattagaggcatgagccaccgtgcccggcctcagtgagggctttttgtagatctgaatgaactgagttttaaattataggtaggatttggccaagcaaataaaatagcattttttttttttaatctggcggagcgtgagaatgaaccatgagccatgacaaagaggcatggatagttctgatcggagataaaggataggcctggtagtagatggaacacaagcacctagaccatgaaatgtgaggtgcaaatagtggagagagactggtgggataaatgagggtctgctggtaggggtcttttggcatgatgctgagtagtcctgcctttcctctgaaggcatgatgagattgcttttaatcagagaagtgccttgtgagactggcaggaggaaccgtgactggctgcagtgtggaaggtccattggaagcatgtgaggggcagagcctgctgcagtttcttactccaggtgccttgtagaatccacaacccattgtatattgcagaggtagtgtgtaagttgtgtttacactataaaatctgttttattggtaatatttaagacattttgctaacctggtatttcaattttgtaccttctgttgtaaaaactatgagtatcctgtgaggacgggtcttttcccccaccgtcaactcctttagggttgttgcttaaacatctttagcccaaagaattaaaaaatgtgggccagttactattgtttttcaatcctttcctacaaaacaaaacaaaacaatacaaaaagccattttttttatgcttagaagaaatgttggaaatagaactgtaaaactcattcctaaagtattttctttttatgatattttgagaagtactcaattcatcattagaattagcaagattattttaaacaatttcacaagtaaatagacttgaataatagagatgttgttcctagtactgttttcatggagaaatactgtatggaggaattaattgcctgtcaatataataagactgtcactgtatttccaatttgttttctctagaccagtagttgtttgtatgagggcgttttactttttctgttttaattttgtaaggattgttctactttcggtttaaatatttattgctttttagttttatttcttggggatcagagaaatatagccttaaatatacactgaagttttctttgtggtaaagtatgtttaaagttaatttttgtcagtgtttcttggaaacttaaggagaagttatattctttgcagtgttcaaagtttatgtctattaattttaattatgttcaaaaagactgagttaaaatttataagtccatatcaataacatgttttgttgatgtcctgttttattcagatcacagactcatttttattgagtctttattgttaaacatgtcatcagtagaaaattactctaatttattttgccctaaattattcactattcatattgcttagaatttttgttttaattctactactcattgaacttttaaccttttattcacaaagtttttttagaattttattttctttttttacttataatcccatgacagttaaggatttatatataaatttttaatttttgttttttacttcaatatgaaattgtttcatttataggaaaatttaaactttttatagtatagttatgcttggtctactctcaaaagtttttgccttgttttgcttatgtagatcattttgtcttccttttacttctgcagtgacattgttgtacaaccattatcattatctatgcaactttttcatcatctcaaatggaatctctgtacccattaaacaataacccctcattctgcctatccccagctcctggtacctcatataagtggaatctatatttgtctttttgtatctggcttattttacttttgtatttggcttattttattttatgttttaaaggttcacccatgttgtagcatgtatcagaatttaattccttttgaatgctcaacacccttttctttttttctttgagacagagtcttgctctgtcgccaaggcctgagagcagtggtgtgatcttggctcactgcaacctctgcctcctgggttcaagttcaatcctgctgggattacaggcgtgagccatcgcgtccggcctccttttcttgcatgtatatacaacataccacattttgtttctgcatttattggtcagtggccactttcattgtttccaccttttggctgttgtgaatagtgctgctgttaacctgggtgtgtatacatctcttttggagaccctgctttcagttcttttgggtatattcccagaagtggaatttgctggatcatatgataattctgtgtttttttgaggaactgcccattatattttccacagtggctgcaccattttacattcccaccagcaatgcacaaggcttccattttttccatattcttgccaacgacttgtgctttttgggcctcataccttttagttgttccctgtatagtcatccttgaattgaagaaattctggtatattagatttttgttcttagtttgcaggtatttctcattcttcttttcatatgttttcaatggaaaattgaaagttaagtacttcagttttttttttctttcttactgagggtgtccttttacccgctagtttatgggggcatatcagtatatctgggatatactttgtctatattgatgtgacttacaagacagtctactatgcatagattcttcttcatatttaatgtataccttttagtttaaaagatatgatttctcttgaagtagtaaattatttaaatttatgatggcataacattttccacttgaaaccttattatctaaagagagtttataaaatttgatatttaattgttttttaattatttgactttccttgatgcatttctttagaaatgttggtatcaatttgaggacagagatcatcatgtctcttgtactaatgcattgttctttcattatgcctgccactgtgttaggcgtatagtaagcataagaaatacttgacgaggggtttgcgtgttaacgttccaaattggaacaattaggcactagaaactaggaggaaattatggttcatttaccttttatattctattgtttgtatttattcattgttaagattcatcatattaaatacttaaaagattattgtatttttaaaatgtaggtggtttatcattcttttgtgctttttaaattatgtcagcaggcattggtaattctcacaggaataaattctgttttgatttgttttcctatttaatgaaaatgataatattttaaactgttctccatggcttttgtatactggcccctaaaattggttgttttcttctgtttcatgttgtgtaaatgttttcagaaggagaaactactcctggtgttgggagcccttggagaaaccatgtgctaccataaaagtagtatcagtttggagcagccagaggtgatgcttgtgcaccacagaatggcctttatcagcatttccctgtttgcagttcgactgctacaaacgcttctccctgttgaaaaggtaaggcaggcaatgctgctcatttgtactttacagactattataaataaatgctctgttgtaaatttcttctgctcttttcatggtgtgaaggtattgtgctttaggccattttcaaaataagtgtaacaggttatatgggaaatgtagaaattgagaaatggctaacattttgaacaattttgacaaatcatttgatgggaaattattttttaatcgtgctgttgcttttattgcatatgttttattgcagtctgtacgtttgtttattccttgttcattcagtgaataatttattgattgcttacagtggactaacagtattacttgctggatgtaaaactgaataggttagaattagtccctggcctcatggaacttagttttgtaaaagacaagacttggctgttatctatacatatacatatacatatacatatacatatacatatacatatacatatacatatacatctacatctacatctacgtatacatatacatatacatgtatatgtttgacttctttggtttctttaataactttgggatcacttgagggaagagattatgtcttaatatacgaatacatttttccatacatatatacatatataattggtacacttgtatcttttaattgattggagggcattgaaagcctactgatcttatctctgcagtgtgtgtcttggttcttatcattaatatcaagagtagcctttccttctcttcagctaggtacgtgttgtcagagttctttacttattcactatttcccaggttccttgacacacagaatacaaacaatagtttccattgctgctccagaaattattttatagttagcatatcttaatgtcatggaaccttttctttttcttgttttatctattcaaaatactgttagcagtgctttagtttctaagtattggtcaagttggtttctgaggactgtcctatttcttgtatttgttgtactttatgtatattgctggtgtgttgcatattttagtaacttaagggattttttttttttttggtcccatgcatttctcttgaaggtatcccactatttcctttctgtcagcaacttaattgcttaatatttttattttagcacctgatcaaaagaatttcagaagtcatctttggtaggattaaatatcctgatttttatttgattcatctagttaatatttggtaacttgttttatgtctaaaccatatttgtagtttgagttacgtaatatatgatttcataccttagtatgtcttttgaaagttgtttttttaattaacgtgttgctttaggtgtctttcacaaagctgcttttctgcccatgatagcaataaactatcttctgtgctagtctttattctagtacttttctttttcctacttttctattttacctagacctttcttttcttaagctttggtgttttcagtttttaacttttattcagaaaataaaatgttcatttaaaaaacattttgatgtacaaagaagaataaaaattcatttataatttcaagttagttttgaggcttttttcttttctgctttaagtccaattgacagcgtctataaaagttatttattctttttttttttttttttttttggttttggttttgtttttgagacggagtctcactctgtcacccaggctggagtgcagtggcactttcttggctcactgcagcctccacctcccaggttcaagtgattctccttcctcagcctcccaagtagctgggattataggtgtgagccaccacacccagctaattttcgtattttttttttttagtagagaccagatttcgccatgtttgccaggctgatcttgaactcctgacctcaggtgatgtgcccgcctcggcctcccaaagtgctgggagtactcgcgtgagccactgcacctggcctgtttattctcttttttttttttttaaccatttcttattatctaacatacattttccatttaattaaacacttcataaattttaatgggtactaatattttaccagcaagatgttctatgatttccacaagtattccagaaattaagcttttaggtttctttttttctttttttggtattttgataaataacactatgctgaattgctacttacgcatgtttactcatattttggattcttaaattcctagtggcattactagttcaaaggctgaatgcttaaacatgtttttattataagcataatttaaaaatattatagtttcacgagtttcattgtttttaactaaagaatggataaaaagagtagtacacggaaaagataattgtgagaatatatggccgggaaattactaaaaagaagcactttttgaaagtgcctaaggctggtgtctcttctgtgtgtttgccaattacagtttctgaaattgtgcactgttagtttaactagaacacttaaatttttaaatgatttttaaaatgctatcagaaaaaaacattaattctgtaaaggcttttttttttttttttaaactttcatatacattcagaaaagtacatagttcagtgctttttctactaagtgaatgcatctgtctttaaaaagtgaccacccccataacagaaaatagaatgttaccagcattccaaagaccccttctctgttacctctccctccttctccaagccacactcctttctgacttctgtcactatagatcaattggcctgttttgaatgttgtttaaatgaaattataaagtatgtactctctcaactccttcttgaggttcataactattgttgcctatagcattaatttgttaacttttattacaaaatattccattgtatgaagtctgttaaaagtgattttaatatgtgtaaatatttctttaaaatcttcttactgactgtatttttaaacgtgaggttatctctgaatttgaatgttagtggtaaaaatatctcagatcattcagacatcagtgtttcgtggtgtacttattaccaaaacaaaggagtgacacactaaaatgcaggtatgggagaaattatgaaaactagaaaactattccttatgcctctttgttgcccttagttattaaacatttgcagctttgtttcctagaattctgtagagcatatagtccaaactctattttcttttttttttttttttttttgagttggagtcttgctctgtcaccaggctggagttcagtggcgtgatctccgctcactgcaacctccgcctcctgggttcaagccattctcctgcctcagcctcccgagtagctgggattgcaggtgtgccccaccatgcccggctaatttttgtatttttagtagagatggtgtttcaccatgttagccaggatggtctcgatctcttgacctcttgttttgcctgccttggcctcccaatgtgctgggattataggcatgagccaccgcgcctggcccaaactccattttctaagtatcacttatatacacaatgtattatcaggtgatccaggaaaacggataaaacactgcattttaaatatagtattttgctttaaggaaaataacatcacttgtgttacttttaatttttaacttgtattcactagtcattatgtttctgaagtccttttctgttttgaagagtgacaatttttcaaggcataagcatcaagaatggaagaattccagtctcttaagaaaggaattgaatttaaaatatgggtgtcttccttaatattatataaatgaaaaattagtggtgctacaattgcttgctattaagtattgcaaatggtcaatctatctatgggtcgaagtattgatggaaaacttatcctatcagttgcatcatgtagtttttgattgtattttttcatctatgtgcttatttggacaggaaccaaaaagaaatcagtaatttattttacttagtgccagaataatgtaaagttaattttccatgcttttttttttaaaggtagttattgttttattgtttccgtttttaaaaacaaatcaattatctaatttttggtagttattttaaatatataacttggaactttattaaaacaattttgatcattgtgggagattgtaattaaggtatttgtttttagatgattatatttgttttgattaattgactaagtactttaaaatgagatctaaacaaaaatgctatttcattgatgttaaatttcttctttggtttatataaatgtaaggttatgctgccctctgtctgttgctagcccactaataattgaagtagaatttggactctgaaactttttgcctttaaagtggtttttttgagttgccactgaccaagtaggtagtttggatgttggaaaataaatatgaatctatgtagagatttcctaagtttaacaaaatgtcctctgatgcctgttttgaaactgatatttgttgatattaaatgattttggagaatactcatgtataggttaaaatgatacgttggtaatcttctgaaaaatattgtggttgagtaaactaaattggtaaaacaaatgaaggtaatttcatttggggaaacatctgggaagtaagagctaaaagtactagccctgttctggaagcagaagcacagagcattctaggaactgctgttactcttagctagtgatgcttaccaaggctaaggaagaatttgtaacacaaggtctttagcttttcagggaggtatataaaaagatctaatgacctggtgaagccagttgagtgactgagagcagtgcttttcaaacggtaatgttcaaacagatcacttagagatattgttaatcacatcttgcatattctgattcatcaggtaaagggtagggcctgagagccggcatttctaacagactcatagaattatgccatggctgctgagtggctagtttacaggaaacatttatagcccctcctcccaatgcacatgaggtgatgttgctgattattttttatctaatggggtgatggatttgcactgaaacatcttcacttttagttctgatggcatgtgactaatgcttatatatgcaggacagctatcttagattaggggtgtaaattgtgattagtccattgggccatgtaaagattagctaatgacattagcatggggctttgagttgttgagatagcaagagtttcaaatacaagtacgcagggtgaaacattggaattcctttgtggtgaagcgagaaaaggaaattaatatttattgagtgctatatgccatatgctctgcttaatgcttgtttaattctcacagcagctgttatttttctgactagagtcagagagaactctcttaaactagaacacagtgcctttagagttagatccattaggatttactctcttagcacagtgtaaatcgcctttgctaatttctctttatcttcctaactcttcaggagtggaaccccaggactgacagtagccctcatgaaatatatcccatttgtgattgttaaatgccatctatttgttgatgcctgccaaatttatacttccagaccagacatataacctgaactctgaacttacctgtatccagtgtcctttttgatgtcttcacttgggtgacaataaatgtctccaactgaacatgtcccaaacttcattctttgtttccccttccaaatatgttcttcctatagtcttgcctgtctcggtaaatgtcaactttgttgttcaagttgatcgttgatcaggcaaaaaccttagagtcagccttgattcctttcttttgctcatatgtggatataatccctgagcaaaatttgtcatttctcccttgaatacctatacagaatctgaatacctgagttaagcccaccattctgtcctgcctggattactgcagtaaagtcctctgtctcttagcttccacttttgcacattaccatcagttctctacagaccaattttgatacttgtttaaaatgttccagtggctttcagcagaggacaattccttatgacgacccaaagccttaactgatctggcccaccactcctttctgactccatccctcagaaccagctccactggctttcttgctaccaaataatagtttttgtaattgctcttccctcttctataaatgctttccctcagatagccacgtggctcctgacccttccagggttctacttaaatgtcatcttattagcgaggccttcctctactactttggagaagtagcagttccctgcctccactccccattacttctctgttcctcttcatctttcctatcctgttttaaaacactttttagccacacctaacatcttaggaagtatatcgatttacactctactttcttcagtgggatgtgagcttcatgcgggcagaggttgtattttgctctctgctgggttcccaggactggagaggtacctggcatatagtggaggaacatagtaaggcctaattaatattcaccgagtgagtgaataataggtgagcagataattgagtttctctttttcctcccccgcccacaaaaaaaaggaaagttcttcacagaataatgaaatttctctttactttctaatagctgctgttttactaatctggaggtttgtcatgtctgtgtaatctaaaattttgatttctgtagtttctgatcttcatttagcaactatattcatttaaaggtatcgttgtttagctgattcagctcttagactttcaggtagttaatgattatccttgaaataggttatccatgaaataaatcatgaccaaacccacttttgtaaagacagcatttcagccgtaatagtgagtcttgtcaagagattttctctgaacgtcaaatttttagtcctttttattcctttaattgatatttagaatcctgtcacaaaactagaaccatttttttaaaaaccataattctttcagttttaaatctattgatttaaggttataatgtgtataatatttcatttgggcatattgattttatactaattaaggggctatcttctgtattttagaactatttaaaatattatattggatttccactatcccctctaaaagacaaaaccaaagaaaaaaattcgtttctgttcaaatcaatctatagctatacttgatttcgtgttattaatatgtcattaataagctctgtcatgttcagctatgggatggggaagtgttcttgtcttcagtttatcaggttattggggagatttgcgtacatgtacagaaaatacttagagaaaaaggcctcatgccttagttcaatagcagaggtatatacaaggtgcagggctcaaggagagaagaagttggtttggggaagaagaaagtagttagtatcttaggctttgagaaagagttgatatttggacttgagacattttgtattgaaaaaagacagagatagaggtagatgatgtgttgggaaatgggattttctttggaaaaagtttcagttttttgacaaagaattgctaaaaaggaagttggattagattaagactatagcccactatgtttctctaaaataagttttttttaaacaaagttttaatttttttgtttttttaattcaccaaggcaagcgagtttttatcagagcctatgtcaacagcattatttctcctttctttggacatgcctatttctttggaatatccaaatattcatgaagctgttgtggcctatttggaacagctgaattctgaaaactacagtatttataaacgaactgcagaggccgtttattcaattgaatgcacctgtaacttcctgtctgatattgggaaagaggtaaaaagcttttttaatatctcttttaaatccctttgacatattttgaaaatttaatctatacttttcaaattgatggacatataattaaattgtcacaggtgggatacattattcctgagtgggtcaattatacataacctgttatttaacaggttaaagtaaggatatgatttgtatagaagtaaaacgaagactttaattaatggtgtatattcctaacatcagtgatttacaaaaaagcagtggttattacaaatgtcttaatatttaataatgagtacctctattaagtgacttactgatatgaactgaatgacagttgatgtaaccaaaattataagggctattttagtgcttacttgtagacatatttttgcctcaatattttatagatagttcttacatatatataaaggctgatttttgaaatatattaagtacagtgatgaactacattgtttataatgtattaggatgactttatggcagtgttacagcaataattatgtgtcggtatttatcccttttaaaaatactattagaatattagtatgttatcaatgaaagggttaatgggtcttagagacagacattgatacaagagttgtttattgtttgaaaataaggacatggatcctgaagatcttgaagaattagggataaaattcttactcattttggtgcctacagtagaatctatctgaacctatttattttctttgaattttttttttttttgacagccttctcagttgcctaggctacagccttgatctcttgggctccagcaatccatctgccttggcctcctaagcaactagtactataggcacatgctaccacacctggctaatatttaaattgttttgtagagatgaggtctcactgtgttgcccaggctggtcttgaactcctggcgtcaagctgtcctcccaccttggcctcccaaaatgctaggattaaaggtgttagccaccgtgcctggccttgaacttgatatttatgatttttcttacttaccactgtagtttgttttttttcccctttccttttgccatgttagtaccactgtcttcttgttttctctgtgatagaattttgaattgtgtctttaagttgaagtatttctgtggcttttttttttttttgagacgaaatctcactctgtctcccaggctggagtgcagtggtgcagtcttggcgcactgcaagctccacctcccgcctcagcctctcaagtagctgggattacaggctcgtgccaccacaaccagctaattttttgtatttttagtagagacggggtttcgccatgttggccaggttagtcttgaactcctgacctcaagtgatctgcccgcctcggcctcccgaagtgctgggagccactgggtctggcctctgtggcattttgtgtggtcagttaatcacacatgtgttcaatgtcctgtgtgttcctagtggtcaggctgctacaagaggcaggtttataataaaataaatacattagccctacttttattaggggaggtagagctacaaagaagtaatcaaagaaccaggcaacttgattgtaactttaagcttactcagagttaaataatagaaagtctcatgtggcatttagctagggaattttcctacatttctccacctcggctgacatttttaggttgcttgatgagaaagtggacttaaacaaatgtaaacagtctcatggtctctgaatggtctaatttcttgaagctgcttagttagctgttgagaatatcattgcacatgaacttgacatttattgttccattctgcttcttttgtagggagagaagaatctcttagaattagtggagctggcagaccaagccttgcgtagcttttcctatcatcagcatttcccgctaataaaggaaatcatcagcatttgttcaaagatgtaatattttctttcttaatgtgattacgttattattggacacttagggtgtgtgtaaacttagaaacagtgaaagtgaaactgactgtatatctttgttattattttttagtttaattgcttttatatgtgtctgatttttaaagggtatatgtacagctgcattaggatacttaactgttatattcaagattaaacttcaaaaatgtcatgcctacaatcaaaatgaataatccttggatttttatacatttgtttttggtatccatccagactattcacacacattgtttatttatctttaaagttttaattaataacttaaactgagagttttgtaacttttattactttgtacctttttcttatgtggatttttagaaaagactgtgtattggttaatttattttgaggacatcagcaaatttctatttagaacttagtgtctttattgcttttggaaagaataaattctgtgatgtgataatcattaactgagtaggggattttaaagacattttgggtttttaaaaatactctttaagacagaacctcctctgccctgaaacaaataagtgcttaggtgagtacttgctagtattggttatttttaataagatctcagtttgaggagttggagtaggaagaaatcccttccagtatgctttgcagtcttttgcttactaacttacttgcctcacatgtcttggttgttttaccttttcaccagctggaaatctgctcaggccagtccattactacaaggagaaagtcagaaggtgcttctccatatgttgtctcacccattgccacgagtgaaagctgaaacttaccactgctgtctggaaatcacgaaggtgaggttttgttttttcgtatgttttgtttttgagaacaaatagtagactctcttgttataccttcaaacttaatttacttgaccttttgtatgagatataagaactatatcccataaaagtagatgataattactagtcaattctggaaaatttgtactattaaattctcttaacttagtaagtccagcaattgaattgctttatttgaagttttattaagaattacatttatgttgtattaatgatggaaaaattataaggaaaattgatttccaggtattcaaaagtgatttctatgcccaggaaaccttttaggttgttgtggcctagattttatggttttaattctgttttttttaatgttattttttatttttcttttcttttgaaatatttatttttctgtcttcttaaatgataaaatatttcagcatagaatattaaatatttcaatattgaaaagaacactgtacataggacaatatttaaaagtatatatattactgcgtactcttgaaagtgtccttttgtatttaacactcttgtaagtactatttggttataataagtgtttacattttgccatttttacttctgattcatttttattcaaagaaaaatactagttatagaggaagcttctttgctttctcttctcccaccagcatagcctagccactcttacacagctggtgtatattcttcccatccagttgttgtatattatttataaagctgtatctttatatataaatattatctttaaataatttaaagaattttatatatagcatgattagtatatatagcaggatttgagatttgcctagttcattcaccttaactgctattaagtttgaatatacttccttttattgaatgataaatatttaggttcagtctcctttttattgaagtaagtttttcagtattttcagtgacagtctgtgactgtgtgcatacgtttgaaaatgtcatgatttcactttattttgaatagtaatttggctgcatataaaatacaggttgactgctagtttttattagcactttgccagtattgcttaattcttattcggcttctatcattgttgagaagtctgatatcagttaattatgatttcttttaatttttttctctagtttgttttaaaatattttccttttctgtggtgccctgcggtttcattaaaatatgtctccatgcatacatgattttccatttatcttgcttaggacttttcgctttgaacactccatctgccttcacttctgtataattcttggtcatgcttattttgaatattgcttttctcttatccttgctgttttctccaagtggaactcttattagacctgtgttagaccttcttagtttaccctttgtgtcttttaagccttctttcatattttccacatctttttaggttttatttgggtagaatttctcagtgttatcctttcagtacactaattctttcctcagctttgtctaatttactttttttgatggtgatatgtatatataacataaaatttattttaggccaggtgtggtggctcatgcctgtaatcccagcatttgggaaggccaaagcaggaggatcactggagcccaggagtttgagaccagcctgggcaacatagggaaatcctgtttgtacaagaaaaaaaaaaaaaatagctgggcatggtggcatgtgcctgtagtcccagctacttgggaggctgaggcaggaggattgcttgagactgggaggtcaaggtacagagagctgtgatcatgccactgcactcaagcctaggcaacagagtgagtacttcatttctggaaaaaaaaaaaaaaaaggaaaaaattttaccattttaactatgttctgagtgtacaattcagtggcataagtacattcgtattgttgtaccatcatcaccattacccatctcccaaattgaaactttatagtcattaaacaataactcctcattctccccttctcccagcccctgacagccacctttctactttctgtctctatgaatttgaggtccctaggtaactcatataagtagaatcatacagtgtttgtctttttgttactggcttatttcacttaatataatgttctcaaggctcatccatgttgtaacatgtatcaacatttcattcctttttaagacttaataataatctattgtctgtatatatgaacactccaattctgaaaatccaaaatctaaaaggctccacaatctgacacttttcgagtgccgaaatgacacttaaaggaaatgcacgttggagcatttccagttttgaattttcagattagggatgctcaactggaaagtataatgcaaatattaagaaatccaaataatttcaaaatctgaaacacttctggtcccaagcatttcagataagggacactcatcctatactacattttgtttattcatccgttgataggcatttgggttgtttccatctttttgcaattgtttatatacccagaagtggaattggtagatcacacagtaattctgtgtttaatttttgaggaattgccctactgttttccacagtgactgtactattttatgttcccactggcagtgccaaggattccagtttctcttcatccttggcaatactttttatctggattttttttttttttgagatggagtctcgctgtgtcaccaggctggagtgcagtggcacaatcttggctcacagcaacctctgcctcccgggttcaagtgattctcctgcctcagcctcccaagtagctgggactacaggcgtgcatcaccatgcccagctaagttttgtatttttagtagagatggggtttcaccatgttggccaggatggtctcgatctcttgacctcatgatccacccacctcggcctcccaaagtgctgggattacaaatgtgagccaccgtgtctggccttgtttttttttttttttttttttttttttttaataatagtaaccatcctaatgggtgcaaagtcatttcccatcatagttttttttaaatttatcaagttttgattatcacttatactgtttttcatgtctataccttttctttgctttctttaactgacttgttcttttttcatgtaatctttcattagtttctgttttttttttttttttttcaacttttattttagggttgggggtacatgtgcaggtttgttacatgggtaaattgtgtgctgctggggtttggtgtacaaatgattttgtcagccaggtagtgagcatagtacccaataggtagttttttgatcctcaccctctgatatggtttgtctttgtgtccccacccaaatctcatcttgaattgtaattctgtaatccccacgtgtcgtgggagggacccagtgggaggaggtaattggaatcatgggggcagtttcccccatcctgttcttctaacagtgagtgagttctcatgagatctgatggttttataaacatctggcattgtctctgctggcattctgtctctctcctgccgccctgtgaagaggtgccttctgacatgattatttcctgagacttcctcagccatgcagaactgtgagtcaattaaacttctttccttatgtattacccagtctcgggtatgtccttatagcagtgtgagaataggctaatacgttctcttcccaccttcccttgtgaagtaggccccactgtctgttgttcccatctttgtatccatgtgtatacgcagtgtttagttcccacttctaagtgagaatgtgctgtatttggtttttctgtgttaattcacttaggataatggcctctggttgcatccatgttgctgcaaaagacattattttattcttttttaatggctgagtagttttccatgatgtatatgtaccatagtttctttatccaatccactgttgatgggcatctaggttgatcccatgtctttgctattgtgagtaatgctgcagtgaacatctgggttcatgtgtctttctggtagaaagatttatatttttttgggtctatacccagtaagggattgctaggtcaaatggtagttctgttttaatttctttgagacatctccaaactgttttccacagtgactgaactaatttaaattcccacaagcagtgtatagggcttatagtactgtgttcccttttctctccaaccttgccaacacctgttattcttttactttttaataatagccattctgactggtatgagatgatatctcattgtggttttgatttgaatttttctaatgattagtgatattgagcattttttcatgtgtttgttgaccgtgtgtatgtcttcttttgagaagtgtctgtttatgtcctttgcccatttgtaatggggttatttgttttttacttgttgatttaagttccttatagattctggatattagacctttgtcacatgcatagtttgcaaatattttctcccattctgtaggctttttacttagttgatatttttacttagttgatagtttcttttactgtgcagaaactttttagtttcattaggtcccacttatctatttctgtttttgttgcaattgctttttttggagacttcatcatgaaatattttccaagacctgtgtccagaatggtatttcctagggttgttatagttttaagtcttacatttaagtctaatccattttgagttgatttttatatatggtgaaaggaagggggtccagtttcaatcttttgaatacgcctaaccagttattccagcactgtttactgagtagggagttatttccccgttgtttgttattgttgtcttttcaaagatcagatggttgtaggtgtctggctatatttttgtgttctctaacctgttctagtggcctgtgtatctgtttttgtaccagtaccatgctgttttggttactgtagccccatagtatagtttgaagtcaggcagtctgatgcctccagctttgttctttttgcttaagtttgctttggctattcggtctctttttttggttccatataaattttagaatggttttttctaattctgtgaagaatgacattggtagtttgataagaatagtgttgaatctgtaaattgctttgggaagtatggccattttaacaatattgattcttcctattcataagcagagaatgtttttccatttgtgtcatctctgatatctttctgcagtgttttacaattctcattgtgatttggctctgagcttggatgttattggagtacagaaatgctactgatttttgtacattgattttatatcttggaacttcaccgaagtcatttatcagttctaagaacttttgggcagagaatatggttttttcttttttttttttttttttcaggtatagaatcatctgtgaagagagagagtttaacttcctcttcctatttggatgccttttatttttcttgcctgattgatctggctaggccttccaatagcatattgaatagaagtggtgagagttggcatctttgtcttgttctggttctcaaggggactgtttctagcttttgcttgttcagtatgatactggctgtggctttgtcatggataactcattattttgaggcttcaatgcctagtttgatgagggtttttaacaagaaggaatgttgaattttatcaaaagccttttctgtgtctgttgagatgatcatgtggtttttctttttggttctgtttatgtgatgaatcacatttattgatttgcatatgttgaatcaaccttgcatccagtggataaggcatacttgatcgtggtggattagctttttgctgtcctgctggtttcagtataccaatattttgttgagaatttttacatttatgtccatcagagatattggcctgaagttttctttttttgttgtgtctctgctagggtttggtatcaggatgatgctggcctcatagaatgagttagggaggagtcactcctccttcattttttggaataatttcagtaggattggtaacagttctttttacatttggtagaatttggctgtgagtttgtctggcccagtgtttttttctggttggtaggctttttttattttttaatgactgattcaactttggaggaacacattactgttctgttcatggttttaatttctttctggtccaatcttgggagtttgtatatttccagaaatttatccatttcttctaggctttctatttggtatgcatagagtttttcttaatggtctctgagggtctttctgtggggtcagtgataatgtcacttttgtcatttctgattgtgtttatttggattgtctctttttttctttattaatctagctaatgatatatcaatcttgtatattcttttggagaaccaaaatttggttttgtcgatcttttgtgtgaatttttgtgtctcagtttcattcagttcagccctgattttggttcttctgctagctttcaggttggtttgctcctgcttttctagttcctctaagtgtggtgtcaggttgttagtttgcaatctttctaacttcttcatataggcatttagtgctgtatagtttcctcttaacactgccttagctgtgttctaaagattctgatatattgtgtttctgtttttgttagtttcaaagaattttatgatttctgccttaatttcattctttactcaaaagtcattcaggtgcaggttgtttaagttccctgtaattgtatcatttttgagagatcttcttggtaataatttctatttttattgcactgtggcctgagagtgtggttggtatgatttcggttttcttgaatttgttgagaattgctttacagctgagtgtgtggttgatcttagagtgtgtgctgtgtgcagatgagaagaatgtgttttgcttttgttgagtggagtactctgtagagtctcctaggtccatttggtcaggtgtcgagtttaggtcccaactatttttgttagttttctgcctcagtgatttgtctaacactgtcagtggggtgttgaagtctcccactattattttgtggttgtctaaaactctgtaggtctctaagaacttgttttatgactgggtgctccaatgctgggtgcattatatttaggatagttaaatcttcttgttgaattgaaccctttatcattatgtaatgcctttctttatccttttgatcattgttggtttaaagtctgttttgtctgaaataagaagagcaactcctgctctttttttgttttctgtttgctggatagatctttatctccattctattactttgagcatgtgggtgtcactgcatgtgagttgggtctcttgacagcatatagttgggtcttggttctttatccagcttgccactctgtgctttttaagtggggtgtttagcccgtttatgttcaaggtcagtattgatatgtgaggatttgattctgtcgccatgttgctagctggttgttacgtagacttgattgtatagttgcatcatagtgtcagtgggagatgtattttagtgtgtttttgtggaggcaggtaatggtcttttgcttccttttttagcactccattgaggaccccttgtaagtcaggtctcatggtaatgaattccctgagcgtttgcttctctgaaaataattttgtttttcctttgcttatgaagcttagcttggctggatatgaaatacttggtttgaatttctttaagcatgctgattataggtccccaatcttttctggcttgtaaggtttctgctgaaaggtctgctgttagcctgatggagttctttttatatgtgacctgctctttctttctagcttccttttaagattttttctttcctgttgaccttggagaatctgatgactatgtgtcttgggggtggtcatcttgaatagtatctcactggggttctctgagtttcctgaatttgcttattgacctgcctagtgaggttggagaaattttcgtggaaaatatccacaaatatgccttccaagttgcttgctctctctccttctctttctggaatgctgatgggtgttaggttcgttttgtttacataatcccatatttcttgaagtttttttttttaattcttttttctttatttctgtttgcctgtgatgattcaaaggagtagtctttgagctctgagatttttttcctcagttatgttattaatgcttccaattgcattatgaaattcctatcatgaaatttttgtttccagaagttcagttttgttcttacttaaaatgtttgtgtcagatccaatcatggatcaaaccaccattttactggtttccatgggtggggcttcagccttcttctatatcttgtcgagcttccttgccttccagcttctgaattctgtcattttagccatttcagtttggttaagaacgattgctggggagctagtgtggttatttgaaaataagaagacattctggcttttagaattgccagaattcttacactgtttttttcttacctgtgtgggcagatgttcctttaatctttgaagttgctgtactttggatggggccttttgcttttatattatttgatgccattgaggattttactgtggtataagttgggattagtcaattggcttggtttctgtgtgctttcagggccagagctcagctcagcacccctgggctgtgtgctctaaccctgggggtgcactgaacaggccagtggctttgatttctggtcccttgaggtcaagcatctgctgcactggaggagccgagatgttcccagactgctggcaacaactttccgatggtgactgcccgagaaagtgctctgggggggcgtggggcggtgctttgggagagtgcacttgtggtgggggtaaccatgggcaagtgcgcactggcaggggaggctgcaggcaagtgcacaccagtaggtattggctgtgggtgggtgtgtgcttgcaaaagcgctctgacaggaaggcagaggctgttggcaaaagacctatggggtggctgttggggagcatttcggcagggcagctgaggctgtgttgcaagctagtgagacagacaggaccctttgagaggctggcagacagggtggcattcagatcaggttggcccagtcttgtgggaaagatagccctgctctttctacttctggcagcgaactaaggctaaagccacctagaggagtatatcaagatttgggtgatgggcacctatcagggaacctgccccaatagtcacgtagtttcttttctgttttccctaagtgtcggctgggttgggaaataaagggacagagtacaaaagagggaaattttaaagctgggcgtccgggggagacatcacatgtcggtgggttccgtgatgtcccacaagctgcaaaaccagcaagtttttattagggactttcaaaaggggagggagtgtacaaatagggtgtgggtcacaaaaatcacgtgcttcacaaggtaatagaatatcacaaggcaaatggaggcagggcgagatcataggaccgcaggaccgcaggcaaaattaaaattgctaatgaagttttgggcaccattgtcattgataacatcttatcagtagacagggtttgagagcaaccggtctgaccaaaatttattagatgggaatttcctcttcctagtaagcctgggagcgctatgggagactggggcttatttcacccctacagtctcgaccatagaagacggccacacccaagggggccattttagagacccaccttcaagggcacattctctttctcagggatgttccttgctgagaaaaagaattcagtgatatttctcccattagcttttgaaagaagagaaatatggctctgttccacccggctcaccggcagtcagagtttaaggtgatctctcttgttccctgaacgttgctgttattctgttcttttttcaaggatcccagatttcatattgttcaaacacacatgctctacaatttgtgcagttaacgcaatcatcacagggtcctgaggcgacatacatcctcctcagcttacgagatgacaggattaagagattaaagtaaagacaggcataggaaatcacaagcgtatttattggggaagtgataagtgtccatgaaatcttcacaatttatgtttagagattgcagtaaagacaggcataagaaattataaaagtattaatttggagaactaataaatgtccatgaaatcttcacaatccacattcttctcccatggcttcagccggtccctccgttcggggtccctgacttcccgcaacaggcacctatggccatgccccattgcagccattactgcgccagaccctctgggctctgtgcagactggcattctgtctctggcaactcattgggcagttctcccttgcaactcaaaggtctgtgcaggtcatggggtctcccatagttaggatcctagaggatcgttgcaagagtgggctgctccatgcctgttgcacttgccacttccctaagagctgctcaaggccaggaacaagtcctctagtttcttcttttgtgttgttgtgaattttaaacatatttattttataatcttgtttagattatggtattagaatcctcccacttgttatggctattgaatcttccttatgttgtttattttagcagatactgttattttgattttcaggtcttctttggcagggtagctttttcttgtgatcttgtattctctagatggtggttgtatatttgtttctgccttgcctttagggatttgacagttagtggtgatgcaccttggaaggggtttgtaatgaagttacattttcatttgtgtatgttgaaataataaaaagaatcagaggaggaaagattgaagatagtgggtagcaagtagctaattaaaagaagctagtgcctttgaaagttgaaggcggtgggaccttgaacatgatggctaattggggttaggtgggcttagatatcacaggaagttgcaggagcctccttctattgagtctgtattttctttgagattgaaagtgagatgttgaatgtgtgaaatgactaatatgagtagatatttgataatatcaaatagtagcatttttgggctgcatgaagagcttagtcaattgtgtctataatcttaatagggagactcttctactttgcatgtttatctttggctagctggtgtggtttctgggaatgtgaaccttgcgatcaatcaagggttgagttatttcattgctgtcggggaggagggaatgcctgtggtgcaagtgagctgagtagttgaaatgacatgtcgactgtagaaccaaaggctgtaaagactacagggaagaaagtagaagggtttatggactggaggtcaaagaaggaccatatttcaagttgagtaagaagattagaaacctacatttatgattttagaggtagaacaagtgaaaagagaaggggtcctcagttatagggcaggtgagtatcattgagataaataggtcaagaaactaagatcactgtatttgggatagttattataccccgaaatttaaaatggtggaatacgatttgatatctttcttgaggcagattttaaataattattggaaataaaaatttttgcagataggaaaatatttggtgtaaattgagttattgatgtatatgatcattttggtatatgatgaatttcaagtaggaataatctggatgttaattttttagaggagttctaaaaaattaacatccagataatttttcctgtcatagaatgataggaaaaaaggaatgtcagaaataaatatgtatgtgtcagtttcgaatttgtttttaaaaaaaatgcactgaattttagtaattttgaaaattctaaattttaatatactatagtttttataaccaagtgtcatacattttgttgcaaaatttaaactgaaagaatattttttgttaaaactcgccttattatcctagttgtagaaggagataaaataaaagaatgtgaactttcatttaatgttttattttcttgttaactatttggaaatttatattagttgacactgttcttgcaaaatattgtgatttttcttttgtcacaaaagataatcatctgtatagtgcaatgtggttttaaaaaattcatgtgtatttactatcagggagttataataatccaagtcaaaagctccaaatgatgagatttcttgtagttagcccctgtgtcataaagatatagtatcttggtttggatataaggatttgtaaaggcatttcactttaattggctatgtctgtcagatgatattattccagtgtcttctggtaaatctccaaggcattgctgcagctttacctacctaaatgtaggagcgtgctagtaatgtggaggttactttttctgaagaggcaagttagctttttattgtaagacttaactttgaggacggtatggtaaagaggtaaaatagcttttaaatttagggatgattaaatggccaccacttccatgttacctacatctaacattcatttagcaatatttactggacactttaccatatgctagactgtagtgatataaagtacagaaaagagccttatcagagagcttatattctgataggggacagagagagatgtatgtaataattaagaaaaattccttaaatacataaaaagtatgtatgtgtatgtgtgtgtgtatatatgtatatatagttttctttataacactatatgtatagaatatgtatatatatatatagtttacaacactgcatatacattcaatgtatatagtgttttaaataaaatagtgttgtaaagacaatgaaaggataaaggactagagaatgactagtaacgtggactaaatttatgtaggctggctagggagggagggagaatttctagcccgaggaaacaacaggtgaaaagcctctgcttttcaggtgagaatgtactttgcgtgtttcacgaacaaaaagaagggcagtataatgagataatagaaaaatggtaccagattgggtctgaaaagtaggcagggtgccaaacattataaagctatgaattgtattctaagtacagtgagatgctatgaatgattttaacgtgatctgatgatctttctgaaaagatcactctcccattgtggggaatggattgtagggggtcaggatggaagcaagaagaccagtttcattgtagtagccctgatgagatgtggtggtgtagtggagatgaagagaaggaaatgaatttaggaggtattacggacgtggagctaattggtcttgctgataatgagagtaggagatagagagtgatcaaggatgaattttaaggttttggatctagcagttggattgatgtcccaaatatgggattgtggattgggtagaattctgttttgaacctaagtttgacatgcctttttatatcaagtgcatatgttaagtagactgttaaatataataatgctaatgctaataatttcattgataatgatagcagctaacatttattgagcatttactcttatgtatcaagtacttttataagtatattatctcattgaatcctcctaacagctctgtgagctaggtactacctctttctgaaaacggagatactttgaatttgtccaaggtcattcaactaaaagtggtgaaactgggctttgaaccctataggctcactccaaagcccatattcttaagcattgcaccacactacctttggagtgtggagcccagattaggtataaaattttcagtcatcagcttagagatgatattaaagccacaagccttgataggatcaactactgagagactagggaagagaaggctgtctaggatctaaccagttagaagttgggaacagagggagccagaagtggagacagaggttagaaggaagagtcacatgagaacagagatgaacacgttggatttggcatcgttgaggttgttggtgtcctctatgagaagctcctgtggaatggtaggaacctaagtcctgctgatgtgcattgaagagggtttggcaaatgaggaagtactgactgaggacagcgaactcttgtgaggactcgtggtgggaaggagagctgaaaaatgaattgttatcaagaggagaaagccagggccatagacacattagaatatgtcatatggtgattagaataatcatgtgaagaaaaataaaggtgctggagaaaaataagacaattttaggaagtaaatcttggtttcagaaggggatagtcacagtttagatggtagataagtatcttaaggaagtaggtgacagctattgtttagggctgaggctttagatctttgaaaaccttgtaatatgaacgaagttgctgtctgtggcatgaagttaacagttgaaagaaaaataatgtatgcaaatacatatgtgagtgtatgtgtgtaactttttgacctttgaattgttgataataggaagtagaaatttgcagaatgaaaaaaagtagtattcatgtaactcattatttattgtatttttaccttctatattgtatttaaattccattaatatttcaagtagctttttttcccctctcaccttaaatagctgctaacaaaatactattctctatcacatattgagaaaaaaattcctgatagttactctaagtgttggttcaaagtaattgtattttaggtacatagctgtattgatgataactttatataatcatatatatatcacatatataggacataaatatgtagcataaaaaattatatataataggtatattatatataaaatatgtattctttatattctatatatatagaatataaatatatatagtatataaagttatgtctcccataacttgaagtccttgaagtcttttcatgttgaatttttctttcccaacctttgtaagtaaaatgcaaacaccttaggataagtttcttactgtgtttatgtcctttgtgtctgtcatgatgaattaactttaagagattatggttgtctcagccgtttgtttacttaatttatcatgattatgcttgtggcagaaagtaatataatatgtatctcctacaaactaagaaactgttagacaggagaatctttttcattctgtcttgttaaaaaaagtttcaatgaagtaaaaactaaaatagaaatgggattgtaaacagaagaaagatggatcttttggaaaaatcagtgttgctaatttaaaaatactttttaatattattttacaggaatgtttaggtgtccataatgtcactaaacccgtgtcttcactttgcaatggaattcattttctacttcatccaaaagttctgtatgaaatctctgtatttggcattcaagagcccgaaagtgaggtatgacattaaacatgagtgaaaatattacagtaacttagatactcagctaaatcaaggtgatattctaatatagtttagatagcatggtgagaaactaaaaagaaacctgtctttggtgcattggttcagttgaagtgttatttaaataaaaataaatgttacataaaatgtgggaataaaaatacaggacacacttgatttcaaaaaattcagatcagtttacttacatttttcatctaagatgtagagaactatacagtacaggtagtaagcagattatttcagttagggaaatttttactcaagggacaaatgtacattaaaggtaaaaaattagaaatattaaggaagaaaaacagaacagaatgtaagatgatgctgtggaagtacgaacatttgaaagaaagagatgttaattatagcatctttccacatgctataaaatgttccaggtgtgtcaggtgacctagcgggacatctcatttgactggtttatcgggtctgtgttgttgagcaggtgaacactgctgccaaggccattctgttatacctgcttcagggacgattgatgatgacagcattgacctggaacaagtttattgaatctctctgtcctgtcatcccaatactacaggtattctgtgaaattcactttttatgataccatttatctttggctgggtgtgattgatttaaatgcatgcaaacagctaaactgtcaagttgtgagagaaatgaagagaagctgtgaaggcgctggggataagtgaacaggaagtgggtggctgtcttgtttctggcagaaagttaaaccaggatagctaatttgtctgtatatattttatatatctgggtgggaggttaaaaagtgaggtgcattcacagcattgactgtgaaaaatagaactcaaccttatataaaggcttttaggcagagctaacagtgctttttaaggagaccttacataactaacttgcctcatgagttctatccatgcatatgtatgattagagtgataccgtaattaacatgctcctagaaacagcttttttttttttttttaaaaaagcaatccttctggacattaaaggagtcagtttcctgtctcttttggatgaaaaggtggagttcagaaatgccatcataagcacagtcctcttttagaagagagagcctgggccttgtgccttgagactcacagattccatgcgtgtagcatttagagcactccatcttcttagggtggggatgggctgaggatctgtgaggtgcttcaccgaggggaggtgccactattagaatcttagaaaatagaaaaatcagcaagtgtcaagaaggttggcatgttttcctgaagttctcctgtatgtatgtgtattttcttttaaatacagttttatttaggctccttggctcatagaagttattttaaaaaataatgattttattcaactgaatccaaagacatttatgagttgctgataggacaatacaattcttattttcaagttgaaaagttatgtatacaattagacaataatttctctttaaaaacaaatctattagggctatgccgacacagaagatcctctgggtaactgcattctccttctaagcaaagcaagttctgacacagaagagatgcttccgtgtactacccgattaaagtccatgctgcgacttttgctagtgaaaaagccatcgtgagtacaacgtaatcttgtgaacgtcaaagattgatggaaacatgctaagaaagtatagtaactatatataatttgaaacaaaactaaagaatttttaaggagggtgttattccattactagaggaaaccaatgcgtgaaactaagcagatacaaggtcttgtatgtacttgctgacgtttcatccactttacagccaagttattccttgccagatcagcctgtgttacaggactgctactaagtgccgctcagtagtgccctaggcaagttggagagccatggagataaatagatggtaaaaattatagtgcattcccatcttctctttagaaattgttagccttccagagtgatccttttgtaaacatctgttctgaatattcagtttttcataagtatagtaggccagttgtctcaaataccagagttatgcaggtattttaatcccatatagctgtgttcttacttggggaactgaaaacatatcctttctttgactgccattaatataagcattgttttaattaatgaaaagaaggagaatgatactgtttttcttccttctctgtcattgcaacatgaatcttttctattattatttttaggtaacagtggttagattttcccttactgaaaaaagaaaaaaatgctgagtcgagatggataagcagggataaagaggaatagttggttgaaaaggctaggaagaatggacagacattcttttcacaatggataatttgtgtttcccaaaccttacatcaggaaaatacagcagcttatttatagacagatcattggactgaaagataaggaaataggtggaagttaactaaactattaagagaatggaaggaggaaaattatagtctttaaaatatctctgtattgtagagagtaatgttatgggtgatccaggaagaagtagggcagagggagttaacgtgcttgtgttctcaggggttgtcttctacacatgcagaaaagctgttccctgttaattaacatgctagtgtggtactccttacttgaacaaacccccagtttggagaattaacacaatagggggcatttcttgtttgtttttcgggcccaaggtcctcagtttaataaagacattctaaggcaggacacccccaggagcatagtgcaaggaaaggccagatctttctttgggtaagataagtctctattatatagaatttgaaacaattcaaatgacatatttgttttccttattgtattaattctaccccatcccatcaacccatccataaactccatgtagacaggaaccctgtccgttggctaatctttatattctcagaacttcatagcgtaccttatacataaatacacagtcatgcgttgcttaatgacatggatgcatcctgagaaatgctttgttaggtgattttgtccttgtgtgaacatcatagaatgtaccttacacaaacctaagcaataataacttaactacatacataacctaggctatatcctatagcctattgcttctaggctacaaacctgtacagcatgttactgtactgaataccatatgcagttgtaacacagtggcatttgtgtatctaaacatagaaaaggtttagaaaaatatagtaatataatcctatgacaccactgttgcatatgtgatctactgttgactgtaacattgttatgcagtacatgactgtactcaaaagttttaaagaatgacatacatgtataggaataactggattctggcatcctatgctaaacctaaaaagatgctaaatgtatataccagagaacaagatgcataaatacatgctttacatatctcatctctagccacctttgctaggggttatacctgtctctcaactgacaaccccagatgtgaatacagatatcattggcttagaatgtaaggaacaaaggaaaactattaggtaggtgtttagcctttctaagctctcttgaggtaactcaggaaatggagagggagaaagtttgcctgacttattagtcctctggagatgatatcagttaacaatattgcagtaaatatctactttgtgtttgattcaggaagtatttattgggtgtcttactatgtatctatgagctgtgggaacgtagcagcacacaacacagacatgggccctgccctttcagcatttagtgtgtaaccgggaatatagctcttattatcaattattctttattattaattgtcataaagtgagataaaagttatgatacaggggctcaaggtggcaggcctgcatacagaaggcaacctgctctagtctgtagtaggagggccaccctaatgatgcatgttttaattgttgtcttataggtagttcttaaaacctggcaacttgtattattgcttaaaatttgtccagtttccaggtagttcaagaacctatcagaggagtgacagatacatggttgtctcaatatctgccgcctcagtgacctttgtccactcagtggtttttctgtttctctatttcattgtttagtggcatacagtatttactcttttcttgaaaggtctcccacctccccactcagctgaccttattcctaatcccttccagataaggaaaaagtatttgtattttcatatttgacaggaatctgtttggcccctaatatgagaagattttgatacattgtagtgttatcacacttccattatgagcgtcattactctcctgtgggttcaacttaacatttggactgtggtcagcggtctgtgatactttttatggtggagaatagttcactagatttgaagacaggagttattgatttaattcgcagatgtacttattgaagtttactgatatttaatctcagtgagtctgtctcatttgtagttattattttttgtttctgatgtttattttataactattacattgaataaatcattataattatatatcgaagaatttttagtagaaaaagtaaattattactagtaatggcagtataattgtgactacttattgtactttgttgatatataattacttgtaattacaagcccttttaaaatagacatttgcatatcacgaaagttcgacttaagtactttgtgttctcagggtccgttcgctagcattaaagcttttagcattccatcttaccagtgaagaaggggctgatacaaagcgtcctctaatagacgccagagttctctccagagttactgatttattcattgggaagaaacctattgaactcagactggatgacagaagagagctggttattaaggtgactataaattttgagtttattactgtgtggtaatttgatacatttttatatcatgtattttatgtgacattcttcagtttgtgtatgtcctggggagggagagaagtatggggattcagggctggtttgaaattgtgttctggctttatctggcttctagatacgttgatttattgcagtggtcccaacctttttggcactagggaccagtttcacaggacaatttttccatggatcagggcaggagtattgttttgggatgattcaagtgcattatatttattgtatactttatttctattgttattacattgtaatatataatgaaataattgtacaactcaccataatgtagaatcagtgggagctctgaacttgtttttctgcaactagacagtcccatgtgggggtaatgggagacagtgacagatcatcagacattagttaaattctcttaaggagcagccagccaagatccctcacacacctagctcacaatacggtttgcactcctatgagaactgaatgccgccactgatctgacaggaggtggagctcagatggtaatggcagcaatgggcagcggctgtaaatacattttcctgtctttagctaggactgtacctatagcatactggactgatggagaattctataaagaaagctgtccactagtccactgttttcatggattcattcctgtgttttgtactttctcatttcactcaagtttgcaatctgtctgttttattttagactaacttgccaaggcctgtagtagtatggtagagccacatgtaatacagtcggtttttttgtttgtttgtttgctttttaatggggaaacacattatgttcttctaaactgaatgttcagggctttatgacagtgctggcagggggattggagagtcttcactggccacataccaggtctggttgggacttccctgagtactaagccattggtagtcactcctgtgccctgatgtatggaggaaggcggggagagggcattctaatacgtcttctgtgagtccatgttaggactggaagatagcagtgagtgggagaaaggagcttcatctttgttattttcttgtccctttttcctgatgctggttttgccacctcagattctgttctagcatgaagtgacagtaagggacttgtctggggggtagctttgaaggggtgctggacagcaagtcccagagtgctgtttgctctggggtcttctaaaagaaagaatggagaggcccacgggaataccagctggtggcttctgggagcaacagggaaatcttgagtcataggtctgggtcgcttttctcaggttagcctggtactacctgtaaagatgttagggaacatggttgttttctgttacctttgtaaggttgctaatggattaatgggttatgaataacttcctagcaaaaatgtatattaagaagagaggggccgggcacagtggctcttgcctgtaatcccagcactatgggaggctgagatgggtggaccacttgagcccagcctaggcaatatggtgaaaccctgtctctactaaaaatacaaaaaattagctggggttggtggtgcatgcctgtagtcccagcaacttgggaggctgaggtaggagaatcacctgagcccaggaagtcgagtctgcagtgagctgagattgcaccactttactccagcctgggtgaccagagtgagaccctgtctcaaaaaacaaaaaaaaaaaaggaaaacttatttgacatgatgactctttattttagatcttaagttccttcctgacctactgcatcattgttgcaaattttatttatttatgtatttattttaaacttttatttcagtttcaggggtacctgtgcgggtttgttatataggtaaactcgtgtcatgggggtttgttgtacagattatttcgtcaccctggtactaagcctagtacccgatagttatttttcagatcctctcccgcctcctaccccccaccctcaggcaggccccagtgtccgttgttcccctctttgtgtccttgtgttttcatcatttagctcctgcttataagtgagaacatgcagtatttggttttctgttcctgtgttattttgctaaggataatggcctccggcttcatccatgttccctcaaaagacatgatctcgtccttttttagggctgcatggtactctatggtgtatatgtaccacattttctttatccaatctgccattgataggcatgtaggttgattccatgtgtttgctgttgtgaatagtgctgcagtgaacatacacatgcatgtgtctttatggtagaatgatttgtatttgagtatccaacatctataaggaacttaaacagatttacaaaaaaaaaccaaacagctccattaaaaagtggacaaaggacagaacagacatttttcaaaagaagacatacatgtggccaaaaggcatatggaaaagagctcaatatcactgatcattggagaaatgcaaatcaaaactgctacgagggaccatctcacaccagtcagaatggctatttatttattttttttgtgagacagagtttcactcttgttgcccaggttggagtgcagtggtgcgatcttggatcactgccgcctccgcctcctgggttcaagcgattctcctgtctcagcctcccgagtagctgggattacaggtgtgtactaccacacccagctaatttttgtatttttagtagagatggagtttcacaatgttggccttttgtgtttctagtagagatggggtttcaccatgttggccaggcttgtcttgaactcctgacctcagatgatctgcccacctcagcttcccagagtgctgggattataggcgtgagccatcgcacccggccagaatggctattattaaaagtcaaaaaatagcagatactggtgaggttgtggagaaaagggaatacttacacactgttgatgactgtgtaaattagttcaaccattgtgaaaagcagtgtggcaattccttgaagacctaaatacagaactgctacttaacccagcattgtgtgaatttacctgtaattatgttggttatttaaataagttgactttttgagcttttgttcatagggcacaaactataaaatcttattggagaattggaagcagataaatgtaattttggtttttttttttttttggtttgtagttggagactgttgaaaaggtatatgaaatcttcacctcagatgatgttgatctcgttttgagaaagtcagctgctgaacagttagctgtgattatgcaaggtaatgtcttttaagggaaatgattgctgtactgctgataatagaattttagattgccatatggtactggcaggagttggcaactatggtttatgcgccagatccagcctgtggccttttttttgacagccctcaagaatggtttttgcatctttagagttgttaacaaaatccaaccaaaaccaaagaatatgcgagagaccatatgtgtgtgtctagcaaagcctaacaacatgcttactaacctggttctttacagaagaagtttgctaatgccttattattatttgacctgtaaaatgccatttgatagaattatcttctttctaaaatattagtgtacttccaatagtgaagtgcatgttccttcctctgtttactgagtgcatgcatcatattttcaatctgtaccatcttgcttagggaaattaatcaaataatacttttgtggtaggtaaaagaaaaatagtacactgtagctatgccttttctttaaacgtttatttttatttttttaaattatactttaagttctagggtacatgtgcacaatgtgcaggtttgatacataggtatacatgtgccatgttggtttgctgcacccatcaactcatttatattaggtatttctcctaatgctatccctcccccaacccccaactctgtgacaggcccgggagtgtgatgttccccgccctgtgtccaagtgatctcattgttcagttcccacctgtgagtgagaacatgcggtgtttggttttctgtctttgtgatagtttgctgagaatgatggtttccagcttcatccatgtccctgcaaaggatgtgaactcatccttttttatggctgcatagtattccatggtgtataaatgtttatttttaaaaacaactagtgtaatacactgttagctttgtttgtagtgttgttattccataggcttttgttctttgggttagttttgaatttttccccatacgtgatgtatgtactttaatatttatgagaaatgataactttgagtttatgtaaaaagatttttatggttagcacttcttgtcttgacattagtggaaactggaatgagagagttatttgaaaaaacatattccacatatttttagttttaacaacaatcacacagactacagaaaagaagactagaaaatgtggaaagccctggttaaaaaaaagatcaagaaaaactcgttaaagagtattccttcaatattgttaacatttcaaaagtatgccttataattttggtatgcactatattggggggcaatggaaatttttttttttaagtagcagctaaagattgttacaatgatagcttccacttcaatatcagtatgtgagtgtatgtgtttttcctaatgagaatataggagaaaatttgtctgcaagttgttaaatacttgtaacgaatatataatcaattacagttttgggttccggtaacatttgtgtgtgcgtgtgcacatgtctatacatataagatttttttatgtatatacaaaaacttctttattacaaacataatatgtgaatatatgcttattaaaaagaagctcaagttctccagaaatatatagtgtattataatcttgttccttttatatttgctattaatagtttgaggttagagatttttttatagatagaaaaatgttcatgttgtaagtcatattttacacatgagcttgtggagaattataaacatttgaaggtgataaatttggaagagtcaatgaaataatataaagaagataatttgcatgtataaatataagcattcatttgtacacttaaattctcgtagttttcagagtctgaactagttccataattctttttttatagttttgtattttatgtgacagaagtaagatatgctttttacttaaacattttcaaattggacaggtgtacgtaaagtaaaaagttaaaagtttcatactcttatgtcaaccccaggtctaagtatttttaatagtttgaaggttgtgtggatatcagttctgagtatttcaaaatacgtgttttaaactacaaaaaatgtgctttaacttttagtaactttttttatctacagatattaaaatgcatgctgtggtgaaaaagttatgcttaattgacaaaataattgagtatttaaatgaatgtgtgagtcaagatggcaaggtaaggctaatgtgcatctagacattgttttacaggctgttttgattaatcagatctgaaattgaactgagcagaatttggatgagtacttggattttaaattctaagtaacacctcctatctcattcattttttttttttaaattcgaaaagtggagtctctataaaggaaaactaatcctaaaatttccataagataggtgatagaagtatatacgaaacttactttcagtggaaagtaattcctagtatttatttacattttagtttcagataattttgatgaaaacgcataaaatttagagtaagataatattatggtctgtttgatctcacctgataattggtgaaaatgaaaagctgtgtttttcctcctggcccaggttgtagaatgtttggtacaaccatgcctcacactcttgaggaaggttttatgtggtgatccagtcatgcgtgtttcgctctcgcaacagtcttctcttttgaccgtgttattcagaggtaaataaaagaaaatctgctaataattagattgttcttaaattttaagtgtttcttctttaattgtaagtcacatttactttttattttactattagaacaacagcatttattagtgaatacactactaatgtaaatggaaaatgtttaatatttttgtggaaattgctttctaatcctgttgctgagtggaggctagagctgagaaaagctgaaacctctgattgttctttgtgccttgatgtagatgtcatctggtgctcagacagtaaactattatctataaagagagaaagttgcagctgctgttattactatcttctttccaatatctctttcgtctttcttgttttgcttatacctttggatcttggtacattttgtctgattatttcatttgacaggtgttaagagtataggctcaacctgtgtgagtagaaactagaccatcctaaatgactctgagcctaaatttattacattctataaaatgtggtttttaaaaacccattttaatttgattctaatttagtaaggtgttagatgaacacgtttcatgtagttttgtccttcctgtcttctctgtttttttttttttctcaatggagagcttggtaacattttgtactattttttttcttagagacttaggccactgctttttgatattttgcaagagtcatgtagaatcatctgaatgtgctgaagagtcacgtacaagcatctgaatgtgcttcatcttgtctattatcaggcatataggagataagtgagatttatgttcaaaatatgttattataatgtagtcattttattttagcatcttttcctcctgttggcttctgcttgccaagtgagtaagatgcagtttatttaagtagcagccctaaaaccaggtaaagctctaaacagattcagtgtgtttaggctcataacattttgagtggactataacgtttttataagattgtatagactgatcatctgaaagagcagcagttacggatttttagttttctttaatcctgttaataattgtcttcttattaacctcattcacttgaatttagttcctggtttaccttttcatttataattttcatttaaattattcaagcatggaacttattatgaacacctactggattcaaaagcacatttcaaggcaatataatctatacccttttcagtatttcagtttttctatttcattgctgtttgtggaaattactttcaatgagtttgagaatgaatatagtatcctccattaatggatttagtttcaggaaaaattttacttacttacttatttatttattgagaaagaatttcactcttatcacccaggctggagtgcagtggcacaatctcggctcagtgcaacctctgcctcctgggttcaagcatttctcctgcctcagcctcctgagtagctgggattacaggtgcctgccaccatgcctgggtaatttttgtatttttagtagaggctaggtttctccatgttggccaggctggtctcgaactcctgacctcatgtgatccacctgccttggcctcccaaagtgctgggattacagtcgtgagccactgtgcctggccgaaaaattaatttttaaccagctgcttaaccaagaaaacccatttctcagcaaacgtttattaagcacatgctttgtgctaggtgcaatgctaggcccttgggttatattggtgagcatggtaaatgaccctcatggagcttacagtagagttggagacattgacaagtaaatatacagtacaccacagtaatacttgtaattggggattcctggtgccagaggacatgctggtcagattggttggtgaaaagtatcagagattgtttctagggaatgtggcatctaagatggaatttcagaaatgagtaggagttcaaataggcaagattgacttctagatggagccgtggttgtgtgtatgagaaattgatgtgtttgagatggagctggctggatttggggagtgtggagtgaaggggaaatgatgggatgaggcagggagggcagttcgtgcagggcctgggagattttattaaacagcagtgaagagctgtttaaggttgttaaacaggggagtatgtgttttaggaagattatttctgtagcatggatagtggatcaaatgagtacaataaataacttctcagataacactgctttgaattataaactttatgttatgacagaattctatagtgtatttcagggttagaaattaacttagaaatcatttactataccatctgtgtgaggtctagagagatttagcaacttggccaaggctataaccaaaaaatggttattgggttatttactttgctactgagagagaatcgaaacttccttacctttgtttgtttctgttttaaataatcacagacctatacatccccattgtaaaaattcaggcaatatagaactatacaaattctaaaagttttcattttcttctcgttctcaatttccccaaagaagactgttctggttatcattaggaatatatttttccgaatgattttttctacatacacatgtagttttcattctgtatattacagtattgtgttgcttccttttttcaactggaaatgtaacttgaatatctttctatattatttcatgtgagtatacattctttaaaaaaccctaaaaactactgcactggtgttgcagaatttcagtttgctatgttactgggtatttgttttagatttttcaccatgacagtaatcatgttgtgtgatcatctttgtgcattcagtgttggaattcctaggtcaaagagattttataagataatggttaagttcctttccaaatcactctcaccaaaggtgtttaaaaatgcttattttcattacaactttgccaacactgaatatgtctcattaattttttttaatcttataggtaaaaatatataattgttttattttcttattttagttttagtgaagttatcttttcatatatattcaaatttcttcatctatggattacttattttcctgttgtatttactttctttttagtgacttgtagggttttttattataagataggcacaatccttatgcttgattttatgtgattaatattttctctcaacttttctatcctttaaatttatttattattatatttttaaccttaaacttaaatattttatggaaacatatagaacttttctgttatggcagttgggcaattttttatcatgctcttcaagtaggactttctctagttccagattgaaaacacttttcctgtgtttcaagtgttgtttaaaaaaattaaatttgaaatcaggcaaaggcattgctgtaattcttatttatttggaaatattatggttcattctattcatcactgatgtgaaatgtcttttattataagttaatttttacatgttctctgtttctttactttttggtttatggctatttttaatcatgccaattacataaggatgattttcttttcctgcagttaggaaaaatctcttctctcaaaacttcttattgctgcttccctgaatttgctaactgtgtattatgttgttattcctgtgagataacatcgtacttctttgtttagaatttcataggtttcaaggagattgtagcattgggatcattacagaagtgggaactgagacttaatgttaaagaatctcaccagggcatttagctaagtagtaagtggtagagctagtgttaagtctgtccattcagagcacttcccttttccatcatcttgtcataattaaaaggaaccaaaacaatgacacagcccaaggataacattttaaagtcaaatccaagttctgtgatcacatgtttgtagtaaagggcaaaagttataaaataagatctcttggtgaggaaactttagctagaattatctgactcggcataaccttcttagaggctgtatcagtttgtttctctaattacctaagactagacagtgtctagtgagtgtatctacaagtgtggctcctggactggcagcatctgcatcctctgagaacttattagaaattcacattcacaggctccaccctaaacctatccaatcagaaactgttttaaccagccttccaggtgattcttgtacatccacaagtttgagatgaaagcctgtgttttagtgtcaccttatctgggtttatgttgcatttcttttctcttcaaatcaagatattttaaatttgaagttcattctttctagacgtacaaatatttcataaagttgtgcttctttttattcagtttccttaatatttcatgaagattgtagtgtcgtgactgaagttggagcactattttgtcttctattatttgatgaagtatcgagaatggatatgtggtgagatataagaatttataagttttttactcttaactatttatctcaggtatctgatgtaatcttatagcaaggcatggaaatttctgatttacgaagcttatgctgtccatgctacacatatgtggtatgaattttgatttgaataaacagtattcaaaagcctattagctcagaaagtctatctcaaattttatttttaaacattactaaatataaactttaaaattactgcagtaatttttgtctttaatacatttttagtacataccttcaactatgtgtttttttcttaatatttcatgatttttaaaaaacctcggaagatatttaggacgatagtatatgattagcgctgatcttgagcaggatccgtgggaggagacgcacaaagtccacctgctagtcccaccactgcattgtatgaatcatttgttatgtggaatttttttttaaaacataatttactcttcataagcaaatctaggaagtagcaaacatgttgtttctatactaaatgatagactcagttgcactgcttgatttcatttgcagtcaacgaagtgaggtaagttgtatttgttagacaaaacttggtctactcagttgtttctttgtttttgtttttcttttatgaaataggtctgttaatccttccaataaaccttctttgccatcggtcttcagtttgcctgtttccgtttttagaaggtaaaggatttatttctctgattttcttgaaggacgaaatgttgttacagaaagggaaatcaaaatctataatttgtcacaattttcatttagcatttaaatcccataacttgggctttcatggttccttcacaatggtgctttgaagatttcagtaagtatatctccccaccaccaattttttattttgataccgttcaaatttacaggaaagttgaaagctatacggtgcatacttgtatgtcgttcagcctagagtcatcaattatttacatatgagtctctttgctttctctctcctaatatatatttttatttatatttaattctccctcacccaccaattggaaataagtttcagacataaattcactcctttcctatatattccagcatgcacatccttaagttaaggacattattctacataactgctacaatatgatcccatctaacaagattaaaaataattctataacatggtgtggtttctccagttatctccaagtatcttttgtgtatattttttcagaatgcaataaccagttaaggttctgcattgtatttggttttcatgtctctttagacttttgtaaaaagtaaattgtttttattgacatatatcgtacataaagcatacaagtcataagggtacagcccttgaatttttctgagtaaacgtacttatttatctcacacagattgacatagaatattactgacagaccggaaaccctttttgtgctttctcattaccttctaccaccccaaaatgtaatcctattttaatttctattgctgtacattatttttgctagtttttgaactttataaatagagtgcattattatattgctttttgctcaacttggagagatttgtccatgttgctgcatgaagcaatcaatagttggttcatttttattctatgtagtattctgtctaagaatatacaacacttttatttaccattctatttgtggatgtttaatttgttttctgttttgggctattatgaagaaatgactgctaagaacattcttgaacacgtgtcattgttggaatataggatatttatgtttagctttagtagatgttaccagacagtattacgaagttgttgtgctgatttacattcctaccatcagtggaaaagtactagctgccccacatcctcactagcctttggtatttgcattaccagtcttaatggtgtttagtttggctaaataatgaaactcacacgactgcagtagtcatgcttagaatgagatcacatttgtgggtgctgggagctgtcttggcttggaagcctcatgtcccaaatagaaaatatgttctctagtaagtgtgctgtaggcatagtttccaggttgcttataagagccacagcactcaagattgctcagagctgtgacatcccatcatgcatttatagtttattcctagatgtctcagtccagatgtggggagtcattttcatcataagcaaagcagcttagtaaattcttgacattccatatctatctgattttactgggtaaagggacagagagttacctcaatatcatgtttgtccgtaaagaggagaaagggttttattactcttttactcacagtaatgttggcatttaaaaaattgttgcccatctgatggatgtatagtgtatctcaaagtggtcctgatgtattactctttgctttttattattttcttccttctgtgtttttcaaacttaattttctgttcattttctaacttactggaggattggccattgattattagccgccctttcatttaaagctatcaatgtttctaagtatggcttttggtatattccacgaatttgatatgccatattttattatttagttcaaaatattttctaagtgttttgtgatttttttttattgatgcaagggttgtttagagttattgggggtaactagtgaagatttagtttattaggttttctagttattttattattaatatttagctaaatattgacattagaaaatattttctatgattttaattctttagagtttgttgaattttactttatggcccagcatatggtcagctttttaaaatgttccatgtgtacttgaaaataataatgtatatgtagtagttgttggatatactgttctataagtctcaaaatatatcaggtttattgatagtgttcagatcttccctgtgtctactttattatatgtgtgtgaagttctttcaggtagcagagaggcatgttaaaatctccactatgacattgtcattctggctgacaatgtattttgaggccatgtaatttagtttgtaaacatgctggtgggttgtctctatcattatgaaattatttctttatctctagcagtgcttcatcatatagaattcactcgatctcttatgactgtagcttccccagcttttatttggttagtggttagcatgatatgtatttttccatccttgtagttttagctgttctgtgtccttaaatgtactttttttttttaagaagtatatagttgagtttttttgtccaatctgacattatttacagttttaatggaatattttaatgcattttacatttactataattactaatatttttggatacagattattagcttgctattttctatttgtccaatgtggtttttttctttctttttcctctctggcttttcttgattaatttttaaaattagtccatgttttccagctgttaacttgtagttacatatacattaagtattttatttatttatttatttgtagcgattgggatcttgctttgttgcccaggctagtcttgaactcctggcttcaagcaattctcccacctcagcctcccaaaagtgttgggattacaggcatgagtcactgtgcccagctaagtattcttctatatacattatttctatatattttatacagatgattattcttttataatatagagattataatttacttccttgactgtgaactagtatttttaccacatcccagacaatgcaaggaccttagaacacattaattccatttatttgctcttcttttttttttcttttattgtcaggtatttaaattctatacatattttaaattctataagatgttattataattattttatgcagtaaatagtcatttagatttgtataccgtggtcgtttctgttactttttattgcttttttggtttttctgcctccatctgagaatttgtttttttaagagttttttattatttaatgtagtgcacttatattagcaatgatttctgtcaggttttttttttttttaatctaaaaattctttctgttttaaaaaatgttatcactaggtatagaattctaggttggcagttggagtccatttttttgtaggaacattggctgtcagttttattgttgcttctttgaaggaactgtgttccccattctcttaggagttccttcagctatatcccacagcactttgcttgcttgcttatttatttgggggagtttattttatttttatgggtatataatagtacatatttatggagtacatgtgatattttgatataagcatacaatgtataatgatcaaatcagagtaattaggatgtccattacctctaacatttattgattctctgtgttaggaacatttcagatctgctcttctagttattttgaaatatacaacaaattactgttaactatttttaccctattgtgctactgaacactagatcttattccttctatctaaatttttatgtacccattagccatcccttcttaattccccccttccccaccatcctttacagcctgtggtaatcatcattctactctttatctccatgagatcatttttttttttttttagctcccacatataaaggagaacatgtgatgtttgtttttctgtgcctggattatttcagttaacgtaatgacttccagttccatccatgttgtttcaagtgacaggatttcattcttttttacatctgaatgatactccattgtgtatttataccacattttaaaaaatccattcatctattgatggacacttaggtagattccatatcttggttattgtgaatagtgctacaataaacatgggagtgcatatatctctttgacataccaatttcctttcttttggatatatacccagcagtgggattgttggatcatatgtaggttctgtttttagttttttgaggaactccatactgtttccaataatgactctactaatttacattcccactaacagtgtgtgagcattctccttcctccacatctttgccagcatctgttatttttttttgtcttgttgataaaagcctttttaactggggtgagatatctcattgtggttttgatttgcatttctctgatgattggtaatgttgagaattttttcatatacctgttggtcatttgtatgtcttttaagaagtttctattcagatcttttgcccagcttttaattggattattattattattattttgctgttaagttgtttgagttccttatatattttgatggttaatctcttgccagttgaatagtttgcaagtgttttctctcattccataggtggtctcttcactttgttgactgtttcctttgctatgcagaagctttttagcttgatatgatcccatttacttatttttgctttgcttgcctgtgtttttgaggtcttacttaataaatctttgcccaggctaatgtcctgaagcatttctctaatgttttcttctagtagtttcatagttgcaggtcttacattaagtctttaattcattttgatttgattttcatatgtggcgagagatagagatctagtttcatttttctgcatatggatatccagttttctgagtaccattcattgaagagactgttctttccccaaattatgttctcggtgcttttgttgaaaattgaccaaatgtgtgtatttatttgtgcattctttattctgttttattggtctgtgtgtctgtttttatgctagtatcatgctgttttggttactatagctttgtagcataattcagagttaggcagtgtgatacctccctctttgttctttttgctcgggattgttttggctatttaggaccatgttttgttccatatacattttaggagttttaaaatttctttttgttccttttaggatgcaaatttacatgcatgttagattatttcaccatgttaaaggaaaaacttgagacaaaatacacatgcatgtgtctttacggtagaacaaaattaactttggtttaaaagatactgctattgaatctgtttttatttctaaacatatttcttggttcttgttgaatttattgatgatgaaaccatgttctcaagtgaaaacaataagctggaattcagtcatttagtgacctctatgatcataggcaattcatttatcagctttaagcctcatttttgatcatttgtaaaataggtatcatagtgccataccatgtaactgtgaatgaatgatacaaaataagcagtgtttggcataaagtaaatatcagtgttttagctgaacaccttttatgtttggttcactgtattcatggtccctgacttcaaggagcattagttatctccacaacaactctaatatagcatagaatgtggtaagtcctcaagaaaggatttaagtgttctggggagtttagaggagatgaaaagaataattgaaatactgtataaattatgataattgtttaaaatagggactaagagaaacctttgcattattgtgggttgggaggcattgaactagccctcatttgtggctcatctttttgagtagcatttaagaatttgaaagtttgtaattatttgtacacattttctttaggtaccatctacctgttcatgtaattggacaccatgctgtgagtccttactccatagttttgcccttatctgctgattgtttggccttgaagccggtgtcagatatgctgagaatagcttggaacctgtcatggtatcatgggagtgataatctgttgaagcaaatgaactctgaaactaaaacgcaagagtaagctcttatattagtttaaaaagcatttgcaattaattaattgtaattaattagttaagttttactttttccttaggtccagtagctttttcccttggtatcatctgattctgctttttaacagttataatttttactttcttttaaatattacatgtgtttattacttttaacaatctatcatatgggaaaactttaaatgaaaaagcattttactctgtactgttttagaggttaaagtctgatttgttcgtagatatgaatcactaggaaaagggtcctggattagaacaaaatctcagtaagtatatgcatgagtgttatcattagtgtgatggtgattacttttgaatatcttaatattctaatctgtctgtcttaagtgaataaaaatttttataaggaggaaaagtcaatataaacatttgggatgccaatgtaaaatcctaatattgacagatatgtatcagtttttcttctggctgtaagtcaaccttttgttaaaagaaaatgaagataaaacagcttttgggagagtttataatagaaataagtgtgagcttttatttaaatagctttatgttcctccttcattttttttctttttgtctagaattttagatgcattgaagttatctacagaggacatcctcactctgaagataacacacatggctagtgggctgcaggactgcctccattccattgttcaggctgcaacccacagggaagttagggctgctgtcaccaggatgagtttttatcttctgaatgacagattgtctttaaagggttgccctggtccatgtggggttaccttgaagtccttggcttggcacaccgcactaaacaggtcagtgtaaggtcaaggctgccagtttcaaagacctggattgcattgtattgtgttcatctcctaacctttgaagataagagtctatgcccttactgctgctatcatagaaagaaaaactccaggatttttatcatctgtaataatagccaaagagaaatttttaatttagttattgcattgttgaagggattattaataaacttgtaacaatttattcttagaaaattttacctcacaaaagcaaataattaggataagacatggatgaaacaaattgaatgtttatttctatccatgttataaatgagttgagacatcagtgaattgattaatagctgtgatacacctgccacaggctgttttgttttgcttttgttttgttcttaagtaaattatatcatttttctttttactctcaatttcatgaagttgattgccatgtggcggtcctttatagcagttaattgagaaggctctagcttgtcaatttaacatgcttaacttgtagcagatggttgcatttgcaacaagactgataagcaaccactgcaagcaggttttcattttattcttcatgtgactttagtataaaatgtataactttattatttaacataaaatgtgcagtttttaagctgctaggttaaatgagtttccaaaatatgaattcctttattagtttagctttaaaaattagtttatctgattaggctttccagtggtgtgctggtgcccactaatgcagccttgtgagagagctgatggttgaattttcaggatttttgtaaggtgattgttaaacacagccattcttaattatataaacttacaattaaataaattatatgaagacaaaaggtaatgaatatgcaaacatcactttctaattatgtggcaacattttactgttatctttgttcttgaggttatgcatacatatgcactacaggggtatgtattttatggaaataactacaatggagtaccactgtgcatctcttcacaacttcatgttacatggtagctccacattgtctacagtagtatatttacaccatggaaattgacaaacacaataagtcagcactctcagttacatatttatcagcacactcccgcatttaaacagtctcgccagttgaagaatgcataaatccttcactttaaataaatgtaatatgtccctatttgtcaaaagaaattttaacataaaagctgattgaattcattgcactaagttttctttctcttgtgaattaaaaccatagaaatagtatgcaataccacattacaggaaagactctcaaactgtgggtcagtggaagcctttagagtatttcaaattgcccaatagcagtaactgtatgtgagcatcacattttttatggttagtttcctcaggactagtgtaagtggagagtatagactgtgtatatgtttaatatatacacacatgcatatataatattcatcttgtatttggtttttaggcctgtgtttgatcatggcaacacagacactactgcctaatttataaatattcatgtatttctgctgtattatgtttcactaaggaatgtatcaaaaatatatatcacagaatccaccttttttcatgaaaactttttaaaaactttacttccagcaatgtatgtactaatgaggctttgggaaactttagttttgctttcattcagtttaatgatagaaaggaacattatctttttgactgattatctaagatgaaccaacagcttaaagggtgcttggagatagaagattcccataaatcatggctgtataaagtattgagatattgagaacatttttataagcttagtttaatatttttaaaatacagctatttcaaattatatcattctagacaaaacaaaatatagagaagcatgttcatacctgtgtgaatggttttttattgtattttaaaaataatgttattttttacacattttccatgtcagtaaatatactttgaggctaatttttcaaatatatgatatatccaaatgaatgttccgcaaaagaggtccttttaggagtgagtgtgtatgttagaataattctggctttgctcagatattttgaaattgtcctctcaggtcatttaaacagcagatgtaaggaagtcttattatattttgaagttatatttaattttttactaaaaaatgatattagcaaactcaactatccagagaagggtaaaaatgatttttacatgtataccgaaatgaacaccaccctaaaccatgactatttatcactattaacaaaagtatatttcagtttgacaaaaaacatggtttctaaaatctttttacttacggtactgtggcttctaaacataactttccaagatgattattttaacagcccaacattaatttatgtgtatgtttttatatgtgtatgctaacacacaagcatacaattataatctaatatcattttggaaacttattttaagaaaacagatgatagtcatggtttagtaggattacaagttgtcagaggtatctagagtcttctttcaactagtttctgttgagtttgcatgtttaatgcctctctactcctttcctactggaagtcctattgctactgtttttctccatttttcaccagactgtagactgactagcgaattggtttttctgcttttaaccttatgccactcatttatgttgcttcctgaatgatccttctgaaatacatgtcacctgtgggttctcttccatggtgtgctagatattaatagaattccaaccccttagcatgctgtagaaagttctttttgatctagctcttgcttaccttttcagctacagtttcctcctctctctctaacatatgctgtgtttctatgaagtgcaaatattggggttttatgaaactgcttgatattttagggcatacacttctgttttatacatccttgcttttacatagttaactccttggctgccttgtgaatatctactcttccttgagctccagggtcttcttactctgtgatgtatgtggaattctagttaccctgattgtcatgtggctttcctgcattacttctacagttgtttaaatatttgttttctcatgtgccttgggtttattacattcctttttatatccctcacatatcgcataagtcatagtatacagttggccatgcagcctcagcgtgaacacctcctttgaaggatattcattctgtttttgcgctgtgattattcgtaagttttttgttcttttagactgtacctgatcatttctacctgttattctgtcctttaaactcacagaataaataatgtcttcacatgtgacagctcttcatttaaacataactataatttcttctctattccccccaccctgctttaaatgatttgtttttttttttagatagactttaaaagccacagtgtccagacttctcatttgttcatgctattttacaagggtattgtgtttcttaggactctccctgagatctggacatgataccttatatgggtgtggtgctgtggcatggggtgaataggaagaaaggggctactgcctttcttttcctactgcttttccatcattcaacaaacatttattgatcacctactaggtgtcactcttgtaggaaatatagcagtgggcaaaactgatagggtcctgctctcatggaacttggaattaagacagctaaaagtataatcaaaagtagaaatgcttccaagcagactattaggaaactgcattagaggagcaccctatccctcttcagtagagagaaagtggttcagagaatgaagcttaagccaaggcataacaggtagaaggatgttaaaagtctatgggattggaagccgaaaagataccaggcacacagagaaacaaataccacatgatctgtcttatatatggaatctaaaaaagtcgaattcaaagaagtagagtagaattgttaccagaggcaagtggcaggtggatatgggtagggaaaagggagacgttgctgagaggttacaaaattccagttagacaagaggaatgagttctggtgatctcttacagcatagtgactatagttaataataatatatgtttcaaaatagctaaaagaatagatgttaaatgttctcaccacagagaaataagtatttgaggtgattggtatgttaattagcctgattggatcattccacaatgtatacatgtgtcagaacaccacattgtatcctaaagatacatacaattattatttgtcagttaaaaataaaacaaataaatggaatatagtttggtgcatgttatgtgacagaaatttgatactttgaatccgtaaatggatggtcagttgactcacaaccacttgcagaatatattatttctcctctagactaaaatgccatattcaacaaatattatacaaattaattttttttttaaatgccaggcaaagggataggccctgagttaggaaagagtgtcttgtgtcttcaagaggaattgaaaagaggatagtacacttagatttaggggatatgagggtggttataaaatggggttacagaggtgatattttaatgttacactggatatcatagaagacttcttataatctttgtgattgttaaatcataaatctcccaaagatctatggttgttagaatcacctctcaattttcataatccggcacttgccatcctactcagctgaatgtcattttggggatgtgagaattttaagtaaggaaaaataataatgagacaaacaccacattactaagaaatacagcattatatatccctggtgttggactgcttagtttagtattcctgttttaaaacttgctagccgtgtgactgtggaaaaacgacttaaccatatttttgcttgggtcttcttgtctttgaaatagaggtgcctacttcataatgttgttatgaagtttgacagaaaccctgctgttagaacataggctggcacaaggttggtgctccataaatgctgagtattaagattcgtattattgtcactcttattaacattttgatgcaatggctttagatttataaaaaataaaacattacagataaaattggatctcatatctcttgctgattgctttttaaaaaaaacgatttccaaactacttctcccttttaaataaaagttttattgtctactaatcttttagctctcttaaaccagtttttttttttaaagaaatcttagaaaattggctcatatccttttgctctgaacttaaaaagaaatttcatcctaagtctaccttcagtgttttccttgcctgttacaaactctagtagcgtccttgcaggcctttttttccccctcactttattaccttattttttcgagttggtcagaattaggtttgaagtactaattcttctcatcagtgaaacatgacattcccagtatgaaaagcaagtttcactgggcggttattagagtcagtgtttttccccttggtatttttttggtactttttctgaatttgttatttttctcttatgatatttgtcacttctagttattttagttacttgtccacatgttttttccactataagctcatgttcttgaaggcagatacccagtttgtttcaactttgcattttccaaagcatttaaaacagtgtctcataaaatagcatcctcacaagacatctgttaagtccacatatctatgatgaacagtggtattgtgtattttaaagcgccagaaaccatgattattgtcttttcattataggtttttacaggtgcttcctgcttgcactgaagatgagaaactgctaatagatatcatacattttttaaataaattaataaaggaacaaagaaaaaattcttcactagaacttctaaactggattctcgaattacttcttagacatgtaagtggtgttaaggaatttggattttaagtttgggaaataacttatttgtagaaatcattaacattatattatggaaaaggataattttatattgtctatgcttggtaaagtagtcttcatgtaatgaatggctcataacaacatggctttcctgatacgattgtgaatgtgtttattaaaattctgtacagtgaatgggacctacagtcttgtgtttaataaaacctgttctgcatgtgaactttctgctgcaactgtatttttaagtggggatttcagttcaggtggcaggggacagggtggatgtccagataggcatgttgagagttagctaacaaagccagatggaggcaggagggggtatagtgatggtgcagttataaagataaagtgtgttcaggccttaaataacggttactggaatatttacccttctagcccccactactgtcagatttttagctcttctaaaaattctaaattttttttttttattttttttgagacggcgtctcgccctgtcacccaggctggaatgcaatggtgcgatcttggctcactgcaacctctgcctcctgggttcaaatgattctcctgcctcagcctcctgagtagctgggattacaggtgcctgccaccacgcccagctaatttttgtatttttagtagagacagggtttcaccatgttggccaggctcgtcttgaactccggacctcaggtgatccgcccaccttggcctctcaaagtgctgggattacaggcgtgagccaccgtgcctggctctaaaatttttctaaatagctattctaaaaattttggctattcagatttcttattctaagaagcgtgtgaagaacccaagaagccaggtccctgttgttggtctatctgtctctttatgtatttatttgcaaataccgtatgaatttactcaacttagctaagataaagctttacacaaataagaagaaaaacaaaacaaaactagaaaagagggcctaaactgatataggacatagtggatcttataaggcaaatatgtttcattatatattaacacatttgcgaaacttagagataattttatgtaaaaatatgaattactgtgttgtcagaaatgctaactgatatgaatgtttgtgtgtatataaaacttatttagaggtttattatcgtcttaggctgttttctgttgtttttaacataatatcagaagctgggtaatttataaaaaacaaaatttatttcttacagttatggggtgcaggaagtccaggtttaagagggcatatctggtgagagccttcttgcagtggggactctctgaagagtcccgaggtgatgcagggtatatgtggtgagggggctgagcatgctgatgtgctatctcaggtttttctcttcttacaaagccatcagttccccttccatgataacccattaatccactatccatgaatggattagtctattcatgagggtagggccttcatgatccagtcacctccaaaggccccacctctcaatactgttactttggggattaaatttcaacatgaattttggagggaatgttcaaaccatagtaattatcttttcctttattgtagattggtgaaggtagggactgttttgttcattattgcatacccagcatttattatagtgccttgcacatagtgagctctcaataaacatttattaactcagtaataagctatgtagttaattacaagaagcacacaaaaccttaattttatcactagttaagatttaacaaaaatggaaaccatgtattactttcaaggttacttatatatgcaagtatatttatagactgaatttctagaattgtaattgctgagtcaaattgtagaggtgcgtgtgtgctgaggtttttgtggttttataaatagataacttattttgaattagatggagattttttcatattcggtcttttcatgaattgtatcttgatgtccttgctggttctccgccacaattgggttgttagtctcctttcatttcttctttcctgtcctttcttttcctcccttcccttctcccttccctttctcctttgctttttccttccattttcctcttccctcccctcccctttccttggagcgtgatttcattctggtacctgcaacttggacattagtgtagagatctttcaccttttgattaaatttattcctaaatatcttaattttttttggtagctattttaaatgaggtttttttttgggggggcgcggttactgtatagaaatgctactgattttttataagttgattttgtatcctgcaactttattgaattcatttttaagatcaaagttttttggtggagtctaggtttttctagatttaagattatatcatcagcatagagggacagcttaacttgccttttttctaatgtggatgccttttatttctttctatatactaattgctctggctaggatttccagtaccatattgaatagacatggtgagagtagacatccttgtcttgttcctgatcttagagaaaaagctttaaacttttcaccattgagaatgatgttagctgtgggtttttcatatatggcctttattgtgttgggattccttttctacttaatttattgagagtttttattatgaaaggatgttgaattttgtcaaatgctttttctgcatctgttggtataatcatgtggtttttgttcttaattctgttaatttggtgtatcacatttacgcatttgtgtatgttgaaccatccttgcatccctggaatgaattccacttgattatagtgagtgatctttttattgtgctcttggtttcagtttgccagtatttggtaaaggattttttatatctgtgtttatcagggatattagcctgtaattttcttttcttgtagttcccacgtctggctttggtatcagtgtaatgctgccgtcataaagtgagtttggaagtattccttcttcatttggttttaggagtacagagattagtattaattctttaaatgtttggtggaattcagcagtgaagccatcaatcaggtcttgggcttttttttggtgaaagactttgcattactgatttaatctccttattattggtctgttcagattttctgtttcttcatgattccatcttggtagctctatgtgtctagaattttttccacttggttgtccaatttgttgacatgaaattgttcataatagtctcttacgattccttgtgtttctgtggtatctgttgtaatgtcttcccttttcgtttctcattttgtcttctttttttattagtctagctaaaggtttgtcaattttgttcatcttttcaaaatctcaattcttgattctgttactgttttctattgtttttccagtttctatttcatttgtatctgcccttatcttcattgttttctttttactaagttttggcttcatttatgcttctttttctagttccttgaggttgtttacttgatatctttctttttgacatagatgtttattgttatgtatgtccttcttagacctgcttttgctgtatcccataagttttggttggtttggtgtccatttttgtttgtctcatgatattttaaaatttcccttttagctttttctttgacccactgattgttcaggagcatgttgcttaatttttatgtatatgtgaatactccagaattccttcttttggtgacttctagttttttatcactatggtcagaaatgatattagatatgatttcagtcttgttatatttgttaagacttgtaacaccatacatgtactgttaattttgtagtatgtcataaggtttatgtatattttataatttattcatagttatgaaattaaaattaaattcctacaagactctagatgattgtactataattttaatgcagtttttgaaaaggatttttggtacagttacatttacttatttggttttgtatggtattaaacctttcttcggaaagcttctactttatctcatatattatcaccacaagtgttataaataatactacttttaagagtgcacaaaagtgaacttaagtgttcactatcagttgggtttactccctaaatattatgctacaagataaattaatatatgttatataactaccaatgtttaggataaagggaacctggaaatagaaaatcaagtaccttttaaagtttatcctttgaagtgagtaaaataagtgagaaatgatttaagaagctcagtaaaataacatttccaagtaaattgctttgaatgtatggacatacatgaaaagatatacaaaagttgtggttgcaaaaacaaaattaggcagatatgaacgcctgattagtcagaagaatgctaagaggaagtgaaaagaaaaatcagctaacttcccgagggaagatttaggaactttctcttgtgaaatttttttccatgtgttttatcaagacattcacttattacaaacatattgtaattcttaggcaatttaggagtttattgcacctctaatctgtttttaatatgatattttgtttatagtaacctagaagtgctgaatttgaatacctttctttttggaatgcatttttttgatggaagttcacaaatgtggggctgttagtttttttcttcttttggtgaagctcagcagaactacacagcatatatattttccttggctggctttcccgtaacgggctcaatgtgcactcagacattattgagggtcttgcagttacttttggcatagcttgctgatggatgtaaagttggatatgatgagtggtaactgtgtgtgtaaacaaaatgagccatcattatagaaatggttgccttttagaggtcaacagtgacaaaataatggcccaagtagttggtttaaaattaggattgaatcctaacgtctaaagacaaaaacttcagatatgattaagcacttgacatctgtaggcatcagtagagacatcttattctactctattgtacttgagaaatggtaattcaccctatattttacaagtggtattgctgaggttcactgaatttcagtgttaacatgtaaatcaaaggtgaaaagagaaaaaaaaacttcagtaatcttcaagtggaagcaagttattaataggatgagattctttgggagaatcttaatttttaggtatacacatactgtttcagtatattcatgtattaatagtagcttctacttaatttttatcagcatatcagaattaataattcctaataataaaattgttttacaagatggagtttgcgtcttggtataaacagtttgttcattttgtcagtagttttgggagtcagaaggcacgtgaatgtgagtcagcttttggatatttagggctcagaacattatagaaaatttatttatttttatgatttactaaatgtgtatttcgattcttttattcatgtatgaaacataaaagttgcagttatgtcttattcaatcttaatttatccaaagacatatattgcttaagataaaagaaaaagttgggaaaaaaactatttagatgttaaaatactgtaaaataagagcaaaatgtcactactagtttccaaaagctctcagttatattatttataattgtatatatctctatatactataagcaatttagaggtttctttacatattttcatttcttttccctaaagagaatgcagttaattttgagttgagctcttttaggtgaaggattttataagaacaatagttacattttgattgtatctctttttgtatgtttttacatgcactagtgatgtgacactgtgctgaggatggaatattaactagctttggagtaagatgcttcttgctctgcccttgtctgtctaagacttagacaattatttaacctctttataaatctatgttcccatctgtaaaacaggaatgaaaatgcaaatcttctagtttattcaaaaagtcaaatgaaatcttactatcttttttttttagcacagtgcctgaggcatcatagatgattaataaatatcccatatatctattaatgcttctgattaatgtaacgttttcttttgtcaatattattagaaataatcctcttatattcctttatctattttttttttagttgggaaaagaggaaaaactttagaaagaactagtatttgtttactagcctatcaaggtggcaaagattattgcagtaataatccacatagcactggcttgggtgctgtgggtcttttcatgtcctgtgtaattgtatgtattggtacattttttacagggacaatttggcaatatatatcaaaaaattaaaactactataatattttgatttagtaattttattgcagaattcatacataagataaaatccaacttgagtacactgtgtgttgcagcttagtgaaattatgcatcattgattatccaggagttagtgtggtaaatccttattgttgaaaaacaatcagatattaaactaatgtttttgcagaaatattgttaataacgggaagtaggaaaaaatggttacagtagtgatttttttcacttgatacgggtttgtgaaaaatgtactgttttaattctgtttatattctcagaaacaaaaaggagagttatatatcaatatataatagtggcaatttctgtgtggcatgattatgtgtggttttgtttttctcgtcctttttttctattttatatgataaatatgtttttcttttgttgagaatatattaaacatcttttgaatttagaacatctctactaatgcagtaaaggcccacacctactagttaggtaatatagctcttactagaacttgcttagcaaccaaaccctttataggaaacaatatatagttcaattagtaaatacattttttacaaatttcattttttagagtgcaaacccactgttagacctcttggttctgacagagtcacaggcacgagaagaaacagatgatatccggactgctgtcaggcaacaacttcagaaagaactgattgctctttttgataccttgctgctcaatttcatggaagttactgacaggtaccatttgtaatattgcaggtttaggtgcatttatatagaacccaagttttctttgattttcaaagttttactttgtacttctttcaaattaagaaatacttctttcaaatacttaaataataatcagttatagtgttctgtttgtttttgtttcagtttaatctgttacagcctgattgtacctgcttggtctctttcactacacacatgcactcacatatgcacacacacagttttgttctctagggtttaattcctggttctctcttaattatctacaaatctacttgagcagtcatacctatgcctatgactttatgattatctttacactgatgactttcaaatacatatctctagttatgaattctgttttttaaaaataaaaatattaagatgaaagtcactattttaaccattttaaaatgtacatttgaatggttttagtatatccgcaatgtttgcaactgtcaccactacctaattccagaactttatcatcaccccaagagaagccttgtatccatgaaaaagtctctccctattcacacattcctctgggccctggcagccactagtcttctttctatgtctgtggatttgcctattctggatatatcacataaatgaaatcaaacaataatgtgacctttagcgtctagcttcttcacttagcatcatgtttccaagctccttgcatactgtagcaaatatcactacttctttctatgactgaataatattctatttatagatatgccatgttttgtttatccattcattcattggtggacatttgatctgtttctaccttttggctattatgaatagtgttgctgtaaacactcatatacagatttttgtgtggacatgtgtttcagttctcttgagtatataattaggagtggaattgttggttcatatggtaactgtaatggtaactctatgtttgacttttcaaggaaatgccaagctgttttccacagcagctataccattttacattcccaccagcaatgtatgagtgtttcattttcttcatatcctcaccaacacctgttattatagcatcctaatgggtgtagactggtatcattttggtttttatttgcatttccccaatgaaaaataattttgagcatcttctcatgttcttatggctatttgtgtatcttcttcggagaaatacctattcaacatctttgaggatttagtatcagtgtgcatcagggatattggcctgaaattttccttttttgttttgttttgttttttgctttaaatatgtcccagagattctggtacattgtgtcttcgttctcattgatttcaaagaacatctttatttctgccttcatttcgttatttgctcagtagtcatttaggagcaggttgttcggtttccatatagttgtgcggtttggagtgagtttcttaatcctgagttccagtttgattgcactgtggtttgaaagactgtttgttatgatttgcgttcttttgcatttgctgaggagtgttttacttccaattatgtggtcaattttagaataagtgcgatgaagtgctaagaagaatgtatattctgttgatttggggtgaagagttctgtagatgcctattaggtccgcttggtcaagagctgagttcaagtcctgaatatccttgttaattttctgtcttgttgatctgtctaatattggtagtggggtgttaaaatctcccactgttattgtgtggtagtctaagtctctttgtaggtctctaagaacttgctttatgaatctgggtgctcctgtattgggtgcatatatatttaggatagttagctcttcttgctgtattgatccctttatcattatgtagtgcccttctttttctcttttgatctttgttggttttaagtcttttgtatcagagataaggatggtagctcttgcttttttttttttttttttgctttccatttgcttgataaatcatcctccatccctttattttgagcccatgtgtgttttttgcatgtgagatgggtctcctgaatatagcacactgataggtcttgactctttatccaatttgccagtctgtgtcttttaattgtggcatttagcccgtttacatttaaggttaatattgttatgtgtgaatttgatcctgtcattatgatgctagctggttgttttgcccattagttgatgcagtttcttcatagcgtcgatgttctttacaatttggtatgcttttgcagtggctggtaccggtttttcctttccatatttagtgcttccttcaagagctcttgtaaggcaggcctggtggtgacaaaatctctcagcatttgcttgtctgtaaaagattttatttctcctttgcttatgaagcttagtttggctggatatgaaattctgggttgaaaattgttttctttagaaaggttgaatattggcccccactctcttctggcttgtaggtttctgctgagagatctgctgttagtctgatgggcttccctttgtgggtaacctgatctttctctctggctgcccttaacattttttccttcatttaatctttggtaaatctgatgattatgtgtcttgatgattatgcattcttgaggagtatctttgtggtggtctctgtatttcctgaattggaatgttggcctgtcttgctagattggggaagttcttctggataatatcctgcagagtgttttccaagttggttccattctctctgtcactttcaggtacaccaatcgaacatagatttggtcttttcacatagtcccatatttcttggagcctttgtttgttcctttttattcttttttctctaatcttgtcttcacattttatttcattaatttgatcttctatcactgatatcctttcttggtgaccttcggttgggatctttgagtggacgtgctgttcctttctgtttgttagttttccttctgacaggcccatgtgctgccggtctgctggagtttgctagaggtccactctcgaccctgtttgcctaggtatcgccagcggaggctgcagaacagcaaagattgctgcctgatctttcctctggaagcttcgttccagaggggcacctgccagatgccagccagagctcttctgtatcaagtgtcggttggcccctactaggaggtgtctccccgtcaggatacacgggggtcagggacccacttgaggaggcagtctgacccttagcagagcttgatcggtgtgctgggaggtccactgctctcttcagagtcgtcaggcagggatgtttaaatctgatgaagttgcgcccacagcctcccctttctccaggtgctctgtcccagggagatgggggttttatctataagtccctgtctggggttgctgccactttttcagagatgccctgcccagacaagggaaatctggcaatctggccatggcagccttgttgagctgcagtgggctctgcccagttcgaacttcccagtggcttagtttacactgtgagtgtaaaactgcctactcaagcctcggcaatggcggacgcccgtcccctcaccaagctctagcgtcccaggtcaatctcagactgctgctgtgctggcaacgagaatttcaagccagtgaatcttagtttgctgggctccgtgggagtgggacctgctgagccagaccacttggctccctggcttcagcacccctttccagcggagtgaacacttctgtctcgctgctgttccaggcgccactggggtatgggaaaaaagaactactgcagcttgtttggtgtctgcccaaatggccgcccagttttgtgcttgaaacctagggctctggtagggtaggcaaccgagggaatctcctggtttgtaggttgcgaaaaccgtgggacaagcgcagtatctgtgcaggagttcctcaggctcagtctgtcacggcttcccttgggtggtggagaaaattccccgaccccttgcgcttcccaggtgaggcgatgctccaccctgcttcagcttgccctctgtgccctgcacccactgtccaaccagtcccagtgagatgaaccgggtaccttagttggaaatgcagaaatcacccgccttctgcgtcgatcttgccgggagctgcagactggagctattcctatttgaccatcttgccagcaatccccccaacctttttttttttttttttaaaaagggatgggggtctcactatgtcaccccggctggagtgcagtgacacattcttagttcactgtaacctcaagctccagggcttaagagatcctcctgcctcagcttcctgagtagctgggactataggtgtgcaccaccacacctggctaattttttttactttaattttattttatttcatttttttagaaatgaggtctcactgtgttgtgttgctcaagctggccgcaagcaatcctcccacctcaggctcccaaggcactgggattataggggtgagccacagcccctggcccagtgtaatcgttacttgtattttatatgacattctctagttggtattttatgctttccttgaaaagtctcattttgatagagactattttctgccattttgtctggttcatttttttctattactatgagtttaagtaaccttttatagccagtaagatagcccattaagcccattatactttcttggtggttgattttccctcttttgcatacataggaaatgctcggaacttctttacgtttttcaaacgcagctggctctgaaactgctccagtgtctgaaagtgacggatgcgcctcatttctatggcctgccgtcccttgagcggaccttacgagggatggctaacctcactgcgtttccgggatggagctcacactctcctctcacaaagcctctagatatctgtgtgaagtacttgtcaggtctccttgaggtaagtaaaaatagcatatggtagttatttactattagttgcttttactttatgccaggccacaagtgcattatacgttactctattcaatgtagaatattatacattatttatataagtcataatagtgaaatgttttagtgatttttattaatagttaagtaaggaaggtcacttttataaataccctcattttcaaaagaaataaatggaaacttttgatgctcaaaggaagtgttcgctagagcatttcagattttggatttttggattaggaatgctcaaccagtaagtatatgatacaggtatttcaaaatccaaacaactccaaaattcaaacacttctggtcccaagcattttgtatacggcatactcaggctgtacaatgttaaaggatatttgttttttctttttcttccagtttgtgcagttctagatgctactgctatgaacattcttatcttttggtgaaaatgagcatcttttttgaaattttatcttctgttattgaaatatgtaaatatagccaatttttatatgttgaccatgtatcaggcaattcttatttccaatatcaaaacaaaagcctttaatttttcacccttcagtatgctgtttatagtttttttttgtcaattaagaaagatcaagttaaggaagttttcttttgtcctgttttgctaggagctttgttttttaattcataattgtatattgcttttttctgtatcttttaagataatcacatgatttttcccttatattccattactgattgattttaaaatgttaaacaaccttgcatttctcgaaacatttcagttaggttgtgatgtattactctttttatatgttagtggatttcgtttctcaattttttagaattctgaagtttttagaattattctatttcctcatgtaaaaaagtttttcgaattttgcatcttttttctcttaaagaatttgtcaggtttttaataatcaaaatcattccgttcttatgactaaaatgggagaatgtgagattgtaagaacgtgactttttcaaccattttaaatcttttcctttatataactttcttttttggaatagctgatttgcattggtgtgattttgttctctaatgttaggtagaatttgatcgtgaaacaatcttggtttgcagttttctttttgggaagattgtaaattgtgaaatgaaatgactttttttttttttgagacagagtcttgctctgttgcccaggctggagtgcaatggcatgatctcagctcactgcaacctctgcctcccgggttcaagtgattctcctgcctcagcctcccaagtagctgggattacaggcgcctgccaccacgcacagctaatttttgtctttttagtagagacagggtttcaccaggttggccaggctggtgtcgaactcctgatctcaggtgatccacacccgtcttggcctcccaaagtgctgggattacgggtgtgagccactgcgcctggcctgaaatgactttttaaatagatctaaaatcgttcagagtttctttttatgtgtgtcagccttagtaagttatgtttttgtagaacttaaaaactttttatctaatttttaaaatttgttactgtgaaggtattcatcaaatcatcttacacttttaatgtctgctgaatctgtagtgaggtcccctttcattgcagacattaattattcctttctcaatttttcttggtttatctttctaatagaatgaacctttggctttgttgagcctctctttaacttttttctcctgttttatttctgccaatatttattatctccttctacttttagtttagtttacagctcttttttctaacattttaaggtagaggcttacgtcattgatttttttaaaagtctttctcaaatgtgtgtttttagctctaatcctctaagcatggccttatgccatgtttttatcatcaatttaggtcaaaatatttctactgtgatataataaatacgacaatgatatggttgtacatagttctatgagaacagcctcatcacagtggcctgacaattttgcatatctgcccttgggcttcatagacaaggcttaactacagccaatctaaatcttggcagaatttcctgtgatccttctggaacatgagaatatgaaaggcttatgagcagctgactatgcaagattgattctcacttacttcacagtctattaggaagtcagttaggagcccgtttcttattggttcctaggttccgacgagcactgggctttctgccttgctctccttggggcatagctacagcttataaaactgctttactgcagcacggcatgggcttctccgcaacagagtgtcctacatctttgttatagtcatctggcccctttgtttcaatgtcatcctgtgcaagggatactagtagctggcacctttgtctattcttgcttttgctgtttatgtaggtaataaactgtctgaatccaaaaattactcattgttttcttactggacaaatctgtcagccttgttttgattgctaactgtgttcggacctcaagaatgattcttgtaggaagcactgtagagttagattttgaaagataagtaaattgatagtgatagcaatagacattctagacatggaattttctgataaaattgtatctataacctcctgtttttttttcatgctgtgggtgacttcttgacatcatataatctctacctattgccagattatttttcagaaacataaatttttcaatccaaacctctttttttttcaagagcataagactcaatattttgcatttagagatttgcctccattgtagttttttcccacatctctgaattttcagttatatctggctgtttttccaaaataaaaatgcactttaaaaagactgcttctttcacatagtttcctctcttttagggatggcaatatctacaaaaaatttaagatctaacttatttatttaccttcatttagtaaaccttttcttattcttccaaggttggatacttacctaatactgtttggcctttcctgtaggttatatacctgtaacaatttatatatgtggctattacttaatacattatatttttatttattttactttatttctttgagacagggtttaccgtgttgctcaggctggaatgcagtggtgcaatcacagctcactacagcctcaacctcctgagcccaagtgatcttcccacctcagcctcccaagtagctggggccacaggtgtgcaccactacacctggctggtttaatttttttgtagagatgggtctcactatgttgcccaggtttgtcttgaattctttggcgcaaatgatcttcccactttggcctaccaaagtgctgctattacaggcatgagccactgtaactggacctttattttgttttctgcattgctctagtagactatgagcttataagtatcatctttgggctatttctactatcccatggctactgcattgacctagcaccatggtttttacatagtggttagtgaatcagttaattaatatatgtgctacataatacatatatattgtgtatagtttttaaattaagatacagtttgaaaaacattttggaaatgtagcataaatgattataaaaatatgttttattgttgtatttttattactaaataatgatttaaataatgtatatatatattttatctggtcttatctagaacttttttccaaaagcacatattgtttttaaaacaagtttaaagatcataaatactctttgctgtactgtaaaatttaatatgaatttcactggagtccctttaataaaataaatttcggagaggttccaagatggccaaataggaacagctctagtctacagctcccagcatgagcgacgcagaagacgggtgatttttgcatttccagctgaggtaccgggttcatctcactggggcttgtcggacagtgggtgcagcccacggactgtgagcagaagcagggcggggcatcgcctcacccaggaagcgtaagaggtcagggaattccttttccaagccaagggaagccgtgacacatggtacctggaaaattgggacacttccaccctaatactgtgcttttccaatggtcttagcaaacaatacactaggagattatatcccacgcctggcttggagggtcccacgcctatagagcctcgctcactgctagcacagcagtctgagatcgaactgcaaggtggcagcgaggctgggggaggggtgtccgccattgctgaggcttgagtaggtaatcaaagcggccgggaagctcgaactgggtggaacccaccacagctgaaggaggcctgcctgcctctgtagactccacttctgggggcagggcatagctgaacaaaaggcagcagaaacctctgtagacttaaacgtccctgtctgacagctttgaagagagtactggttctcccgttacagagtttgagatctgagaacagacagacagcctcctcaagtgggtccccaacccccgagtagcctaactgggagacacttcccagtaggggccaactgacacctcatacagccgggtgcccctcttgagacgaagcttccagaggaaggatcaggcagcaacatttgctgttctgtaacatttgctcttctgcagcctccgctggtgatacccaggcaaacagggtctggagtggacctccagcaaactccagcagacctgcagctgagggtcctgactgttagaaggaaaactaacaaacagaaaggacatccacaccaaaaccccatctgtacgtcaccatcatcaaagaccaaagatagataaaaccacaaagatggggaaaaaacagagcagaaaagctgaaaattctaaaaatcagagcacctcttctcctgcagaggaacacagctccttgtcagcaacggaacaaagctggacggagaatgactttgacgagttgagagaagaaggcttcagaagattggtaataacaaacttctccaagctaaaggaggatgttcgaacccatcacaaagaagctaaaaaccttgaagaaagattagacgaatggctaactagaataaacagtatagagaagaccttaaatgacctgatggagctgaaaatcatggcacaagaactacatgacatatgcacaagcttcagtagctgatttgatcaagtggaagaaagggtatcagtgattgaagatcaaatgaatgaaatgaagcgagaagagaagtttagagaaaaaagaataaaaagaaacaaacaaagcctccaagaaatacgggactatgtgaaaagaccaaatctacatttgattgttgtacctgaaagtgacggggagaatggaaccaagttggaaaacgctcttcaggatattatccaggagaacttccccaacctagcaaggcaggccaacattcaaattcaggaaatacagagaacgccacaaagatactccttgagaagagcaactccaaggcacataattgtcggattcaccaaagttgaaatgacagaaaaaatattaagggcagccagagagaaaggtcccgttacacgcaaagggaagcccgtcagactaacagcggatctctcggcagaaactctataagccagaagagagtgggggccaatattcaacattcttttttttttatgatttgcttttttttttttttttgaagtatttattgatcattcttgggtgtttctcggagagggggatgtggcagggtcataggataatagtggagagaaggtcagcagataaacacttgaacaaaggtctctggttttcctaggcagaggtccctgtggccttccgcagtgtctgtgtccctgggtacttgagattagggagtggtggtgactcttgaccagcatgctgccttcaagcatctgtttaacaaagcacatcttgcaccgcccttaatccatttaaccctgagttgacacagcacatgtttcagagagcacgtggttgggggtaaggttatagattaacagcatcccaaggcagaaaaatttttcttagtacagaacaaaatggagtctgctatgtctacttctttctacacagacacagtaacaatctgatctctctttcttttccccacatttcccccttttctttttgacaaaactgccatagtcatcatggcccgttctcgatggtcgctgtctcttcagagctgttgggtacccctgcagacaggctgtcacttcatgcttggaagattgcacagcggccaggcagaggcgctcctcacttcccagacgaggcggccaggcagaggcgatcctcacttcccagacggggtggcggctgggcagaggcgctcctcacatcccagacggggcagccgggcagaggcgctcctcacttcccagacgggacagctgggcagaggcgctcctcacttcccagacggggcgcctgggcagaggcgctccccacttcccagactggacagctgggcagaggcgctcctcacttcccagacggggcgcccgggcagaggcgctcctcacttcccagacggggcagccaggctcaacattcttaaagaaaagaattttcaacccagaatttcatatcctgccaaactaagtttcataagtgaaggagaaataaaatcttttacagacaagcaaatgctgagagatttgtcaccatcaggcctgccttacaagagctcctgaaggaatcactaaacatggaaaggaacaagcggtaccagccactgcaaaaacatgccaacttgtaaagaccattgatgctaggaagaaactgtatcaactaacgagcaaaataaccagctaacatcatgatgacaggattgaattcacacataacaatattaaccttaaatgtaaatggtctaaatgctccaattaaaagatacagactgggaagttggataaagagtcaagacccatcagtgtgctatattcaggagactcatctcacgtgcagagacatacataggctcaaaataaagggatggaggaagatcaaccaagcaaatggaaaacaaaaaaaggcaggggttgcaatcctctctccgataaaacagactttaaaccaacaaagatctaaagagacaaggccattacataatggtaaagggatcagttcaagaagaagagctaactatcctaaatatatatgcacccagtacaggagcacccagattcataaagcaagtccttagagacctacaaagagacttggactccacacaataataatgggagactttaacaccccactgtcaacattagacagatcagtgagacagaaagttaacaaggatatccaggacttgaactcagctctgcaccaagtggacctaataggcatctacagaactctccaccccaaatcaacagaatgtacattcttctcagcaccacatcacacttattccaaaattgaccacatagttggaattaaagcactcctcagcaaatgaaaaagaacagaagttatgataaactgtgtctcaaaccacagtgcaatcaaactggaactcaggattaagaaactcactcagaacagctcaactacatggaaactgaacaacctgctcctgaatgactactgggtacgtaacgaaatgaaggcagaaataaagatgctctttgaaaccagtgagaacaaagacacaatataccagaatttctgggacacatttaaagcagtgtgtaaagggaaatttatagcactaaatgcccacaggagaaagcaggaaagatctaaaattgacaccctaacatcacagttaaaagaagtagaaaagcaagagtaaacacattcaaaagctagcagaaggcaagaaataactaagaacagagcagaaatgaaggaggtacagacacaaaaacccttaaaaaaaattggtgaatccaggagctggttttttgaaaagatcaacaaaatagatacaccactagcaagactaataaagaagaaaagagagaagaatcaaatagatgcaataaaaaatgataaaggggatatcaacaccgatcccacagaaatacaaactactatcagacaatactataaactcctctatgcaaataaactagaaaatctagaagaaatggataaatttctggacacatacaccctccgaagactaaaccaggaagaagttcaatttctgaatagatcaataacaggctctgaaattgaggcaataattattagcctaccaaccaaaaaaagtccaggaccagatggattcacagctgaattctaccagaggtacgaagaggagctagtaccattccttctgaaactattccagtcaatagaaaaagagggaatcctccctaactcattttatgaggccagcatcatcctgataccaaagcctggcagagagacaacaaaaaaagagaattttagaccatatccctgatgaacatcagtgcaaaaatcctcaataaaatactggcaaactgaatccagcagcacatgaaaaagcttatccaccatgatcaagtgggcttcatccctgggatgcaaggctggttcaacatgcacagatcaataaacgtaacccatcatataaacagaaccaaagacaaaaaccacatgattatctcaatagatgcagaaaaggccattgacaaaattcaacagcccttcatgctaaaaactctcagtaaattaggtattgatgggacgtatctcgcaataataagagctatttatgacagacccacagccaatatcatactgaatgggcaaaaactggaagcattccctttgaaaactggcacaagacagggatgccctctctcaccactcctattcaacagtgttggaagttctggccagggtaatcaggcaggagaaagaaagaaagggtattcagttaggaaaagaggaagtcaaattgtccctgtttgcagatgacatgattgtatatttagaaaaccccatcgtctcagcccaaaatctccttaagctgataagcaacttcagcaaagtcgcaggatacaaaaaatcaatgtgcagaagtcacaagcattcctatacaccaataacagacaaacagctaaatcatgagtgaactcccattcacaattgcttcaaagagaataaaatacctaggaatccaacttacaagggatgtgaaggacgtcttcaaggagaactgcaaaccactgctcaaggaaataaaagaggacacaaacaaatggaagaacattccatgcttgtggataggaagaatcaatatcatgaaaatggccatactggccaaggtaatttatagattcaatgccaccttcatcaagctaccaatgactttcttcacagaattggaaaaaactactttaaagttcaaatggaaataaaaaagagcctgcattgccaagacaatcctaagccaaagaacaaagctggaggcatcacgctacctgacttcaaactgtactacaaggctacagtaaccaaaacagcatggtactggtaccaaaacagagatatagaccaatggaacagaacagagccctcagaaataataccacacatctacaaccatctgatctttgacaaacctgacaaaaagaagaaatggggaaagcattccgtatttagtaaatggtactgggaaaactggctagccatatgtagaaagctgaaactggatcccttccttacaccttacacaaaaattaattcaagatggattaaagacttaaatgttagacctaaaaccataaaaacccaagaagaaaacctaggcaataccattcaggacataggcatgggcaaggacttcatgactaaaataccaaaagcaatggcaacaaaagccaaaatagacaaatgggatctaattaaactaaagagcttctgcatagcaaaagaaactaccatcagagtgaacaggcaacctacagaatgggagaaaatttttgcaatctacgcatctgacaaagggctaatatccagaatctataaagaacttaaagaaattttgcaagaaaaaaacaactccatcaaaaagtgggcgaaggatatgagcagacacttctcaaaagaagacatttatgcagccaacagacacatgaaagaatgctcatcatcggagaaatgcaaatcaaaacgacaatgagaaaccatctcacaccagtcagaatggcaacattaaaatgtcaggaaacaacaggtgctggagaggatgtggagaaataggaacatttttacactgttggtggaactgtaaactagttcaaccattgtggcagacagtgtggtgattccttaaggatctagaactagaaataccattttacccagccattccattactgggtatatacccaaaggattataaatcatgctgctatattcatggaactagcccaaatgtccatcagcaatagactgggtgaagaaaatttggcacatatacaccatgtaatactatgcagccataaaataggatgagttcatgtcctttgtagggacatggatgaagctggaaaccatcgttctcagcaaactatcgcaaggacagataaccgaacactgcatgttcgtgctcataagtgggaattgaacaatgaaaaacttggaaacagggtagggaacatcacacaccagggcctgtcatggggtaggaggagggtggagggatagcatcaggagatatacctaatataaatgacaagttaacaggtgcagcacaccaacatggcacatgtatacatatgtaacaaacctgtacgttgtgcacatgtactctagaactttaagtatattaaaaaaataaaataaacttcattttttaattataaatattaaaaaaggttcaactgtcagtatactaattagttattttctgctgtctattagaaatgtatgaattttaaaaaacaggtatattaaagagttaatgataatatttcttagaaagtcagctcctctagtgcatttaaaatataattcagttagtctagctagtggcctatctatctcattaagtttttcaaaaaaacaactcctggatctagtgacctttcgaatggtttttcatatcttgatttccttcagttcagctctgattttggttatttcttgtcttctgctagtttggggttgatttgttattgctgctctaattctttcagttgtgatgttaagttgttaatttgagatctttctaactttttgatggaggcatttagtgctacgaatttccctcttaacactgccttagctgtgtcccagagattctgatgtgttgtaactttgttctcatgagtttacttgtgtaacaaacattcacgttacccgtgaacctaaaagtttaaaaattaaaaaaaatatataattgaacctataagtacctagtttatagcattttttgtcatgtgatttataaatactctatttatcaaccttttacagagtcagtctcctctagaaaatgagttttactctttgaaatcaggaataggtgaggacctgccacagcggtaactaaagaagaagtgaagtgttgcctcatttatgtttagaaactatcagaagtgcttttgttttaaaattacgtgcaaagactttagatcacacctacgtttcaaataccagaaattgaaatgaactgttaatgtattggagaacaaaagggcttagttttaggtaagaagtgtaggcaaaaaggcagtagtccattctgtgttcagttgtctttgaggtaataaaatttagtaacagtttgttagctaaaggatacataaaaagcacagtccctgttatgtaatgtttcgcagttataaaaaatttgattagccaatcttgctttggtttaaaaaggaggtcgttttgtgcttcataaaacatctcgagcagaaaatctttatgactttatgttaaatggcaggcaaatattaggaaagaatccgtcacttttgttaaaaattgtagcagggtaacatttaatcttgggactatctgcttagtttattaattacataaacaggtatccctgttgtactactaatgactaaattcatcttttaaagaataaagtaaggcttatgtgagagaacattgaaacaaagtcattgttggtccaaatgatttgcttcatagtttcttagtaattaaagctgtttcctttttggaagggagccatatttctaataaaagattagcttgtttctgcacagtgaaatttgaatatgagtatttgctttttgtagctgtgaaatgagactttttaactaagcatgattaattatgataggtgaataaactatgataattaaatctttaaatcagatacatgatgtataattccagaggtctgacaaaaatatcaagttgaaagaaaatactggcaaaggtcttggcttgtcatttataagctagaattaaaaatcattacacagatcacagatgttagatatctccaaagatgacttagaggaagataataaggatctgatcatttagatattttatttttcaagtagtcacttaaaattttaaatttttgaccttggggaaggggcagctgtgggcacagcttcagcaaacttaaatattcttgcctgccggctctgaagagagcagtggatctcccagcacagcactcaagctctgctaagggacagactacctccttaagttggtccctgaaccccgtgcctcctgactgggagacacctcccagcaggggttgacagacacctcatataggagagctctgctggcatctggcaatgcccctctgggacgaagcttccagagtaaggaacaggcagcaatctttgctgttctgcagcctccgctggtgatacccaggcaaacagggtctggagtggacctccagccaactccagcagaccagcagcagaggggcctgactgttagaaggaaaactaacaaacaggaatagcatcaacaccaacaaaaaggacttccactcagagaccccatccaaaggtcaccaacatcaaagaccaaaggtagataaatccatgaagatgaggaaaacccagtgcaaaaatgcggaaagttccaaaaaccagaatgcctcttttcctccaaaggatcacaactccttgacagcaagggaacaaaactggatagagaatgagtttggtgaattgacagaagtaggcttcagaaggtaggtaataacaaactcctccaagctaaaggagcatgttctaactcaatgcaaggaagctaataaccttggataaagggtagaggaattgctaactacaataaccagtttagagaagaacataaatgacctgatggagctgaaaaaaacagcaccagaacttcgtgacacatacatgagtatcaatagccgaatcgatgaatcagaagaaaggatatcagagattgaagatcaacttaatgaaataaagcaagaagacaagattagagaaaaaaaaaaaacaaaagggaatgagcaaagcctccaagaaatatgggactatgtgaaaagagtgaacctacgtttgattgatgtacctgaaagtgacagggagaatggaccaaattggaaaaaactcttcaggatattacctaggagaacttccccaacctatcaagacaggccagcattccaattcaggaaatacagagatcaccacaaacatgctccccgagaagagcaaccccaagacatgtaatcgtcagatttaccaaggctgaaatgaaggaaaatatattaagggcagccagagaggtcgggttacccacaaagggaagcccatccctgttagtcttaccagcggatctctctcagacaccctgcaagccagaagagagtgggggcctatattcattaataaagaaaataattttcaacccagaatttcatatctagccaaactaagcttcaaaagcgaaggagaaaatcctttacagacaagcaaatgctgagagattttgtcaccaccaggcctgccttacaagagctcctgaagaaagcactaaatatggaaaggaacaaccagtaccaaccactacaaaagcataccaaattataaagaccattgatgctatgaagaaactgcgtcaactaatgggcaaaataaccagctaacatcgtaatgacaggatcaattcacacataacaatattaatcttaaatgtaaacaggctaaatgccccaattaaaagacacagactggcaaattggataaagaggcaagacctatcagtgtgctgtattcaggagacccatctcacatgcaagacacacataagtttgaaataaagggatggaggatgatttaccaagcaaatggaaagaaaaaaaaaagcaggagttgcaattttcatcactgataaaacagattttaaaccaacaaagataaaaaaaaaaacaaggcattacataatgataaagggatcaatgcagcaagaagagctaactgtcctaaatatatatgcacccaatacaggagcacccagattcgtaaagcaagttcttagagacctacaaagagacttagatttccacacaataacagtgggagactttaacacctcactgtcaatattagatcaacgagactgaaaattaaaaaggatattcagaaaaaaaaaaagggatattcaagagttgaactcagctctggaccaagcggacctaatagacatctacagaactctccaccccaaatcaacagaatatacattcttctcagcaccacatcgcacttattctaaaattgaccacataattggaagtaaaacactcctcagcaaactcaaaagaatggaaatcataacaaacagcccctcagaccacagtggaatcaaattagaagtcagcattgagaaactaactacaaaccgcacaactacatggaaactgaacaacctgctcctgaatgactactgggtaaataacacaattaaggcagaaataaattagttctttgaaaccaaagagaacaaagacacaatataccagaatctctgggacacagctaaagcagtgtttcaccaaatgcccacaggaggaagggggaaagatctaaaatcgacaccctaacatcacaattagaagaactagagaagcaatggcaaacaaattcaaaagctagcagaagacaagaaataactaagatcagagcagaactgaaggcgacaagagacacaaaaaacccttcaaaaaaaatcaatgaatccaggagctggtgttttggaaaagatcaacaaaatagatagaccactagcctgactaataaagaagaaaagagagaagaatcaaatagacacaataaaaaatgataaaagggagatcagcactgatcccacagaaatccaaactaccgtcagagagtgttataaacacctctacgcaaataaactagaaaatctagaagaaatggataaattcctggacacatacaccctcccaagactaaaccaggaagaagttgaattcctgaatagaccaataacaggctctgaaattgaggcaataattaatagcctagcaaccaagaaaaggaccagagggattcatagccgaattctactagaggtacaaagaggatctggtaccattccttctgaaactattccaaatgatagaaaagagggaatcctccgtaactcattttatgaggccagcatcatcctgataccaaaatctggcagagacacaacaaaaaaagaaaatttcaggtcattatcactgaggaacatcaatgcaaaatcctcaataaaagactggcaaaccgaatccagcagcacatcaaaaagcttatccaccatgatcaagttggcttcatccctgggatgcaaggcccgttcaacatatgcaaatcaataaatgtaatccatcacataaacagaaccagtgagaaaaaccacatgattatctcaatagatgcagaaaagtctttcgataaaattcaacatctcttcatgctaaaaattctcaataaactaggtattgatgagacatatctcaaaataataagacctatttgtgacaaacccacagccaatatcatactgaatgagcaaaagctggaagcattccccttgaaaaccagcacaaattattcataaactctttaaaaggatgctataacatttttaaaaatattataagcatattctaagttacaactgtgtactaggagggcaccacacatctttttttttttttttacagactttaaaaggaaaaatattgaaactaagaatttttgtttttgttttgaaaaattacaggatctcactctgtaacttaggccaagtgcagtggtgcaatcatagctcaccgcaagctccagctcccaggctcaagggatcctccctcctcagcttccccggtagctgggactacaggtgtccactgccatgcctggctaatttttttcttttttaaagtagactgggtcttgctatgttatgtaggctgaagaatattttcttttaacaatggtaaaatacccataacataaaatttaccatcttattcatttttaagtatataaactaaaaatattacaactttataaggtaaggattcaattcatacaagtcagtagacagttatatatttatctttatataccattgagaataaagccaccatgaaattgtttacatttgtttttcaggtcattacttctttttatgtggagcgtggaggaaatgctatgtccttcatgggaaaaggtgttacaaagagcacaattctttgcttgcttcacttatcccatgagatgatggcccaggctgggagcttggtgagcgcgttaaagctgtctatcttctgaacatttgcttgaaagggaatgtgctgtgtccaacacatttcaagcatataaacttgccacatgaaaatgtctcttttgacttttctttttaggtaacgtgaatgatttttgactagaatatttcttagaagttgtatattaacaaatctgaatcttatttgaaattgattcaaatgtgcatacactggaaaactacattttgtctacattatgggaaaaatagcttctgtcaaaaaattgttatgtttaactttttaaagagaaacaaatttttttgtttgccttttttggctgaataatggattaaaaccaagtctaaaatacattttcacgttgttttcattaaaaattcttgttttaaccttcctgcattttatttttagaaacttacctcaaatatttctgtttcccttttttccctctaggagtggatgtcactttggttcttgcctttgggtagtcatagtgaagaacatattcctactcaacaaggattggcttggttgattccattatgggttgatcgggacccagaggtgagtgtgaaggagaatcaagtgtattgtgtttagattaaaaaacaaatgacacggggccaggtgcggtggctcatgcctgtaatcccagcttgttgggaggctgaggtgggcagatcacgaggtcaggagattgagaccatcctggctaacacagtgaaaccccatctctactaaaaatataaaaaaattagctgggtgtggtggcaggcacctgtagtcccagctacttgggaggctgcagcaggagaatgctgtgaacttgggaggtgaagcttgcagtgagctgagattgtgccactgcactccagcctgggcaacagagcaagactccatctcaaaaaaaaaaaaaagacacaaaacatatatacatatacatagttatattatgggattattgtagtgactctaccttatgttttatttaagccctgttttagcttaggctgccataacaaaataccacagactgggtggcttagacaacagacacttcttttctcatagaagttttggaagctgaaagtccaagatcagagtgccggcatagtcaagttctggtgagggctcttcttctggcttgtagacggctgccttcttgctgtgtattcacgtggcctttccttggtccatgcatgtggggcaggggagggaggggtggtatagagacagatttgtctttttttttttattataatgttaccagtcttattgagataggaccactcccttatgatctctttaaaccttaattatctcctagaaaccctgtcttcaaatgtagtcacttgagcataaagacttcaacatatgagttttggagggacgcaattcagttcatagttttccatccctgagcccctgaacttcatgttcttcttccatgcaaaatgcttttattctccctcaacaacctcaaaagtcttaacttattcccaaatcaactgtaaagtctaaagtccaaaatctcatctaaatgtcatttaaaccacatctgggtaagtctccagatataaaccctcctgaaacagaattcttctgcaggtgtgaacctgtgaacccatacaagttatatgcttccaaaagatgatggtagaatagacattcccattccaaaagagagaaataggaaaaaaaggaagaagtgatgggtcccaagcaagtccaaagcctagcaaagcaaatttcattagatgttaatgctcaaggataatgttctttggcttgatggtgtgccttacaggcccaccagagtgacagcatctgtctagatggctctgtgggatgaccccacccctttggctgtcttcaagagccccgcccataaagctgtcttcaagggcagccatgttcctgaagcactgggcagggtcatcattctggcccacagaaatcagaggtctttgaaaccaaggaggaaaagccacccttgagtcctgtggtgggattagcagcctggggatctctgaatcattttttgggtcattcttttcattgaagaatacagtagtcctcccttatcagaggtttcattttccaaaagcaccctgaagatcagtagtagccaaaccctccctcacaatgcctacatcattcacctcacctcatctctttatgtaatcattgtatcatctcacatcaatacaagaaggctgagtgcaatacaataagatattttgagagagagaccacatttatgtattttgtattataacatattgttgtaattgttctagtttatttttagttattgttaatctcttactgtgcctaatttgtaaactttaccatagatatgtatgtgtaggagaaaacatagtagttatagggctcagcactatctgtggtttcaggcatctactgggggtcttggaatgtattccccatggataagggagggaccactgtagcacatatttgcttacagaatccaggaagtccaacagctttccttcattctctgcatctttctctgtcctctttagttcaaactggcaatgtctttgctgatataatcccatctctattcctggcttctgctgagatgtctgattaagtccatgaattgcacccgtgatctttttcttaaatgggtattcagccacaccctccatgttctctttagaacaagctttctcattttttttgcacagataggctgagaatttttcaaatcttgttcttgtttctttttgcttacccattcttaattccttctttaattcatctctctccctttgcattttgctataagcaatcaggaggaaccaagccaatttttcaacactttgcttagaaatcttctcagctaaatatccaatttcattgctcacaagttctgcctttcacaaaacactagaacatgaccacagcttaaccagttttcttgctactttataacaaggattgcctttcctcaaataaccttttttaaataacactttcctcatttttgtctgagatctcatgagaattacccatgtctacgtttctggcatccacctcaaaactcttctagcctgtaacccattacccagtgccaaagtcactttcatgtgtttaggcatttgtttcagcagcatccccactccttggtacaaaaatctgtattagtgtgctcaggcttccataacaaaataccattgtctgggtggcttaaaaacagaaatttatttcttacagttatagaggctgcaagtccaagatcagagtgtcaacatggttggtttctggtagggcactcttcctgatttacagagggccaccttctcactgtgtgctcatatgacctctccttggagcacgcacatggagaaagatttctctccttcctgaggccaccattcctagtgcagtagggtcccacccttataacctcatttaactgtaatcacctaatagctctgtctccaaatacaggttggggattagggcttcaacatacgagtcttgaggagacacagttcagtacacagcaccctcattttcaatcaaatttgttcgagtatagattgaaaatataaaagagaaaaggttatagtatctattaccttcagaagagtggaaaattattggagaagcttagcaattttgaaaaaaataaaaaggatctggaaattatagacatgcaacacttaagtgtcatataatgaaattaaattaaatgcaaaaaattgcatttgcattacaatacaaaattttgtattatttctttccagttttagccagtttacttttttcaagtaaaatatgctattacaataaaatcttatttatagaaatatttgaaatacattttttagtcacattgaacttggacttactacttgacaattttatgactgcatttttaaaaaattctatagctgtcattgaaactatatttttggattcgaattcagaaatttaccaaaacgtgtggcttgaacagcagtggttctacagcaagcatattataccacatcaatcttatttgggaacgtttttctcttgaataacttttgaggaaaatacgaaatgccttgtaaaatgataattgcctctttgtttagaagttttaagaaagttaaaatcatttatttggaagaaacaataaaaaattaagaaaggtagaacaaagaatagctaccttttttaagaatgaagaattgaaattgtgttcataaaatgtaagtgccctatgctttccttagaaaaaggcttgcaaactataatttttatgcatctttttatacccagttttactttgctttgaaatttgcttatatttaatttttcctatattactgctttcttgaatcatggaatggaggacactgtcttctataggtgtctcttataatttaggatcataaaaccaatggatttttttaaagtgtgatatttatgtaccagaaaaactaagaattcatgttaggaaaaaggcttatttgattcaacaactttctctttaatttgaacaggtgagattcacttcactgggattaggatcagcactgaccacccttgaaacgggctgtgtggccttagcaaacagttgtcagaacatttccggtgggctctggggaactgtggtgaacattcttctggaccagtcagaatgtagtatggtgcgccgggaggtatgtctgtcttttctcctttttttccttagaaattctttgtgatggtatccgtaagcgatacttgactgccgctcaacatggtggactgaccactgaccatgatctcttctgtctgtgaacacccaaacaaaatgacagtagaggatttaaaaggtattcatgcacaggaaaaactggagtccttccttccgataagataaaatcggaatatactatattttaatgtgaactttttttattatgcattgaaaggtagttcacaggaaaaattacttttatattatctcagcatttatgggtctctgatatttatgaagctttagtatagataagaggctgtcaaaataactctttgtagtatttatcatataacatgagagggaaaaataaaccctattttaattctttctgaatagcttgtggtttttttttattgctgcttttgttaaagtaatgattcatgtaaatggttttaaaacaataatcaaattgtacttagaggcttatgaaaaaaaacagcagctcctgggtccaccattagcagtcgccagttccaagctcaaaaggctagttttgttgctgtttgccttcatgtttttaagtagtgatgtttatatttatggctgcttcttgatttatcaactttaaagcttttccatcacttctagttatcatggttggaaatgtcagtttcttagaatcctcttgttaatcctgtcattctcccattatggttatttcatctttcattaagcagacaatcaatgctcctatttgtatgattatttaatttgatcatcttcaggatctagtcaagttggacatttgtggtttgtatttctagttagcaagtttttattgaaaggagtctgtataagagaagggagaaagcggggcagaggggtgcgtgtgtttgtgtgtgtgtgtgtgtgtaatctgaaaggggatagtagaaacctaaaattatatttcttaaatgctaccagaagaatttatgttatacaaatcattttttaataaagctgaattctgaaataggaaaagatatatttcctgatgaaataatttcatatgctgttaggtcattacctaacaaggtcattacctaagaaggtcatcacctaacaagaaatacagtttgacaattctcataatgacctctcagcatgtgcagttgaccagagatgtcttttgctattaattacaatatattggttatttcagagatgaccacaagatggcagtattgacctttttttttttttttttttttttttttttttttttttttacattttcaggcggcatttattcttcagaatctccttgtaattccaatgcctacagaaattataaaggattatacttggcaggtgggtgattttaaacaattatcaacctagtagatgtttcaaattaattggtgataaattttcagtataagtagtatatttcattattgatgaaactatatacaagacagcaagggcctcttaaaatagaacgtagaatttgttcttatgccgaccagacttaaaaattcttctctatagtgttcacaataatttaaagcaaataataatagttaacatatgtttactatgttttaggcacccttctagaaatgtaagacatagtaacttgtataattgtttgagttgtgaactgttactatccttattttctaagcttaggaacttttgcatagagagtttaaatagtttgtcctaaatcacacagctagtcagtggtacgcctttgctttgagtctaggcagtctcttacccactttgctgtattacttctctaatttagtaataataaacaaatttgtagatagttaaatatgtgttgatgttaacatctttttttccttttctaggttagtgcacagtgcgggttatagtgtatcttgctttgttttctgttgggttaactttctttttcatgttctgaatatcacatcagtaaatggttacctaacatttttatagcttacattaaaaaaattctagcttcatgggatatatgtacatgtttgttacataagtatattgcgtaatggtggtggggattggggttctcgtgtactcattacccaaatattgaacattgtacccagttaggtaatttataacctcagccgcctcccccactccctccttgggagtctcagtgtctgttatgtctgtctttatgtccatgtgtattcattggttagctcccacttatacgtgagaacacgcaatatttgattttctatttttgagttagttcacttagataatggcctccacctccatccatgttgctgcagttttaggtaatttggaagatacaaaagtacacttattggggatataagatgtgctgtttctgtccttttacctatccatatattttcaccttatagggatatatttatcatattgctacacctcactcctcaaaatcctgtataaatctaaggtttatttttaagttttaattagactatactcttagaggagttagtgaaacaagctgaaccgtagcaagggcaagtttccgcacatgacccgaagcatgaatccaggtggttgtcaaggcccaggtagcatttaactcttggaaggcttacctctccaaactttacaaacccagggtaaccctaccagtcattgtaaatcccaggcttgtaatttgctcgtaatttctttaacattgccttctgataatggctgcttatctactttccatgttgtaataaaaccaggagacaaaactggagggaatatgcaggattaatagttatattaatagtgtagtagttttggtacctgttatccggagactacattttaaaacatgttgtttttggctcaaatacaaataatctctactcccattgttaaactagtgacccatgtacatggatatacttggtgatgtactaccaatgaatttttaattattgaaataagtataaaggcagagtatattaaagttcctgggacattatgttgtaatacagaaccgtatgtagctgttcatatttttctcttagaaattaaatagtaaagttcctgtttgttgctggtggcatgcttactgcagtttattggttttgttattctccagtcttcatcatggaaatccttttctactaaaaagtggaaaatagtgatttaagttagcttttggagttttggccttgctaagttggccaaaataaaaaaagttggagagccactgctgtcccaaacaatagttgattacaacttttgctagtcttaggaaaaattagataaataaggacaatcttgtatgctttttaataaactcagattttcttcctctcttttcagtctttttttttttttggttatttttgtttgtgtaagtgtccttccttggcagtgaaaatagttaactcagtatatctgtcatccaattttaagaaagtttagtggggtctgaaattccaaagtagaaacagcttctgcaagaaggaaacaagatggttgtctctgggtgcagctagtggggcacatggtcctttgcaaccatgaaaaaggggccacatagccagtattttaaaattcaaacagtctttggtagaattatgaataataatcttattcaacaaaatgtttcatttacttattttagtgtccctttcatagtgttgtggaggatatagcatgaaacagcatgtttaggagctttgttaaaattttattttggttgaggtaaatatttgattttttttttttaacaaagagaattgcttctattgctttgcactttgttttcctgcctgcagtctaaattaatgcccgctagtgctcttgtttcataggctttctgaagcattctctttataattactactccttttcctctccttcctctgcacagtagcataaattcctacttcatgtcatgacatagaattgttgtacttgtgaatagtaataatatgcatatatgaattatgaataatattatagctgagtttcccttttattgttagatgccagaaagtagagcccttttatcaattgtgactttttctgtatgtacttaaaaaaaaaaaaagatggggtctcactgtgttgtccaggctggccttgagttcctgggctcaagtgatacgcttgcctcagcctcctgagtagctgggaccccaggcacatgctgccacacccagcttaccttctaagctttattcatggttgcactttttccatatctctggcttttttctttcttttattcctgatatgcatttactatcatgttacaatttacctttccttgtaatgggccttaaatcttttctcggacaagataggaagtaaataatttaaaacaatttatttttttaaagtattaaataattttaccaaccactgcaattcccattttaatcttccttttaaagacactaacatttaatgtcttaccactaaattaggttattttccatatttgcattatttcttaccatttaacttaatcttcctgtgtagaatgtttgtttctgacaggactacattttttatattttaaaaaatgtttctcccaacccctaccacagagaaagtaagtgctccatctgtcttgactgattcattaaaatgtgcaaaacatttgagttatccttttggtcttaatatcataagtaaatacagttagaaataaagccttaattttcatagcataagtccccttttatttttctgtggatgcagaagcatactggaagtggggtggtcaccaagaggaggagcagatgaagtatctcggcctgtcttcccttgacatctagcactcctaccaggggccttgataccaggcccctgctggatatgagaacccagttcctgctgtgtcagtctttggtgtgtcacagctcttttatattcaggacactaacttttcagagggatatttacaaacattggtcttgttcttgagtcaaactcagcctcattcaaagctacatcccagctgggtgtggtggctcatgcctgtaatcccaacacttggggaggctgaggtgagaggatcacttgagcccaggagtttgagactagcctgggcaacatagtgagaccccatctctaaaaaaaattttaaaaattggcctggaatggtggcatgcacctgtagtccctagctactcaggagactgaggcaggaggattgcttgagcccaggagtttgaggccacagtaagctatgattgtgtcactgtgctgcagcctgggtgacagaacaaaaccctgtctctaaaaacaaaaaccctgcatactacattctctgccaagaagagaaaacagagccaatattcagttgacacgaaactgtattgtggctcccaactgtccagtgtttttcagaccagtttcccacagtctgactaggagttaagactcctgaatgtggatggtttcataactgggtttagtttgaagactagtgtcagaaatccgtatccctgaaactttaacaaccaattttagagttgattataacaagaaatctattgattagagatggattattgatgtaattttctcagttcatttctgtaaacatttgttgagtgtctaaatattggagattcacagataatccaatttagtattcttgggcttatggcctacaggggatgacatgtacccaggaaacattgttataatcatgttatgtatgatgatggtagcttatgcataattttaataatatttcagttctttccacttgaaaatgatctcacatttaaatgtaaagggtaatttcatgcacttaaataacataatgggttgtcagtttgtgatttaaataaacttgttcatgctctagttgctttccatgtttgtgacaggactttgaattggtacacagactttttaaactttattttgaaaaaacttagatttataggaaatttgtagaaacaatacaatttttatgtactcttcacccagattccccaaatgttattttacacatttacttcagctctgtctagtgtcttctttctaaactattggagagttgtagacataatgcttcttttcctctgaacacttaagtgtggatttcctaaaaataaggatatcctcttacataatcacaataataattatcataattaggagattactcaaggattttcagttgtcccactgctgtttttaatagaaaaaaaagaaaaaaaaatccaatcctggatccaagatccagctcaggaatacacattgcatatacttgtcttacatatttgctttcgttcatctgaaatagtttcaaaattttaaatatttatgatcttaacatttttgaagaatgcaggctacttatttgttgtaatatacttcaattagatttgtccttttccccaggtttagatttgagttacgcatttttggcagaaaaaccatagaagtgatgggttctcagtgcaacatgtcaagagatattatatctctctttcccattgttggtgatactaactttgattacttagtaaagatagaatctgcctgttttgtcctttgtaaagttacagttttttcttttggaaggaggtgctctgagactgtaaatatctgtttctcatcaaactttctttcactagttttttgttttgttttgttttacttttttttcccccataggttattggggaacaggtggtgtttgattacatgagtaagttctttagtggtgatttgtgagattttggtgtacccatcacctcagcagtatacactgcacacagtttgtatcttttatccctcaccccttcccacccttttccctcaagtccccaaagtccgttgtgtcattcttaagcccttgcatcctcatagcatagctcccgcttatgagtgagaacatttgatgtttggttttccattcctgacttacttcacttagaataatagtctccaatctcatccagatcactgcgaataccattaattcattcctttttatggctgagtagtattccatagtgtgtgtgtgtgtgtgtgtgtgtgtgtgtgtgtgtgtgtgtgtgataccacacacaccagtttatccactcattggtggatgggcatttgaattggttctacatttttgcaattgcaaattgtgctgctataaacatgtgtgtgcaagtatcttttttgtataatgacttcttttcctctgggtagatacccagtagtgggattgctgaatcccactggtagttctacttttagttctttaagaaatctccacactgttttcctagttttaaattccattcatgattcttacctgaaacagttattacagaattgttgccaaatgatttcctaactccatcatttctttctatgtttattacatgctactgtaaggaagaacttttcattcttccttgcttatttagtgattcacttatttacaccagcatggattgaagattcttaagtttgtttaatgggctataatctgtttctatcattatttgtttcaatgttcaaatcattcttgctttggccaggggaaatttcttcataatggttcttgtgtctttatcaatatttgagccatttccttacttctggtacagcaaagtgttctagactgtccagctccatcctggaatcagatatttgctccaagggctctgatttcttttcatggagaatggtatttagaaaccaagatctgcgttctagatgtattcattgttcctggggtgtcattgcttctatgtcctgtgagtgaacaaagctagtaattgtctgtgtatatgttttaaatagtcagctcatttatagttatatattattttgatatttgatatgattaatatgtattatttttatcttttgtttgttatgaagcatcatgagtatttccagaagacaatgagtacttggtaaactgatatcattgtaatgatattcatattttacatgtagttttggatttctaatgtatttagggtcatttttacagtctttggattatagcatttttgttatatatgacaataattcatttttctccttgaaaatattatatcttcttaaatgttattcttactttgcttctagtaccttttcaattatagctaatgggtatattagcactgacactaggagtataatatgcattttaaaattagtattctgatttattgcattcttgataaagatgttttcaaattaattggagcttgatatgacataattaatttgcagttttctttgtaaatgtatttgtaatggcattctggtgatttgaagagctttcttactttccttctcagctctctctggcaattcagcagacgatctggcagccccagaactcacctgagggcaaggctagtcatgatacagaagtcttgagacagagcaattagacctgattgctctaatttccccactatgctagaagataaccccatcaattactgatggatgtatggagcagagcctagtgtgtgcatgaaagacttcattgttctggcccttgaaccattagttatctgtgaaagcctgagcctggccatcctttgtgcatatcctgggcttggctccattataaagctctcttaataagtgtagagaatggggattcaggcttaatgcttagttaaataaaaaataaaataatttttatgtaatatgtgcctatttcagattactcggttttcttttgagcagttcaagaatattttgaatgcactaattgaactttttagaagaaatttttttttcaagtaataaatacatatggttaaaaaaaagctaatagagcttatagtgaaattcactgtccctctccattcactgagacagttttacctctgattttaattcttcagggagttaccactgtatatctaaatagcatgtttgcaataatatatttattcatacactactttagtacctaaggatttagctcatgtacacaatttcctgcagataccacagtatctcatagtaccatagtggtattactgctcttatttctccactggtcacacttgctcttcctggttttgtcacccatgcatcatatcttttgaccccaacccattttgagatgagtaagacatggctgagattgtacctgtcctttcttcagtctttcctctgccgtttctaatacccatctttaatagttttatttttactttttgctttgtgagcgttgattatgtttacattctcatctgcagtctcaattttatctgtaggttgcttctaaaagttgaaaaccgtaactcactacagagacacttagtgggctgtgattacactttcttatctcggcttccaggaccaactcatctaatactcagaggaaaagttttctggtatttgtatgtatgtatacatgtatatgtgtgtgtgtatatatgtatatataaaaatataatttaaaaattgatttgggtgatttattttcccttgaggttcctgtttgttttttcttacattgtgggtccatatcatgtctcatgtctaaagtttttctaagctcttaatcatcctttctcttctgttagaatttcttttcctagtcataattctcaaaatgattgtagtggtaactagtgacaagtgcatgagagataaatatcacaagttcttgcatatttgaaaatgtctttaaattgcactggattgatagtgtggttagttaccatatgtttggtgaagattgttcctcccaagaattttgcttcactgtattctagcatccagtgctactgatgagaagttgaattttcatctgactctttttacttctttatggctgatgttttctttcattatcatctctttgtcctcaatgtttagaatttttttattatgtaccttttttccatttttcttgcttgacatttattaagctccttaatttgaagatttggatcttctatatatttttttggctctgacaaatcttttcatatttatttcttttaagatgaatttcctttttttgtgtgttatattttatctttccagaaattgtaagtcccttattaggcctcttgaatttattttctctgatttccttttgtatttctatatcttaaacctttttgcactattttctatgatattaaattttttgttcataagctaaattagcttcttcaatcttggtaggctaaataatttttaccatgatttataaacagaggaaaaatagaacagattctaaactttatttgatagatttagttataaatttgtgtctcttattatgactttcttacctatattttctaagtctgtgtttatattaataggaactagaaaagaatttttaatttattgaagggaaaatgtgattaaactaggttctttatcactgtgacaattttacatatttagagaataattgcaagagttctaataccatatttacatgtgtaacttctcacttctaaaatacttaaaaactaaagaaatgttagattttagaagacagtgggtttgtaactcttgtcttcctaacagttggtatggccatcagcctcagtaggccttgaacagaataaagaatcagcagatttaagatctctcaaagagctgtagatgtcatttttttctgtttttaagatttatacagtttacattctcttctctattttcattaaaggtttgtgaattttgggttgtggtaactgatagaggaagcattcatgtagacataattttgcaaaaatatgaaaaattgcataattttatataatctgtatggcaaaatatttttaagtggttctttgtatcattataaaatatattttgaaaactagtttttgtacaactttgattaatcacttttgatttattgaattttttagatggagtgaagctagtaaaccctctacaattcttgtcttatttgttaattccttccctatattattataatgaggactctaatttgtgatgttaagcagtttattgcaaatctcttgggtgtttggcgtgttttgtacgtttaagtatgttataacttgcttaaaagatagaatttcttgaagctgtgaatgttaagattgactgtgattttgggtgaatacttcattctatataataaaataaggtaatgtattaaagggcgccagtacctgtaacatataccttggttaataaacaggagccacataaccccattcactttgtattactctctattttacctgattcttctagacctctgcatttaaaataacgacagtgaccaccatgtgctggctgttcattacagtagtcttatttcttatataaattgctctgtttaggacgagtaagctcacagtgttggtagatttattacaacacagcagtaacaacttcatagtcataaaagacattgaatattgaagaggtttaattataatgatgtatataaatgtccttaaaaagaagtgttaatagaaataaccttgttagtgtaatcgtgcctttaacttgtgaattcctttgtcttcctgaagagtaagttaaaatatccatcttcttttggtgatggggagggtgagagaacagacacacatacaaatcttatggttaaaggtcaacttgcaatatgttttgaacgtatctttcctgttggctcttagatttctgtttgctatcttttatttttctctctcttatggcctgttttgaaatcttaactttattatcatttcccagaaaatagaaatatttataaactaatggtaggattatttgcaaacttcaaaccaatcctcattgcttgctttttgctattagatactccaggaaaagtagtaagtcacaatgcaaaaaattgtttgggaaaaatgcaaagagaaaaattgtgtaatagcagattcttttcagcctcctggtggcagttcatgtgtgtgtatgtatacatgtgtgtgttttttttccttgtcaggattaattcagtgggaagtaatgtgacagattttgccatatggatattgatggaccttttcattttacctggcttagtgataggtataaaaaataattctgaacataatatatggaccaccttatttcatatattttaacacctattattttactattatatgtaggttgaaaaatactgcttttattgtgtttttggtgcaagtatatgatttcttggttaaagctgatcattccatagaaacattttaaatgaaatggcccctcaagagaaagatcagctttgtcccttcacgggggtgtttaggcagcaaagacctagagtattatggaataatttgtcctaggtcaggctgctataactgtgtaaggacaaaagcagagtggaaggagatgggagcatctgggacccatttgtttcctcgagaggagacaatggatctttttaaggaaattgttggataaatcagtgtctcctccttctttccctctcttcctacagggtccctgtgttcatgatgaggactctggcctatcgctcattggaaaacctgcccttcaggctcttttatatcactgccatttttatgaacatttgaatcagatggtaaagcattgttacctaggacggtgtatgtttgatttgaatttttctgcttttgatagaaattcagaaagcaatgatttaaatggtaagtacgatatctttgtatttttatttttgtaatatgtaacttgtaaaaactgttaaaaatacatatatttgttttaaaaatttgaaaaatgaaagtatacagggaaaacattcatttccagttctaccacccagagagatgtattttcttcccgtcttctttctctgtatagcctttgtttgttttatgtaattatgttcatatcttgtgtacatttttgtatttccttctttcactaaatattctgcaagcatttttctatgttataaattcttcatggaaattatttttgacatcttattaatactttataagttatgcccatcagtacagttttatagtttctttctctgttaacgtctcaaacttttttggaactttcacttctaggcaatgtacagtttttttatccttcttgtgaatgagactttttcccactatattttctaattcattttgctcatgtatcaaaaagttatttattttagtatgttacttatttgtcacaatattttcctgaaacctttttattccttttgtttgtaggttcttgtagatttgctaagtataagatctgagcacataaaaataattatatcttgtaataaatagtaatttaataatataaatagcttttatttttaaattcatttttataataattttttagaatcttgccatagtttcaaacttacagaaaagcttcaggaatagtacaaaagaattctcaaatgttaacattttacagtatttacatcttgccacatgtgtgtgtatgtgtgtataaataaacggatatgtatgatctatatatactctttttgagccatttaagagtaagttgaagacatgaagttcctttatccccgaattattaagtgtgaatgtgtgattcacttttctgtttacttcttggaagaatcaagaaaatgagatttgatgaagttttgaacattttaaatatccctcttagaaaagtgactcacttaattgtttagatttctctggatcagttacttagagcatggcccttaaactaacagcattggcatcttctgtgaacttgttagaagtgaacactcagggcttccactctgacctggggtattggagcctctggggctggggctgaagcagctgctttagcaagctctcagtgattcttatgcacattaaaaaaaaactctccttagatttttttttttttaaatagtggtctatctcagaagccagatccatataagttttttcctttctttagttttgaattggtttcctgtaatgcgtacccttttaattaattgttacagttcctaggagggtgtccatgttaacaattttctcgttgttgcaggtttagatgactcattcaagttttggagggctccatctaggacaagtcaggatcgagatccaagttctctctccacctcagaaacaacggtacttgcaaagaatgcataagtcctttattttgaatctctgaaaaaatttgagtttgcctagtgggagagttaagaatacaaagtgtaaggttataacagctatgatttattcgaagtgctttctgcagaattttgctaaattattgtattcaagctgcacatcagtcatacattatagatacttatcttgcttttctgtgtgcgcaagccactctgaagtaaagtaactttgtgatcattagtgctataggtagcagaactggagtttgaaccagggtgtgtcttgctacggtatagctacactgaatatccctttagttgagaattttcaacctctctttcctaccttttttgatagtacgaaagtgtgaaaatatgtttttcgttagtattagaagagaacaaatcctacatgttaaaaatggttgattaccctgaaattgtgcttaagggcagggcaatatgaagaacattcaaatgattctagtgtggtgctgacagctttaaacacacttctaaatacttgcatcacatagaagtttatctggaatacctgaaatttatatatgcctgtttgcatgccttctttccttcccctttcattcatgcattagttgctttttttgcagaaaagtttgaaacactgagtatttataaggaatgattgatactaggtttcagttatttacaaacatacagaatcatttattctcaactgggaaatgttacttttaattttaaagtgtttttgaaataattagtgtattatacaacatatcaggaagggaaagatttgatacacctgtttccaggaacaaaaataatatgagaataataattatacagacattataatgtaaagattatgtttaatctatctcctagtttctcaaaagactgatactttttgctacagttttaagtctttttttccctagattcaagagaagtatttgtgtttagtgctacattggacctttgtatggaaaagtaagataattacccgagttccactagatgtcatgctttcctttccaaggtggagatagtgtgtacctttgtctcaacaagagcagtaatatgataaatgccaaactgaattgtcttaattggttatttagttcacagaaggacagcatgaaagtgtgcttaaaagtaaattttgtttgttagcctatttgtcaaaagggctatagactagccttgaaatctttgtacatatttcagtttttttgcttttagtaggtactcagtaaataataattgctctaattaactttgagttatcttagctattttgtggtgagcactgaagtcatatttatcctatacaagaaaacctaaatacaaaaagcaaaagcatatcaaccttttgaatttctctattttgtaataacatttaatcttacaggttagaatactagattttctgagaaaatttggaaatatgttattaattgtagtcattattaaagaaagaagcaccccaattaaagtgaaggtctttaacttgtttgtgtttgaatgtaacacagacttttagaaatatataccaatggaatcttttcagtttttttaaaagaattttgtaatatgtgtaaaatttatttcttattattttctctaaaggctagtgtattctgttagaatttttacagaatttactttttactttctttttcgggaggtttccaaacaacttttagaatgggtgacttttagttacaaaaatagtcttcgtaccctaattctactagttatattttctttaccatacccaagatgatgtgtatctttgtcccaacaggagaaaaatctggagagtgttttcattctgccagtgttactttaaaccaaagctgtcagtacttcgaccaaggcatactttcttatgtataaaaaaatgttgaagttacaaattgaggtataagttgagtggatgtaaatcttattaatcagcttatctgcttatttatatctttgttttgtttatctcagaattgagaaaaaatgcaatcctttattggttagttggctggtttttccattttatctttccaaggaaagcatcatcttttgatttgggtcatgtcatccagcatgctctcctgggttactatccattttgtgctgttaatgccaagttagggactttcatgctgttacctaatgtgtattagttccgttgtttggcaagcttcgtaaggattgttgggtcctgtatgtttgataaactgcagatagagtaagcagagtgtcattgttagctttggggcatcgcccttgtaaatgcttcctcaggagtggcctctatcgaactcaatattctcctcctctggggtaggaggatgcagccattaggtggtgtttttcttctcgaaatcacgtttatatccaagatggatagctgtttgtgcctcttacacacctgtgtgcagcaacagctttatgaccaaaatttggtctcttctgttgttcctgagcagaactatgtctgtatttttttaaatttatcaattgtcaaaataaaatatgtgggaaatataattcctttctttttgagcctttctttgtgaaatatgtgatctttcaaacttttttctggaacacagatttaaagaaaactgattttagtttttctaaacatttaaagagaatttttacacttcatagtcttaaaacaactgaaaagcattgttactattttgcaaaagaggaaattagggcatggagtgaggtcccactccatggagtgcatgcttgttcaagttcctagcatggtaactggtagaccattcttttgagtccagaagtatgtttgcttcctccttcactctaaggccagatgtgattgatcccataaaagatggtgtagtcaagggacagtgaggtttctttagagggaaagatgaaatgaaaagtggttttgtgtaggaagtggccactgaaatgggctttacaatattatccccttctcttttatatgcatacaaacatttgcaagggactgaaaagattcaaatattccttaggattcagtgaccacttaacaaatgacaaaagtctacttgagaacataaagcatacttagactttctaactaaatatgaagttgtgttgtactgaaggcattaacattcagaaaatgcaagaggttgtttggagtagaatgtgggacggaaagctaaagtttgatgacctgactaatcagataggagttagttaagaaagctgaatcagcttttggatttgaagaggtaagatataagagctataaagataaagatgtaaggatatttcagcagcatggaatggcatgaaacattacaactgatatgagagaaataacgtattgacactcatttgatggtagttaaaattgttttatagaaggaagagtagacagaggatagtttaagcagggatggatccaagaggctttctaaaagaaaaatagttttgacataggcatcactgataggacatacaaatacctccagcatggtgaccccaggaaaacttgaggaggtggtagtttgtgtgatgatggagagagaaagaaaatgttatactctgtttaaataaatttcagctacctgtggattatccagagtctaacaacctcttatatttagttaggaggaaaatacaagtgagacaagctcttggaaatttgtgctcttagattacacacaggatggcacaggaactgtgactgtgttgtggtgatgatctgtctctttaagtggtcctttggttagacatgcaagaatcgtctatcatcttctgctcattccttcagaggacttttctgagctttcttttttttacatatattgtacataatccatttgaattatgaatctattagttgaaataatttaaacttcttgttataatttggttagaattaatgattacaaattgagaagcatgccaaagctttcctgctcctgggcatatagagaaaggtattatttattaaaatgaacacatgaagcttagaatctcttagaaacccttcatatcttatatttttccatgttttcaaaatgtggctagacttgtactttatttttttcacactacaatccttattttctccctttgtacctttttaaaaacaattaaataaacttttttggcaccagtactgcttttgagggaagttgatggaactattacaagatcattttggcaaatacaatattcaagttctgaattaactttcaaaaaaagttaaagtgtctagtgaaatcacttgcttctgtaaggcagatacaaagaaaatcatttttgtacattgatgcatttttgcttatatgacagaaattgttttttacattccagttctacttggatatggcaaatgactctgctattttcagtgatttcaaagggactttcttaattttagctgcttattttacactgaagcataatttagaaaccttctttagttaccaaatctgcttacaaacacactgaagaacaatttttttcagtttttataagcaagatttgagtccattttatttttttattttcccctagttttgagctaaaatgacaaataaaattgtatatatttgagatatacagtgagattacttgacatatgtatatgtgatgaaatgattaccacagtcaaattagttaacacatctgtcacctaagagtcaaccttttttttttgtggtgagaacacttaagaactactctctttcaagtagactgtgcagtgttattaaccatattaaccatattcaccatgctacacattagaccatattaaccatattcaccatgctacacattagatccccagaacatactcatcttatctgaaagtttgcactctttgaccaaacatctccccttttccccagctcctatcccctagcaacatccattacactaatctgagtctgttttaggacagtacctttaagtagcatcagcctgctctaaaaagcttgtattgtcttttgtaatatctgtaaagtaataaggctagaaatatattcaaattcagatttttttgtcttaccgagggattataaattgaagatctcaggatatgtcatgtggcagatgtgaaagcgagggaaaagtctagattgtgattttgcacttagaccattctaatgaattgagcaagtgatagatacaagaattagactctcgctgttgtaagaggacaaccctagttatcctacttactgtgaggtacagagcagagcagcgagaagcttgacaggaacggatgacttcagcagactaagtttgctcttaaactaagccaattcctcctccttcacctgggatggggcagctgaagttagtctagctgaagttccgcggggacacagggggatcagggagaaagaagcaagcctctcctcgcaaacaaggccagccagctttctcaagaggtacgtctgaggacttcctctgattctaacgaatttatgctgtcatgaatgcagttctggactgagaatcctagtctcaactcagacaaatcccttaacttgtggtccttttctctaaatgaggacgtggactaggtcaggctttttgtacctatagcttcgtaggctcatactgcaccttccagtagctaatacttaatgccaaaattgtctagttattacttggattttaaggtgaaaagtaacatgtttacatatcgatgtactttatcaaatgtaaccaaatactatcgattggagattatatctaaacaagcaaagatttgagcatagaactgggacaatttgctttaatacttttttgcttttagttattaaaatagcaatatattagtttagcacacttaaaaaatagaggctagtagaaatataaatcatccataatcaattttaaagcaccatataaagcaatcattgtgtttccccaaccacatggggtaagttataatacaataaggtactttctaaaagcatcttttctaaacttgtgtatcccttctgtggactatactaaggaaaatcacatctttattaatgcctgacctttgtcatgaatcacaactttgctttcttctaatgagccaggtatttagtgggcccttataagctttcttttcccacaccgatcgttgaaaccgcaaaccaggtacctattctatttatatcagtaataaggccttcttgagtctttatcagttgaaagaatgttcagtgaaatgataaaggatttcagcatcattatccccttaacttttcttatacaaccaaaagagttgtggcaggagccagatatattagcttgtgcatagtttgtgatatcagtcttggcataggattattttcttcacagaactataaatgttgtcttgatatctgttgacaggaacattttttcacatatctctcattgccaaattgtaggcaaatatatttttaaaaataaacaagcttgctgggcgcggtggctcacgcctgtaatcccagcactttgggaggcagaggcgggcggatcacgaggtcaggagatcgagaccatcctggctaacacagtgaaaccctgcctctactaaaaatacaaaaaattagccgggcgtggtggcgggcgcctgtagtcccagctactcgggaggctgaggcaggagaatggcgtgaacccgggaggcggagcttgcagtgagccgagatcgtgccactgcactccagcctgggcaacagagtgagactccgtctcaaaaaaaaaaaaaataaacaagctttaggttatttttacttagtatctggatctaatactatataaaataaggcatttgatgtttgtttatgattgacttatttagactgaacttttttccagatttactttttagattatgtgcttagcctacattttttagctgcagctttctcacttatttcttggcatcatgactgttatacttacttaatgtggtgaaagatggttaagggctcaagttaaaagggggatttaaaaaactgtatattccatttttagtaatttcttcaaatttatattctctttactattagaaactgcaaatgaaaataaccttagtttttgctttcatttcatcatggtaattctaaggtactctaagtgttaagatatatacacaatcaatgtacaaatactgtgagctatataggatctgagtctggaatgatggtttataacttctatggatagctaatgttgtgttgcatgtactgatatggaggctacccaggtatgggcacttcatgttacttcacagaagagaaattgatggtaaggaaaagagttatctgacctcaccacataagtgtttttcaactaagaggtgcttagttgaacacctcttagcgcaaacacatcactttgcgctttttcagtcttagaaggtcggtctgctcattataaacctgtaggtgaaattgtacttgctttccacggattttgttatatttaatgttgtattctgaagcaatctcagcaaactggcacaattttttagtgttcttccttgataggaggtgaggtagagaaaaatcttttaatacttctaattttttaggcactattaaaatttatatgtgccatttggaacattaaaaatatctttattgtcaatcaagaaatgcaaaatatcacaataaattatagttaaggtggtatattttagcctttctaacatttgggcaatgagggaattggccttatgggaaccttaaactcctaaatgggcctgaagtcaatactgctcctttgagttactgatttatgtaaatgataacaattcctttaagaagtggaaatgccatttaaaaaaactgctgtaactcccaagatatggaatcttttctagttatcctaactagtataattttgtcttaaacctccttgtttaaggatatcttgtgtgtatgttgcctgtgtttcattttccgtactgtaacattaataagtaaaataatttactgattcataggtggcaccttcattggggagtactgaatttcagccacttgtgcagtcaacaacacttctacctgaagcctcccatgaccagtttgtggctcaaggtatccttttagtgaagacattctaccttcaaaaagaaaaatgacaagttggtccagacagatattttgaaagtaaatgtctaaagaacaaaattttaatgaaataagttgtagaccattatgaaatacatttagaaccaatatatcagaaattaataaaataaatgctcttaactaataaatggaatttggctcttaaataaatagtccaattcctgtgtggctccttattaggcgctcgtaggtatttgacatttgaatttgggaactgatgggtataacttaactttattttttcccttcttttgagaaaacactttgctacaagtaatccacttgaaagtaaagcgattctggttttaagtattttctaaggctatgcttccatttaaaggcacataaaatgtattgagtctttattttattagaaatgcacaatatacaacttgggacttatttttattaatggcaatatataaattttgctccttgtgctgggaactgcttccaaccctgctgtgcttcaaatttgcaactttgctttttttttttttttttaaattctagagagtatataagccttattcagtagcattaaatttttgacttgaaaggactatactatctaaaaagaaagtaattttaaacactggcatacatataagtatatgcagaaaaaatactttctgaaacatttagaaaaacttgctgaattaaaactttgaactttcattacaatatttgttccaataatttcctaaacagtgttccatattggtttttagtaattcatgttcactatatataaaattatttaactgtagaaaatactcatttgatcttcttaagaacaaaaggagcaaactcagattatttaaatggctcaggacatagggcatgaaatgaaattcgatcatgaatttcatgaacatttatctctaaaagcatgttgccttactctgatttttaacatctttattgagatataattcacataccatataattcacttgtttaaagtgtatactttattggttttaagtatattcagagttgtgcaaccgtcaccacgatcaattttaggatatttccatcatcttgcaaaaaaaccctatacccattagcagtcactccctgtctcccccattcttggcactctacggaatcactaatctactttccttctttatagatttgcccgttttggacattttgtatgaatggaatcatataacatggtcttgtgtgactggcttctttcacttagtgtgctgttttcaaggttcatccatgttctagcatgtatcagaacttcatttatttattgacaaataatattccactgtatgaatatattacagttacccattcatcacgtgatataggcatttgtgtggatatacaggctttctgttttttgtttggattacctttgattttaaatttattttattttcaagtattaacgctttttttttttttttttttttttggaggcagtctcactctgttgcccaggctggagtgcagtggcgcaatcttggctcagtgcagcctctgcctcctgggttcaggagattcttctgcctcagcctcctgagtagctgggattacagaggtgtgccggtacacctgcctaatttttgtatttttagtagagcttgggtttcatcatgttgcccaggctggtctctaacccctgacctcagatgatccacctgccttggcctcccaaagtgctgggattacagacatgagccaccatgcccgtccacaaatagtatgctttcaatgtatatttatgcaattttactctttgccaatcatttcagcacatatatatgaccaaaaaaaaaaaaaaaagcatataaaagaaagaatacccacagaaaggggaggcatgaacagaggatgaatcctcacaattttttggtgatatatgacactatcaggtatattccttttttttcaaaacttggaaataagagatcagggtgtcaaatgtcctccttagttttacaaaataaattagcaagaaaattgaaaaaatatgtatcaatttatattctgaactagctctctttacagaaaaattcaaaaaaggtttctatatatgcttgctctagaagtgctgaagatatgtaatacatattttatgaatactgaaagatttcccttgaaattgtttggacaattttcattagaattatctcaatttaattttttccatttttatttccaaagatttatcattattttttaagagacagggtctagctctgtcacccaggctggagtgcagtggcatggtcatagctcattgtagtctcgaacacctggactcaagtaatcctcctgtctcagtttcccaagtggctgggattacaggcgtaatatttgaggggaaaagaacacaaactctcatgtaaaaatgagcagaaaacatgaaaagataattcacaaaggacctaaaagtagcctttatctttggaaaaatattatacaaattaatactacccgaagatacttttttatttattaaattgccaacaattaagtattggcagtacattcttttggcgaggctgtggaaaataagcactttcatacattgttagagaaaatgcaaattagtataattttggaagggaatttggcaatagataacaaaactatgtatttacctttgattaaacaattccacttctaggaattctcttttatttatctccagcaatataaaaatacatatgtacttgataatttagcaagcattgtttgtaattataaaacatggaaacaacacaaatgcctgtaagtagaaggatagtttttgatagatatataacaatatatagataatgataaacatataacaaaattacttataaataaaatttatttttaaaataacaatggagaactacagctattagaaagagggggctgggcacagcagctcacaccaataatcctagaacttttggaggctgaggtgggagatacttttcacgatagtgagactgtatctctacaaaatataaaataaattagccaggcatggtggcacacacctgtggtctcagctactcaggaggctgaggtgggaggagcacttgagcccaggctttgaggcttcagtgagccatgattgcaccagactccagcctgggcaacagtgagaccatttctccaaaaacgaaaaaaaaaaaaaaaaaaagaggggaggatatcttcaaacagatatggaccaaattttaggaaatattgtcaagtgaagaaagaagcacaatgataaagagtatttatagtttatgatatttacagttttctacttttgcatatgaaagaaggggaaatttaaaatacgtgtatctatttgtgtagaaagaaaacaggaaggaacagctggaaatgaatgagattaattatgagaatgggtgggagttagttaggaaataagagaggatgggaacagtgtagaagagattgaggggtgggatagtgacccttctctgcatgtatcttcttgtataggttgacttttataaccatgtatgttttacttgctgaaaaaaataaaatcaacaaaaatgggaaacaataacatggaatacaaaccaattaatccagctacatttcacatgaatagcattgaagtgagagaggaagtaaccccagtaactctcagacatatttttaggactttagtcctcagactattggcaaaatgaactgtaaccaagcattgaactctagttactagttttattttttgcagtattattagttagaaattctgaaactacttattgtgttcataaggcaaggcaaataagtaaatatattgtagacaatgaaagccagaatttttactttcacataacggaaattacaaatatggaagggaaggaagatgtttaatgttggattatatttggagtgttggattatatttggagctttcagtatgaatcaattattttgttttttaagagatgaggtctcattctgtcatccaggctggaggacagtgctgtgatcatagttcactgcagttgccacctcctgggctcaagcgatcctcccacctcatcccgagtagccaggattaaaggaatgtgccgccatgcctggttcatttttaaatctttttgtagagataggtttctgtatgttgctcaggctgatcttgaactccttgcctaaagtgatcctcctaccccagcctcacaaaattctggaattacaggcaaattaatgatttttaattcgtagataaaatatgtttatgtgcccaggggtatgtatgtgcatgcatacgtatatacacacacgttttctagcttagaaacaatgacactctaaatagcaatgtatacatttagtgcccaaatcttgctttccaaactccattctccactttagggaatcgacactttggaacaaatatccaattttagagcttggacgaggaaagaacaagatgaacctggaacatcttgctgtgccagaaagtaagggaatgctcaaaggttaatggaggtgttcactaatgtagggtgcaggtaccttattactgttctaaagtctaaaagtattttggagaaaagggagctctcatacagtgttgttgggaaccactgtggagaacagtatgcaggttcctcaaaaactaaaaatagaacctaccctctgatccagcaatccagctgctgagtatatatctaaaagaaaaaaaaagtatatcgacgagatagctgcactcccatgttgattgcaacgccattcgtgatagccaagatagggaatcagtctaagttccgtcagcaaatgaatggataaagaaaatgaaccatatatgtacacaatgaaatattactcagagaaaagaatgaagtcctgtcatttgcagcaacatggatggaactggaggccattgtgttaaatgaaataagccaggcacagaaagacaaatattgcaactcatatttgggaactaaaaaaaaaaaaagttgaactcatgaaaatagagagtagaatgagggttaccagaggctaaagagtggagagccagagataaagaagggatggttagtgggtacaaaatacagttaggaggaataagatctagtgttcagtagcacaacagggtaactatagttaacaataatttattgtatagttcaaaataactaaaagaatggagttggaatgttcccaacacaaagaaatggtaaatgtttgaggtgatggatgtcccagttaccttgatttgagcattgcacatagtatgcctgtatcaaaatatcatgtgtaccccataaatatgtacaatgattatatatccataattaaaaatttaaaaataataaaaatagtaagattttactctgaagaaaacctaaagattatttgaatttggacacacctttggcccctcgagtttcagaaaaaggattgtaaatcatctttttgttctcagtgtctgaatacgtggggcatgaagtcatgttctgccctttctgacctgtctcttctgcatacgacaatgtccgtgtgtacacatctacacatctacatccacacatggtggaaggtggaggtcaggagtagtaggggtagcctgacccctaacctcaaggttaagatgagccaagaagctaaggcaattccccaactatacattatcattttcaggaactttcctatgattataagaacttttgagtattgtacatagctgtaaggtaaataataattcttatgtttattttcaataataggtcaccaggaaagtacatcaccacggccacctcatgattcatctctttctgctcccctgcccaaactgtgtgtttttgttactccatctcttctttcagcaatgtgcagcctcttggacaacctcttgacgattgctcccagagacactgcaaaggcttttcgacaagctcatctcatagaacttctctgtaggtaagagataaatactcctagagaggcatgttagttgagataaatttacacaaactgtattcatgacttgatacaagatttcttgtgacctggaaatacagctttattcttttttaggctcattgaactctaggattttgcttttgccagaattgtcttggtggtttttattttacatctattaaagcacttgtattagtttgttatcttgactattaaggccaaagaaaaactcctgctttctaaaattcatggattctaaaccttatttatcctccagcacacttaaggaatatggtgctatcccctgttcttaatggatgtgagggactttgggaattcatctttttagtggtcatatcagaataatgtccctgggttgaaaaattattggttaaattcatttggagttattttgttaagggaaattaaacttttcatcaaaaagtattctgataaaatttagggaaattaaattcaaagaaaaattatttgaatttttattacttatttgatattaatcagtctgtaacataatttttctgaatttctaggaaggtatagtagaaaaggactagatattgaattcaggttgacctaaggtctaattatagttcattcactcagtagcttgcagccttgggaaattactccctactgtgtcattaacacctatttaatggggttagtgtgagaattaaaagtgatggtatctaggatacccccttaagtattacttctcttttcttctggtgttcagtttattctagccaaccatacccacctccttttgaccacatgtttatttgcatttctctgtctctctgtccctttacctttgaacatacaccatctgaaatgtcttgcatcttcttgccaaatcatagtgtcttctctttctttctgggatattaagaaaactctagaaaatataaactctaaaagaagtattccttgtttcacctcattcaattgtaattattcctttaacatgtatgatacgcaatggagtatgagtttgttctggctttaatatttattgatcatttttttactgtacctactcggattggaaaagtaactgctagtcagttggctttccttcctggatgctcctgcctgaagatgaccaaaatagagctctagggataggatcttctttgcttcttacgagtcagctaagagtctgatgtggcattgaggccacaggggcattaaaagaccttttatggcaaaggcttatcatatttccgtacctgtttttcatttttgactttaaaaaaatcctacttgttttactttatttttatttttttatttttatttattttgagacggagtttcactcttattgcccaggctggaatgcagtggcgcgatctcggctcactgcaacctccgcctcctgggttcaagcgattctcctgtctcaacctcctgagtagctgggattacaggcatctgccactacacccagctaatttttggtacctttagtagagacggggtttcaccatgttcaccaggctggtcttgaactcctgaccccaggtgatccacccaccttggcctcccaaagtgctgggattacaggcgtgagccaccgcacccggcctgttttactttattttgttttttactttctaaatatgaacagtgttcttgctattttagccagtatttttgctattttattaggaaaataaccaccaagtttcctgttactcatgggctgtattatattttattctgcttttaattaggtttccttagatattttcttcacagctctttgcttctcacttttctctgacaagatattttcctgtttgaaggtaacccaggatacaatttgaaattctttgagatatctttttataaacattttctttgcttataaagatcctttctcttgaattgtattcgagttacctttaaacttcaaattctgatttcttaatctttaataaaaagtatactaatcttctgaaggattttctttttctgatcgtcacagcattgcagatgctaccctcatacagacatgtgtccaggaactcagagccctgctgccttcatcacctccagctgaacacactcaggctcaggtaagcatctcaagtctgtttgtgggtttgtttacgttaggtgtcaaaaataaaaatcttgctgaggagatactagtcataggaaaaggatgaaaacctctcaaaatatacatggtatgatgagattattcgaaatacgttacttgaaattttaatatgggacatgtctggatgttagaaaagagaggtggggtttgaagacctagattctattcttgactccatcattaaccagctttaaatgtatgatcaagtgtctggatatcttggagcaccactttaataataaagagggacattggtatagttcacttcctgcttctgtgattttaggctatctctgttatttacaccaaagttaaagttgttaaaatatttggtggctaagttatgtgtattttcaaaacccaatttgataaaaatgatttattcttgttccttcacagatatttagttttaaattcttgcctatagctagaatctatttataaaacatgcttaacaattattcatgtagctgttgctaacagaaattttatttcaaaatcaaattttaagaagggctacaagatttatttaggaggtgatgaattaaaggtgaagtagaccaatatctcttgctttgagatgtgttctttgagctgaataagacagaccccattacaaagtttgggaatgctacacgcatggtctttgaagctgttgtcctggtgcagtgttttcacctgagcatgcctattgcataatgactgtctcctccatttttctgctctccatccagcaaatctttgttgagtacttgctgtgtgcctgaatcttctccaagtgaataaaacaaagacccttccctcaagttgggagaatagataattagaaaatccatatatgcctgaagatgatagacatctcagaagaaaaactaaagcaggggacaggaagtgatgtcagagttggaagggtagggctattccacttaggatgattaggcagtgtcgtgggacccaaagttagtgaagaagctagtcctatggtcattgcaagacccctgaggttggggtatgcttggcctatccaagaaacagcaaggagggtggagtcgctggagcagaatctatgagggcaagatgaggccagaggggcacagtcagctccatgaagtcaggaccttgctggctgttatgttccattgtgttctgagtgtctggcatagggcttgtctcatgacaggtgctcacttgatacttgtgggatgaatgaataatagcagtagcaaacatttatgggcatttgtttttgttaattcatgtaatcttcacaagaatcatgaagttatcattaatgtcattttataaaggaaatgcctgaggcccagagagatgagtgacttgtccaaggtctctgacatagattccaacctatgcaggtcagttccagggcccacattcttaaccactgcaccagctggccttatgtagattaaatgcttctgggctcttggtatttatataagatcattcactcatttcagaaaattcttgagcctctgctttaccagattctgttctaggtgctagtgatatatccttgaacaaagcagatgagcatctctcctcacgtagagtctgtgccataaatgcaggagacagacagtgaacaagtaaataaaatgcattgtatcagatagtcacaaatggtatggaaaaaagcaattgaggatgggtaaaagggtgtgtcagaaaggggaggggcctcctgaaggtgacacttaagcagaaagctggggaggtgagggagcaggctgcgagtgcctgcggcagatggggtggccagagccctgctggtggggtgatactctgctaaaggtatgatggattaaagtctgtggtcagttggttggtatttttttttaagagggccatacatagaaaaagagttactttatcaactactcttaagatatgaatattttatttaatcttgaatgtgatcatatacaaaagaatctttagcaattcagcgttttctctataacacttcttcttgcctcacctggcatggtttatctatttatggtaatatttcatacatccagaggtcagacttgctataatttcagtagtgtagagtatgaatgtaatatgaagtctcaagacttcacggcagtaaacaaattaaatttcacaaactgaagagtttgtgaagcctggagccacctacacttttatataaagtaagttggcagattagataaagggaggacgtattcatcaggagaagtagggcagaactatttgtaaatagtctgagaccattgacctcagagacacatactccacaaatttacaacaggctctcgactcttcattacactcttacaaccccagaataaggtgagaggaaaaaaagtgtgtgtgtgtgtgtgtatgtgtgtgtgtgtacagagagagagaatgactgatttcagaatatctttataaaattcacttatatgtaactggctcattgcttgagggtagtggacaaatgagacatcacagctcattctttaattgttacatattcagaggattatttttctgaaaagtacttttgccagttaatacttaacaatattagcatcaggcaaattccagagatggttttgttggtaatattgaagatgatttaattttttcttttataattaataatagtaattttatgctgagggcaaaaatagaacatatttgcattttatttgtagcaataactaggctagcttccccccacccctgcttatgcactttgaagggtgtttttgtaatctttctttctttacaaaattatagactttatggctttgttatacacttttccacttcttccataatattgatttcataatttgactacttgaaaaatatgggacttttttttttcttttgaaacagggttttactctgtcacccaggctggagttcagtggtgtgatcacagctcactatagcctctaccttctgggcttaagtggtcctcccatctcagcctcccaagtagctgggactgcaggcccggctaatttttatattttttgtggaaacaggatctcaccgtattgcccaggctggtctcaaactcctgggctcaagccatctgcccaccttggcctctcaaaggactggcattacaggtgtgttagctaccacacctggccaagactttacttctttaaatggaattcaaaacttgactttgaaaacattgctttgtttggtgtatagttgacagtattaatatggctgttaatgacatgcttatgagaaaaataatgctttgtctgctatgtgttaatttcagatcttgaaaaattatggttaatattttattttttattgtgttacaaaagtaaaatgctgtatcactgagatgggctttttatatggcatgtttgatttgaccctgtctccttttcaaacaggtttcctttctcctggaatacctatcctctttgtccaggcttctgcagtcatgtttattggtggagcctgaccttgtgattcaggatgagcttgtgaaacctcttatcaccaatatcattggaattctcaccatatgtaccaaagatgtattaggtaagcttaattgttttagtttagaatgtaagtgaataatactgaggaaaaaaaacttactctgtttcagatattcacttgaaggttactttttgagtttctttttgctagtattttggaaggctttgataatgtgttttatagtttggatgccttttaatggtaccaattaagacaagtgtgtagtataataaaggactacccttgagttttcagtttaaatgagggcaaagctctctgtgtgatgttagaaagtacagtgagttctgggtattaactattcttataaactatggctaaggccaaaagcttaataaaacattcccaataacaagtataagccaatctagaatatatcacaaatttcctaaggtcctaaattattgaaatgtatatatattttgtgatctaatgttatctccaggggaaaatattctatgatgaaaagttgaatgtaatgcttagtggagaaaattaaagcaaagtaggatctttgtcaaaatctaatataattgttttgaaaatgaaaacaatcatttataatgaagtaattgaccatttggtaattctctttgcctttcagttttatttgaactatggatttacttggttttaggtctggaaaatgaagtgtgttatgatacccagcaaagccagttctcagcatctcatcagtgttaaaatgatctcgatgttaaaggaatagtaattccttagaaattcaacaagtggcagtgataccctaactaagcttattaggttagactggacaagctcaacaaggtgatatcacccccagtctctaaggagtgaacattgattctggggagaagagggtgaggcaaaaacatcttagaaattaaaatagtttgtaggcttccaaagctcaactctacctgagacaatcttattactatttctcttcctggtttttcttgagaattccttgagaagcattgacgttgagttcatggaagatacacaagatgtatgcaagactagtgccacaaaactgtggtgaatagatgacagcagctggaggacctttggttgattgtttgatcccaaggtcatatagcaaaaggtggtctgtgtatcttggctgctattggctgccttgtgaatgctttttattgatcctcttgcttttctgtatgatttgagctttgaaaattaattgaaagtagtatatatttaattacataaaagttgtttaacccatcattaattatatcaagcgctgaaaggaaaaaatgtcaatatctgaatgtatatctattagctggttaaattaaaaattgttttctcatatctagcaaaaagttttaaaagttcactaagaatatttttaaagaagtttttaaaatttttttctgaaaaaaataagttttaaatgattttataagaatttattatattgctgttgtttttatatgaattgctaatttatgtatgtaaattgacacattgtgatgatatatatatataagtaaataaattacatgaaaagttattcagcaagtataggtgcaaagctaaatttggtattaataggtctttaatttttaatttaattttcagcttaaatgttttattcggctcttcttaagcctgtattgaataaaaacagtaagctctatacttagcctttttatgtacaaagtacagatatacatatagtacataaagagatatacagtatatgtgtggaattaaaatcttgtggggatggcaatgaggaaacattttctgaaataaactctttagagagccactaatgacaaaagggttgagaaacaccaaggattgccctggggaaggtgcagttttcaagtatctcataggtgctgaagtacacctagatggatctcctcggggttaacgtcctataaagtttacattatagtggaattagataaaagatgacagatccccctgaaggcatggtcagagagagtcctcagcgactgctctccagcttccatttacctgagtggagagaagggaaaatgggtcctcatcctagaattgctacatccttagccataggaaaagctgcagaatcttcttttgcgtcatacttttctttgtgggatgatacttttcttggttcttcaaagaaattctttcttttctaccttgaccttggcacactgtgctttcctttcacccctgcccaaagctgctggaggggataaaggaaataggggaaaacttactctgacaaaagtagcacaaacaatgacatatttttataatgtgccaatatgtagttctgcagtcatggcttaatatttagtttgtcacaccttctgattgttcttgagtatgctttaataagaggagagtttgtgagtgtggctttatatgcaggagggtggaggggagatatcttaagaagcaatggaaaagaagttaattgaaataaattttggataatgctgaattagatttgtcttcatttgataagtgcacacccctcattttaagtgtaatgaagcgtctgtggtaagttttatatcttgaaaggttcttttccttctttgtgttaataacttgaagtgttttgattaattttatagataaagagttaatatcagctttttatcacacatggacacatttatttaatcttctggccatgctcctgaggaaagctggtgccatcacactcccgtttgttaccgtggccctggccaagcactggacagcggcgattggtaagaagatacttgcataatcttgggggctttctgctaataaaacgagataatgattctgcctgtttaggtatgtaaattcactaaagttaagtaattatagcatggcatataaaagaggtatcagggtgcttgctttgaaaaatttgcagtgttcttgagccccccaaaaatgcatttttgaaaaattgaaacacattttgagataacataaaagcgagttaggaaagcctgtggttttattattttttaagctttttaaagatgtcatccctgaagctctgttttattgagaacattatattggccactgttggtttttttaaattttactttaagttctgggatacatgtgcagaacgtgcaggttttttacataggaatacatgtgccatggtggtttgctgcacctatcaaccgatcatctaggttttaagccccacatgcattaggtatttgtcctaatgctctccctccccttgcttctcatcccccgacacggtgtgtgatgttccctaccctgtgtccatgtgttctcattgttcatctctcacttgtgaatgagaacacacagtgtttggttttctgttcctgtgttagtttgctgagaatgatggcttccagcttcatccgtgtacctgaaaggacatgaactcattctttttttatggctgcataatgttccatggtgtatatgtgctgcattttctttatccactgtgtcattgatgggcattgggttggttccaagtctttgctattgtgaacagtgccacagtaaacatatgtgtgcatttgtctttacagtaggatgatttataaaactttaggtatatacccagtaatgggattgttgggtcaaatggtatttctggttctagatgcttgaggaattgccacactgtcttccacaatggttaaactaacttatactcccaccagcagtgtaaaagtgttcccattttctccacatcctcgccagcatctgttgtttcctgacttttgaataatcaccattctaactggcctgagatggtatctcattgtggttttgatttgcatttctctaatgaccagtgatgatgggttttttttcatgtttgtcggccgcataaatgtcatcttttgagaagtgtctgttcgtatccttcgcccactttttgatgcggttgtttgtttttttcttgtaaatttgtttaagttccttgtagattctggatgttagacctttgtcagatggatagattacaaaaattttctcccattgtgtaggttgcctgttcactctgatgatagtttgttttgctatgcagacgctctttagtttagatcccatttgtcagttgtaagcctgtggttttataaaggtacatatgatatgattataaaacaatgagataaattttactgtgttggtatagaaaccagtatcctttctgacatatgtacattgtatgtggatacatcttcatatataaaatctggtatacatgataacatggaaagttaggatacaaataactttctcatcacatcagaattttcttatagtacagaaatgccaagagtatagtataattatttttatgtttttcatgatagttgcccactaaaataaacatgattattttaaaataactaatctttaatttttcatgaagcctcctaaattttagcatagaaaaaagctgttttttaacataaatattcataactgacatttatgtaacctttttaaacaacctacttaaatgtactcaaaattgagttattttaagcttccaaagtacctgctaattcaactgaccgattttttttaacatttattttatcatttgatcattcagtaaacttaaatgcatgatacaatttttaaccaaagcgatagtaagaattatggcaaatgcatgtttaacaaggaacagaattgttaattttctggatgtaggagttctgagtctaccatggagtacagtgtccacgtaggatatcattattttgtttaaaatataataattgaaagagattgactgattaagacattgggattttcttcttgtatttattgggggaaaattagtttatcacctgaatcaccaataatatcaatagaaagcatgatgctacccacattagataaatctggcctgcagcttgttttggtaaataaagttttattggaacatagccacactcacttacatattgcatatggctgctttcatgctacaaaagttgaggtgaatagttgtgaaaaagccagttacctgcagagtataaaatacttactacttggacctttacagaaaaagtttgctgacctctgacttaaacttatttatctaacactatttctttagtgataaaataaatacatattaaattcaaaaccttccttcaaaatatgtgtacagttttatgtaataatagtactaatcaaaagtaacttactgcataaatggttttcataatagtaatgttaatgaaaacattaataacaattatcattttttttgccatggttttatttttgtttatttttatttttttaaatcaattgccatctcatatgcccatatacatttaaaacatgtcgtggtcactccgtaacttgtgttatctataagagtcttttctcgaacttgactaatatttggacatcatttaaatgaacataattctcatgaaaccctactgctgactactttatttttcttatgtaactttaatttgtacaagccaaaatctaagtaaaaatttttatggttataattatcacacaagcataaatctaaaatataaaatcaaacaaaattataaatccaatttttcaagtttataaaatgtaaaacaacacatgtaattttgattaaacaaaatcagttctcacaacaggaaattaataatgactgtttcagtgtaaattcctttcagtttggtctgttctttccactctgtattaagtttgtgaatcagttcatgaccactcatgtgctgtctgaactgctatgaaatatttgtttgtacattgtgccaacactgcatactaagtcttgcttttaagttctggttggcaccagctcctttaacagttgcaacacaatcacacaagttggtaatctagatgatccagagtatagttactttaaaatcaacttgatttcctttttgttgaattttgaagaaattttcaaacattcacatctgaaattattcctttagatatgttctgcacatgtgcaggcttgtctgccacgtgtcctgccctgtatactgccagcttgcaattcctttctgttctcttgaccgaagaagcaaaagggcatctccaggctaagagcaaaacacatttatgctgtagtccaacagtggcttcacttcttgatgactctcaggaaaatcagaaatctctagaacaacttagtgatgtaatccttcaggtacgtcatttcttggtttttcaaaaactttatttagcgtttaaataaattgactttcagtcatggtcttgttaaaaactgtctcagtcatttaaattaagaaatagtaatgcttattatgactgtttaaatgatacaaaagtttataaagttaaattaactatctcctccttagccccacccgcttatgttgaccagtttcttcagtgaatatgatgtaaagatttgaagtgaaatattactaatctaaatctaacagttgatcaaaacagtgtttcatatcatgaccaaaatggatatatttcagaaatgcagttatggttcaaaatttattgtaattttaaagatatatctacgtctctgaaaatatattctaagtgacatttgatttctagaaatggaccacagatttttggggttggttacatgtataggtaagtggacttgtctggcacatttggaagaaaatgccccctttccaagccctgttgcctgttttatcttataaaattatgtttacagtctaaaatgtgaatcaagaattttgttaatcagaaaacattctaaaatcactaaagtattattttataagtagatgagtaattttttaaaaactgtgtgtttactaagttaaagttgtacattgttttttacaaataggaatatttttagatttttcagtatttagaattattctttttaatcatgtggttttatgatttttgtcttctcactgaaaggcagaaaagtagtagaattgttgattgaagaatttgcttcagcttcccaatcagccagccacgtttggcaaagatagaagattgtctgtgtgctggtttgttataattcctttgttgcttagaagattgttcctgtgctgatttgttatagtccctttgttgcttagaatttggagatttttacccacttctttgcctgtgagagtcatgatcatgcagatatttctggtatgactgcttgtgcattttgggcacaaggcttgatgatgttgagatgcagaaaggattgccagtaagaagaaaatgcttcctggttcacccaggagctgtcctgtggagagtgtcacagggtcctcaggggactttgtctcccttgtgctacaaaatctggttacctttccagcatagataagaagcctgttaaggcatcccccattttctcatccatctccagcagcgccttcagaagcctggatagagctctaggggagaagcgttcctcaaagcatttctctaaaagcctcttattcttgggaggccatagctttcctgtacctactacctcactgtcagttcactcaaattttcttagttgaaaacaaaaactggacgttgtcccagttttctcattccccatcagaacaacagactttatttcccaatgattaactgagtctccagttttgcactttaaagaatgttgtaaggaggaaaattcaaaccttttcaaaagtctcccaaccacaacccctatgtaatttaattataaatttcccaactttggctttggttggagcacggtactgcttggggaaaggcttttgctcttgctgacacacttggctcgtcagagaatttcagtgacttcactcagaggactgagtgcagtgagggcagtgtgctgggccctgccctccctgctgaggccaaaatggcaataggtgtgggagcctggctctgcatggatgactgtgggtgtcctgcaaccaatcctcctggacctgggaaatttaaagacttccagccaggcaaagccagggctattttatttcccaactctttaatgttgtttgtggtgctgtgtttgaagggtctctgatgagactcatgatgcatatggatccatgtagggtaatgaatcagtttataatagtatacgcaggaaaaaaaaaatctgtgctagaggaatttgtgaaatttaccttgcccttatttttacctaatactttgtaatattattcattataaaagcttttgtttataatttttttgttacctttttggacaaagaaaatgagatagcctacagtcacagaatatctcaatgattttcctaatgactagctaattttcctctttatttctctaaattacaaatcacgtattttgtgagggtatggatacattaaccaattatttaaaccatgtttcctaataaatcatactctttgtgttcgtgtaagcagtagaatttggatacatgacatctgttagaaaggcacaggcaagtttaagacaaagaaagtgaagagaggaagtatactcctggcacactcatgacaaaatgtgtacctaatgtaagttgggacagttaatgggcctattaaattacaaacactgttttctttgccttatagaaataggatatgtgaattaaaatattattagaatacattcaacagcaacacgttttgataagtaataaatgtagcttactatatgtccatggaggctgtggtttgggccaggtgctgtatgaagcaaagtaaattacagtctttaaattatctgaagaaattatattctaaaattgatgtctttcaaaggtctaagttttctgtaaaatcatactcaaaaaacatttgatatgggaccttaggcaaatcacttaacttcttgggattcagttcttcaagtgcaaaatgataggcttttattacattattactaagtttcagctgcctctaaaatctccatcctcctaacaaatcactgtattggaacttcagttaaatgtctggtcagagttatcttttaaatggtgctttatagcagtatcccataggggatacatgttgaaagtattcatacttacatcttaagtcatgtgtaagtgtttttttctaagtccattttgaggtggtttcagactttgagcattttctaagaaatattcagctgtcttttgtccataaaatactgaacacatttgacttagcagagattttaccttccctagtttatgaagatacagtagtctcctcttatctgtagttttgccttttatagcttcagttactcatggttgactgtagtccagaaatattaaatggaaaattccagaaatacacaatacttaacgtcttaaattgcatgccattctgagtagtatgatgaaatatgctctgtctcccctcaggacgtgaatcatgctatgtctagcttacccatgctgcatatgatacgtgcccattcatcacttagtatagcaatcttggttatcagactgatgaatcacaagacgaagaaggatgagtgcattgtagtaagatattttagagagagagacagagaggccacaatcacataatttttattatactattctgttattattattgttagtctcctacctgcctaatttataattaaactttattgtagttacatatttataggaataaaacttagaatatatggagttgggtactattcatggttttaggtatccactgggggtgttggaatggatccctcaaggataaaggggcctactgtgctcaatatgttttatttgcaaatacatatagataacaagatcaataaaaatctctctatatgtagtagattttgtctataattgatatattaatcagttgagataatgaattaattttgctccttatatttgatctgatatctaaaagtagtaatgcaaatgaggaactcttgtgccttattttagatgtattttgtgctcacatttagtgaatggtaaaattcaagggtaaatctgttgaaaggaaggcttatatatttaagatcccattgtgttgatgaatgttcactgtaattaaaaagcctattttttacattaagtaccttttggaaagaaagcaagaaagtcttgacctagaataccctacatcacttaaatgtacagaagggattaatctagaaagagcatgacatttaaatgaattttggttgatgaaaagacattatgtcttgctctgtatatcgtcttgatttctttttctctttttgtgtatttgctagttatctgttgcttgagtttattctcagccttgctgcctccaggctcctcacacttccagtcgtgtccacttgctctttgcagtgatgctcagactgcttttcagtctgcagtaagtactgtatggaaactgatagaaagtcagttcttcactccagcctttccttcagtatatgttggaaagtatatgaatttaccatagattaattctgtttgtttcctttttgtctgtttggttttggtttggggctttgatttcagttttaccatgtacacattttagagaaccaaacagttgtatctgtaagtttttactaaaagtaggagatttctgccttcattcctcatattctcagaggtgaccacttatacctcatttagctactttttatagcttctctttcatgtctctaaataacatgcttatatttttttgtcttgattattcagttttaaatattatctgttgaattcctactatggaaaatgagactttagcttttttttcatgcctcacccacctaccctgccaaaatgggttcccttctcattctcctaatattgatataccataatgccaattagagaataggcagcgtgaatggtattaaatttatgacagtgttatacacagttgaaccgtgttgcagagtgtttaactttcttttcttgcacagcttttgtttgccttagaggtaattattgtattattttaaaacgtgctgactttcctgttatcacttacaagctccatgctctttgccagaattaaacatcctctcagtgtgttcagaattgtcagaacttcatcgcttcatcttttggaagaaatctcttcccaattccttctaacctacttggtgcctgttttcatcctgggatatccattcaccagtttctgggaattcctttacctctgtgctaggtgcagtttcctgtcatcctgggatatccattcacctggttccaggaattcctttacctctgtgctatgtgcagtctcctgcatcctgcatgctgtctcccatctcctgtggccttctctcctggttaatgctcttcatttttgcgtagcgtctcttctcccttagctttcagagaaaaggtactgaggaggtcttttgagatctaaatgactgaaagtcttttatcgcccttacatataatttatagttaggctagtgagaattctggattggaaatcatttacttcagaatttagaagccatagtctgttctttttaattccaaatgttactatagagaattctgaagccttggctgggcgcggtgctcatgcctgtaatcccagcacgttgggaggctgaggcgggcggatcacgaggtcaggagatcgacaccatcctggctaacacagtgaaaccccatctctactaaaaacacaaaaaaattagccagacatggcggcgggcacctgtagtcccagctactcgggaggctgaggcaggagaatggtgtgaacccgggacggggagcttgcagtgagcagagatcacgccactgcactctatcctgggcgacagagcgagactccgtctcaaaaaaaaaaaaaaaaaaaaaaaaaaagaaaattccaaagcccttagaattcctggtttttctcttcctggaagtttttagaatctttattttttctcgtattctaaaatgtttagatgaagcatccaggtgtggatctgttttagccattgtactgggctctcttggggattctttccatctataaactcatgctttctaaattacttcagagacattccctgtactttgtatgctctgtacatttggaactcctgtgaagtttttttttttcgctatgtaatctctctttgctgtcttttcctctatttattttagtctctcttttctatttggcagcttttcttggtgtctggtaatcttgattatgtgctgtatttaagactgggaaactcaaagcagattgacatccctgagcatatgagtgcaacttgtcaattgctgtccaaggggaccaatgggggttattttgtaggcttgtcttctggggcttatcagattccctggagaatggtcttctgatctctttcctggaggtgaaaacccaactgccaaatgttatgtagccaagtaggagacgacagctgaggtctcagaatttagtttgcacaatttcacttaatccttcaaaggttttagtagaatacccttgcccacaaattttcctgtctctgccagttcagaatcctaatttatcctctccagagactaagcatccgggattttgcaagggctgggaggaagagtggcttagttacatagaaactggtggctggcgggcaggatctgggcatgtaactgcattttagagacttgaagcaatccttcatcctcacgtccagggatgcctggtgctaaatttcttcagccttgggcacttcagtggatagattggggtagttttcagctttccccactcaccacttagaattcaagtttcccaagcctaatacacttgcctctcatccatctgctttctcgttttcaggcttgtgtgtgtgtgtgtgtgtgtgcaatcccatttttgtcattttaatgggatttcaggagggaataaaagacatatctgtgcacacaactatttccttaggagtcttaactccgacccaaccctgctcccaattgctagtgagcaattttttatttttattttattttttatttttatttatttatttatttttgagacagagtctcactctgtcacccaggctggagtgcagcgtggcccgatctcagctcactgcaacctctgcctcccaagttcaagtgattctcctgcctcaagcctcccaagaagctgggattacaggcgcttgccaccgtgcccagctaatttttatatttttcgcatgtttgttggccaaactggtctcgaactcctgacctcaggtgttccgtccaccttggcctcccgaagggctgggattacaaggcgtgagccaccacacctggccccattatcatttgtttcaagaaatttttcaattttcttcttaattttttcattaacccactggacattcaggagcatattgtttaattttcatatgtttgtatagtttccaaaattcctcttgttattgatttccagttttattctactctggtcatagaagatgcttgatattatttcaatttcttgaatgttttaagacttgttttgtgaacctaacatatggaatatcctacagaatgatccatatgctgaggagaagaatgtgtattctgcagccattagatgaaatgttcggtaaatatctattaggtccgtttggtctttagtgcagattaaatccagtgtttctttggtgattttctttctggaagatctgtctgttcaatgctgaaagtagggtgttgaagtctccagccattatcgtcttgagatctcgctctctctttagttctaatatttgctttatgtatctcagtgctccagtgatgggtacatatatactcacaatcattgtatcctcttgctgcattgactgcattatcattatataatgatcttctttgtctgtccttacagtttttgttttgacatctattttgtctaagtatagctactcccaattttttttttgttttcattggcatggaatgtctttttccatccctttattttcagtctgtatatatttttattggtgaaatatgtttcttgtaggcaacagataagtgggcattgttttttcatcccttcagccactgtgtgtgtttttattgtagagtttagtccatagtccatttacattgaatgttgttattgacaagtagggactgccttctgccgttttgttatttgttttctaattgttttgtgatctcattctttaattccttctgtctttcttttagtgaagatgattttctttggtggtatgttaatttcttcttagtttttgtgtctccatttgtatcctttttggtaaaaggttaccatgatgaggcttgcaaataccttcttatagcccattattttaaactaatgacagcttagtactgatggcatgaacaagcacacatgcaaaagaaaactaataaaaactctacactttaactttatctcccctgctttttaacttttagttgtttctctttatgtcttattgtactgtctttgtcttaaaaagttgctgtagttattattttcgattggttcataatttagactctctacttaagataagagtagtttacacaacaccattacagtgttacaatagtctctgtttttctgcgtgcttactattaccagtgagttttgtaacatcagatgatttcttcttgctcacgaacatccttttatttcagattgaagaactcactttactatttcttgtaggacaggtctagtgttgttgaaatccttcagcttttgtttgtctaaggtttttatttctcttcatacttgaaggatagtttcatcgtatgtactattctagggtaaagtttttttgttgtttttctttttttttttccctgcagcacttgaaatatgtcatgccactctctcgtgacctgtaacatttccagatatattggaggtccattgtatgttgtttcttttctcttgctgcttttaggatcttttctttatccttgacctttaggagtttgattatgaaatatcttaaatgtcttctttgggttaaatctgcttggtggtctctaaccttcttgtacttgaatattgatctttctctaagttttgtaagttctctgatattatccctttgaataaactttctaccactatctctttgtcttaaatttgccctttcgaggctattttttaggttttataggcatgcttcattcttctttattctcatttttcttttatctccttcccctgactctgtgttttcaaatagcttgccttcaagtttactaattctttcttttacttggtcagctctactaatatgagactgatgtatttgtcagtatgccaattgaatttttaaactccagaatttctgtttcattcttcttaattatttaaatctctctgttaaatttatctgataaaattctgaattccttctcttattttgaatttcttttgagctcccctaccacagcaattttgaattctctgtttgaaagttcacatatctcttgtttctccacgcttggtctctgatgccttattttagttcatttggtggggtcattttttcctggatgatcttgatgcttttagatgttcgtcaatatctggacattgaagagttaggtatttgttttagtctttgcagtctgggcttgtttgtgtgtgtcctccttgaggaggcttcccaggcattccaagggaattggaccttaagcccaataacacttcgtttcttgcagacttgtagaggtactgccttggtggtcttggataagatctggaagaattctccagattaccaggcaaagactcttgttcttttaccttactttctcccaaacaaacagagtctctctctatatactgagcagcctggaactggggatgtggtgatattagcatccctgtggctaccaccactggaactgcactggattagtcctgatgtcaacacaacactgggtttctctcaagcccactgcagtcgctacctgcttacctgtgttcactcaaggccctaggacttcataatcagtaggtgacaaagccagccaggtttctgtccttcccttcagagcagtaagttcccccagaccctgagcaggtccagagatgctatctgtgagccagggattagagtcaaaaaccttagaattttacctgatgttctattctaatgtgactaacctggcactcaaaccacaatactgggtcctttctgctcttctctcccctttccacaggaaaaggagactctccttttggccaccaataccacggtcccatgggagttctaccacgctgctgccaatgttcacttagagcccaagggcacttctgtcattctgtgacgaatgttgccagacctggggctcacccttcaggacaatcagttcccctctggcccagagatggtccagaaatactgtccaagaggctcggcctggattcagggagcccaagagcctacttgttgctctacccactgtggctgagctgatacctaagatgcaagacaaagtcccctttactttcccctctgcttttctcaaacaaaaggagtcttttgttgtagccaccacagctgcgaatgtgctgggtcatacctaaagtcagcacgtcccagagcccaaggcctgtggtgtactatctggatattgctgctggttattcagggcctgagggctctttagtcagcaagtaatgaatcctgccaggactggtttcttcccttcaaggcagtgggttcccttggcccacattttgtctattttgtcatccaggaatgggcctggaatggaggtctcacaactctgcccagtgccctgttctattgtgactgagctggtatctaagatgcaagacaaagtcttgtttactctcttcctcaagtagaaggaaggagtcacttttgttgctgcgagccgcactgcctgggattgagggagaaatggtgtaaggcctcccttagctgccctggctgttgtctccctgtgtcacatgccaccatagtccagtggctctaagcccagcctaatactaggagttgcctaggaattgcaggccttgtgtccaagactgcctttcaagtttacctaggaccccagagcactggctttacggtggcaaggcttgccaagaaactccacttctgactgctggtttgggcagttgatctaaatgatctctccatgcatgggtgttggctgagcccagcacagctttgctctccactgtgacagagcagcactgaattcagtgtgaagtcccccagtcgctgctctctccctcctccaagtgtgcaagttagctcgccataccaggcagctgctgctgatagataggggaggggtggtgattcaagactatatctccgacacttttcagttcctcttttagccgtacacattaaaaccaggtactgtgattgctcacctgatttttggttctcgtgacggtgcttttctgtgtgcatatagttgttaaaatttggtgttcctgttgggggaggacagacagtataggcttctattctgccaccttgctgcactcacccagccgattcttttttaactgttaggttcggggtacatgtgtaggtttgttatataggtaaacttgtatcatgggggtttggtgtatagattatttcatcacccaggtactaagcctggtacccaatagttattttttctgatcctctccctcctgctacccttcacccactggtaggccccattgtctattgttcccctctttgtgtcccggtgctctcatcatttagctcctacttataagtgagaacaagcagtatttggttttctgttcctgcattgtttcctaaggatcatggcctcgagctccaaccatgttcatgcagaggacatgatctcactcttttttatggctgcatagtattccatggtgtatatgtgccacattttctttatccagttttccattgatgggcatttaagttgattccatgtctttaccattgcagatagtgctgcagtgaacatttgtattcatgtgtctttatgatagaatgatttatattcctttgggtgtataccctgtaatgagattatagggttgaattgcagtcctttttttagcttgttgaggaatcaccacactgccttcccaatggttgaactaatttgcactcccactgtgtataagcattcccttttctccacaacctcatcagcgtgtgttattttttgacttcttagtagccattctgactggtgtgagatggtatcttactgtggctttgatttgcatttctctaatgatcagtgatgttgagctttttttcatgtgcttgttggcaatgtgtatgtcttcttttgagaagtgtctgtttgtgtcctttgcccacttcttaatggggttgtttttttcttgtaaatttaagttccttgtagttgctggatattagacctttgtctgatgcatagtttgcagatattttctcccattctgtaggttgtctgtttactctgttgatagtttcttttgctgtgcagacacgctttagtttaattagatttcatttgtcaatttttgcttttgttgcagttgcttttcacattttcatcatgaaatctctgccactttctgtgtccagaatggtattgcctaggttgtcttccagcgttttaatagttttggggtttatatttaagtctttaatccatcttcagtttatttctgtatatatgtaaggaaggggtccagtttcaatgtatgtatataattagtcagttatcccagcaccatttatcgaacagggagttctttccccattgtttgtttttgtcaggtttgtctaaggtcagatggttctaggtgtacacccttatttctaggctctgtattctgttccatcggtctatgtgtttattttttataccattaccatgctttggttactgtagccctgtagtatagtttgaagtcaagtagcttgatgcctccagcttttttctttttgcttagaattgccttggcgatttgggctcttttttggttccatatgaattttaaaagttttttctagttctatgaagaatgtgattggtggttcgatagggatagtattgaatctacaaattgctttgggcagtatggccattttagcaatgttgattcttcctagccatgttcatggaatgtttttccattcattcgtgtcaccactgatttctttcagcagtgttttgtatttctccttgtagagatctttcacctccctggttagctgtattcctaggtattgcattttgttttattttattttgttttgttttggtggcagttgtgaatgggattgcattcctgatttgcctctcggcttgattgttggtatataggaatgttagtgacttttgcacattgattttgtatcctgagactttgctaaaattgtttatcagcttaaggagcttttgggctgagacgatggggttttctagatataggatcatgtcatctgcaaacagggataatttgacttcctctcttcctatttggatgccctttatttccttctcttgcctgattgccctggccagaacttccagtaccgtgttgaataggaatggtgaaagagggcatccttgtcttgtgccagttttcaaggggattgcttctagcttttgcccattcagtatgatgtagacagcaggtttgtcatagatggctctcgttattttaatatatgttacttcaatacctaatttgttaggagtttttaatatgaaaagatgttgaattttactgaaagcctctgttgagataatcgtgttatttttgtttctagttctgtttatgtgatgaatcatgtttatttgtttgcacgtatgttgaaccaaccttgcatcctagggataaagccttcttgttcgtagtggattagctttttgatgtgctgctggattcagtttgctagtatgttgttgagggtttttgcattgctgttcatcaaggatattgacccttttttttgttgttgtgtctctgccagttttgggtcaggatgatgctagcctcatagaatgaattgaggaggagttcctacttctcatttttttggggaacagtgtctgtaagaatggtatcagctcttctttatagatctggtagaatttggctgtcaatccatctgatccatggcttttatggtgtgcaggctatttatttctgattccattttagagctcattgttggtctgttcagggattcagtttcttcctggttcagtcttgggaggatatatgtggccaggaattcatccacttctagatttttagtttgtgtgcatagaagtgtttataatcgtctctgatgtttatttctctggggtcagtggtaatatcccctttgtcatttctcattatgtttatttggatcttttctcgtttcttcattaatctagcctagtggtccatatattttattatttttttcaaaaaactggctcctcacttcattggtcttttgaatggtttttcatgtctcagtctcctttagctctgattctgattatttcttgtgttctactagctttggggttggtttgctctttcttctctagttcttttagttgtgatgttaggtgcaaacttgagatcttcctaacttttcaatatgggcatttagcgctcaaaattttcctgttaacactgccttagctgtgtcccagagattctggtatgttatcattgttctcattagtttcaaagaacttactgatttctgccttaatttcattatttgcccaaaagttattcaggagcaggatgcttaatttcaatgtaaatgaatggttttgtgcaattttctttgtattgaattctgtttttattgtgctgtggtctgagagtgtggatggtatatgtattagaccattcttacattgctgtaaagaaatacctgacacggagtaatttataaagaaaagaggtttaattggctcatggttccacaggctgtaaggaagcatagtgctggcatctactcagcttctgggaaggcctcaggaaactttcaattatggcagaagggggagcgaggcatctcacatggtgggagcaggaggaagagagaggggcaagatgccacacacttttaaacaaccagatctcacgagaactctgttacaggaacagaaccaaagggacggtgctaaaccattcatgaaggatctaccccaatgatccagttcccaacattggggactacagttgaacatgagatttgggtggggacacagatccaaaccatatcagtacaattttgatttttttgaatttgcggaaatttgttttgtgtctgattgtgtggttgattttagagtatgtgccatgtggcaatgagaagaatgtatactctgttgtattctggtggggagttctgtagatgtctatcagatccatttggtccagtgttgagttcaggtcttgaatatctttgttaattttttgcctggattatctgtctaatactgtcaatggggtgttgaagtctcccacgttaccctatgggagtctaaatctctttgaagatctcttaagaacttgctttatgaatctggatgtttctgtgtttagtgcatatatatttaggatagctaggttgccttgttgaattgagtcctttactatttgtaatgcccttctttgtcttttttatctttgttggtttaaagtctattttgtctgaaattagaattgcaatccctgcttttttctgtttttcattgcttggtagcctttttccatccctttattttgagcctatgtgtgtcattgcatgagatgggtgagtgcctgcaggcaaggcggcatgaaggaggctgcagtgggggaagaatgctggtgcgtgtccactggggtcactctgctagagcactctgctagtcaggcagtctgccagtgcaggagctaccgtatgggcccgtacctgggagcttcactccaagcaggtgtggctaggctcgggctctgggagaagccagcagaccaaagggtggaccagattggccccatctcatgggcaagaccaccctgcagagttgaggtcccacagttcccctagggataaagtctcctatgggagcaagtctagcctaaggggatgggcatccttggccatgctccgctatagacactcccataccaaactctctgggctctgccccagctggagttctgcttccactgcttccctaagcagctttccctgacaactcaaatgtccatggtggtccaggggttccttcctaccaggattccagcggcctgtggggagagcgaattttgttccttgccttttcaacttccccctctgcaggagttgttgggggccaggaacaagttgtggtgcttggtagccccgagcagggtccccagcttcctcccccttcagccccagctctgtgttttccctccatctgctctcgatgccctccctctgaagatctgctaggagtgtgccagtcttcctggtgtcccagtccctcagtgggagatgttcctcctggctgtatctagttggccatcttggagcagaaatttctagttttgatttttaataaaaatgtatggaatctgttattgtgtctgcttttgtacatattagaaatttttaagtgaaaatttttctagctcataaatttaaatgtataaaggaaatatacagaaatagtagtttcggaattacaaatgattttccatttctctgaaagtcaaaaaagttacacactattttttgagaaaatgttatatgacaggtgcatgttaccatagaaacgaaagatggaaagaaccaaatcacctgagatataggggtagtttagatagaaatggagagaggggaatgtgtccccagaaggagaaaggaggaaattgatgacagttctcctgttcagcagttttacaaggacccattttaataaggtacacacatatatatacaatatgcgctggtgaatttgagtaagtatatgagcttgctacgtgaaagctaaataaagcttttttctgtagatgatgagtctttaagaatgattgttgttcttttccatattataagcaacttatacagtcttatccacgcagaacattctcaaatattaatgatttatcaaaatccagtgaatttcacatgatagttgaaacctagcaatatcttttaagtagaaaatgttctttattcacaacagttttgctccagattaaatatttcttcaaggcagtttgatttatattctctgcagtgctatgaagggaaatcctccaaagatatcctgaaaagagtagctgcaaatgcattgatgtcactgctggctgtcagtagaagagcacagaaacatgctttgaaaggtgagccacatgacacatcagctgttttgatggcattatcaattcatatgttttgttgcttgttcaagttaattttctttggactcaaaatgtaaaaaacgtatagtataatctcagtgtcactaaaaataattttttttcccatacagaagcagtaaatatgcattacttttcaaataaaaagattagacatagtttgtttttgtttgtttaatatgtgatggttcttgctctaaagaacctatatgtaaatattagggaagctaaaaggtaacacattgagtttcattataattaaatattactatccagaagcactcactgcatacctgaacaaaacccacatagttttgatggtaaaaacagcaacagatgattccatattttcgtataaatttccctcttgagtgttgtaatttctcatttgggaatcggagaatgtagatctgagaattaaaagagaataatggcaacatcaagtccattaatatcaattgtgatttgcgactacaacaaatgatgtattcctcaagttgtaaattggatttgggtagtatcttactaaaaactgaaaacaagtggacttcagcattttagttctcttacttatcccccctctgattcattaatctctgactgaaaattctaaaatgaagtgggtcagaaatagaaaatgttacctttttgagaatctgattggtatatgtggttataacttacttggaaatagaatatccttttgactactgcagattttgtctttcagccaatcttatagacaattgcatggagcagatgaaacacataaatgcacaactgaacctagattctctgaggcctgggaaagcagcattgaaaaaaaaggtaacattctgggataaatgaatggctatatatagagaccattctccagtcctcttgtgcctagaaatgagcacgagcttgaaatgagtgtctcatttagaagaaaggtacagatggataaattaatgagacttctacattagcagattgttggctttttttggtcttaattcttacttgaagatctttagacaacatctgtctattatgtactgttgttattataaacattggaaatatccacatatacatgatactatgccagataaattttttatactacaaaaagaaaatctttatctcaaaacaagcataggttaactaggaatgagatctgtaacaactataatttattaagagttttctatatgtcagccactattgaaacatttcatatttattatctcatgaacaaacactcattacagcatagtcacacaactggtaattgatggagctaatatttgccccaaatctgggtggttgcagagctggtattcctcatctctgtttatctcctcctgtgccttctgaatatctcctctagcattgaatctgctggactcatgtttaaactgcatgctcaggtaaactgaaaataacatagttatataataactactgtggttaacaagatctgccacccacttattcaacaaatgaaagtgtgtgaatagtataaatatataaatatacatatatgtgtgtaggtaaggccgttatagcagcactctatgtaataactagtttctactgcatttaagaaaccaagacaaagtcttatttaataatgtaattgatgcaggagattgattgtatgtttatcagttctttttttttttttttttgcctcttttcctccctagccaaaggcccttcatcattgagaaagtcagccaacacctgatattattgaaaatctctcagtatctgcctcactttattgagatgaaacatggaggctatcatatatccgagttcctccatgcttgatagaacagaaatagctttttcatggtgaatgtgcttcttgagatatggtcatctttcagagatcgttagcctgtcagttccctcaaagttacagtggttgggcatgattagagcacacctgcattgtcccgtgacccaaaggggagggaattactatacacaaaaagtgaagtatgctgttgcattcacagttttcaactgctttttgtttaaataggaggatggtgttattaaagagttaagcattgccatgcagctcctaagaaactgtctttatcaaaatgaggaatgtaaagtaagtagaactacttttcaaaattttaataggagtactggtattaagcagtttaatttttatgtgagataatgtagtaggaaaaatggaaagctctgacttttaaatttttagacacacagttgattggtccttaaactcagtgttaattgtcagaaatgtgtgtatctaatcattattcatcgacactgattacatttcttcgcaaacttcagcctcattctgtactcttaggtattttaaatgttttacatatggaatgaatggctggatgtgttttataaggtagattctttcaaaacgggttgtcaaaacaactcttcaaggaaataagtgaagctatctgtatctataaggaaagaaaatgaagagtttcctgcttcaaaggagaagatagttagagctgctacctagtgtggccacatccaccgagaggaagtttcttctagctctgctgactccctgtgaccatttacatggcccttctgtctaaaaatcactgagatgttttgcttcgtctgtaagcactgatgatgttttaaaccattgtatcagtactactatagaggatataatcttgtgaacactctgatttgctttgtctatagttttacaacacttttgaaatactagattgatgctttaatgcagaaatactagattattctttataaaagctggccacgaaaataaaaattttaaaaaatactaaattaaagctttaatatagaaagcaaagataaattatggaagcttttattgccttataaatttttacctgttttgctcttacttgtggtaagagcacaactggaaaaaccataccacatctggaaaatggacatgttgaacacacttactccttaagcgatgttaaaaagccagatacatgactcacaatttatatttcaaagtagtttgatggaaattaagtatttatttatacaatttattaaaattccctatatatgaatttatatgaactttttctcaagacaaaagtgccattaataaacttaatgattccttcatgcttatgatattatgcttgtgactggatgtacagtcagtatttgtgtgtaaatttaaatatataaatttcatgtgtatgtgcagttaatattcattcatgacaccttattcagggaaatactctggaatactttacatgtgggatctacctataaagatttatgaagtgctaacctggctactagttataaatattgtgctcaatttgtatcacattagccatttacaaaagtgtgatatctcaataagtcaaagcatttctgtatttctaagttgtttaataagaagtaaatccaaagaatattaagattatccttgagtataaatataatattatggaggtagggattgttaatttcaatttcagcttttatcaggtgtatggcatgttctcattattaatagttggccactattgggtaattcaccaggtcacccactgccaccccaccctgctgtttgcatatgcataacattaggggttttcatactggaaggagcatggtggctgtgaggtaaatgaattaaacagtggacaaggttagacggaggggactgtcatagtccagacaagagatgatgacaccttaacttgagcaggtagaaaggagaaggagggtagggagtaaatttgaggcattgagaagaggaggaatgtagaatgacttccaaactccagtttaagccactgcattatcatgcattaagagtgcatgatagagcagagcacaggtgtgagagacccgatattcatgcttgcacgtgctagcctcaagagtctttggggcatccaggtgaaaaatggcttgtggcctgtagattttatgggtctgggactctaaggagtgatacaagctggggatattaggagttatcaatgtgtagatggtgtttgtggtcctcactattgttgaaatttcccaagaaagtatgtaatgaaaaccaaggtcatatctttggaaaacaggaacatttaagagggggcagaaaacaactgagaagggaatactggagaaggaatttggagattgcattaggccgttcttgccttgctatgaagaaatatctgagactaggtaatttattaaagaaaagaggtttaattggctcacagttctgcagggtatagaggaagcacagtggcgtctgcttctggggaggcctcaggaaacttccaatcatgacaagaaggcaaaaggggaacaggcacatcacattactagaactggagcaagagtgagagagctggcgaggaggtaccacacacttttaaatgaccagatctcatgagatcactcactgtcttgaggaaagcaccaagccatgaggaatccgcccccaagatataaacacctcccaccaggcctcacctctagcactggggattacaattcaacatgagatttgggcagggacaaatatccagactcttatcagaaatgatccaggatagagcagcagcggggaaattaagagacatatagcaaatgccaccgtgcttaagcgttgttggcaaccacaaaagtagaagcggcctcaatagaatcatcagggcagaaaataaacggtaatgagctaaagattaaatgtgaggcagggaaattacagcaataataatgtagaagtttggtcatgaatagtggcattaataatttaggacatataagatgaaaggaaatgagtatgtttgtttctcttaacacgtaaactacttgaatacaggcacagaaatgagcaaattggggacgagttgtttaagagatagcaagaggagaactaactggtggattaagatccctgaggaggcaggaagagctgtgtttcagaacacagatggatgtatcaatctctggcaggcaagaagtggaacacctctttgtcactaccgggcagacaggaaggatgaatggatgaaaatacagataaactatgtggacagaatggcagagtagataaaggagtttgtacttaatcgtttctgtcttctctgtgaaatagtaaacaaggtcatctgctgcagatggagggccgtgtgccacagagagtggtgaacaagggaagaactttagggagagcactgggaatgacttcagtgcttacggagagtgttgaacattgggaatcacttctcttctgccacttgatgctatgtgaaatcgtatagggtgtgtgtatttatgtgcatgctcacgtgcataatcatgggtctacaaattacctcggaattcttgttcatttaaaatagatattgctgcacttaaacagctatattttatctgcaatattgtcccagggtaactgatctttgtaataaagactctgagttacttcagaatttttcaatttatcataatatttagactgaattttatatattcaaattactcaaaaactgtaatttactttgagtatatacacacatacacagagagagagaaggagagggagagagggtgggcaaagaggactcagagttgatcagaatgtttacttaaccagaaattctcacttcttggccagttcatagcatttacaggaatttattcagtgttgtgagatatcactttgctgtttaatttacatgttacacaggctattttctatgcttcctaacttagtggtacatcttaaccaccctggtgttgaagcgacgtcctgagattggtcaggctcgtggtcagggcagccatgtgtggagcccaatggggctggggcaggatgctgaagccatccacagggttctccttgggtcttatgttgatggctttctgttgttgttttgattttaatgttatattttcatatattcagactaatgctgtctttttcccttccttcaacaggaagcagctcttgaagctcaccttgtccctgtcttgcactctctctggccttggattttgatggatgattcattgatgcaaatttctctgcagctcctttgtgtctatactgcaaattttccaaatggtaataggatccaatactgcctttcaataatataccaaaatactagttttataaatgttgttaaggtggactggaaaaactaatacatattttgaagtatttctctgatttattgaggatatgatgggcaaaggcaagctttctcgtaggtattatgagagcagacagatattttagtgtgtttgttgacatgagagagtcattggcagcgcagggaatagagagggaggactggtctgattatctggcaatgggaaattgagtttagtaggaaaattgagaggataaaaattatgatgtaagacctcaaaagccacgtgaaggttagaacttctcatagattctagagcaggagactggcatgttgaaagttctcataacagttggtctggtgatacttgatatcactagggctcctctttcgctcatgcacttgatagacactttatcaagagcctgtggtgggccatgcattgtgagttctggtgagagtgatctgaaatgagataggaggacaggtcatgtagggcctcagaggccagagtagggagtttggatttttatgtgagtgtaacaggatgacattggcagttgtaagctggtgagtggcatgatttaatttgtgtttaagaaggattaggctgggtgcagtggctcatgcctgtaatgccagcactttgggagacccaggcaggcggatcacttgaagtctggagtttgagactagcctggcaaacatgaggaaaccctgtctctactaaaaacacaaaaattagccaggcatgatggtgcatgcctgtagttccagctactcaggaggctgaagcaggagaatcacttgaacccaggaagcggaggttacagtgagccgagatcacgccactatactccagcctgggcaacagagtgagactctgtctcacaaagaaaagaaaagaaaaattgccctgggtggtatgtggagaatgaatgattgggagcaagtctagaagcagggagacttgtcatggagatataatggtggcttgggcttgagtggtagctggagagattgagagaagtagacagattcagtatatagctcaaaggtagagtcaaggatacctgttgtgggaggtaggaaggaaaaaaaggtgtccggggtgaacttcatttggagaaatgagcctgagtgcacagtagtgccatttactaaaatggggaagatttaaaagaagcagacttgaagtgagaaagtagtaggaatcaagagttctgtttggtcttgttaagtctaaggtgttgatgttcactcaagtgaaaatagtaagctggagttgaattcaatggagtgtagagataagtttgaagatttcaaatgttgggaatattattagttatttattgctacaaaagaaattactctaaaatttagcatctgcaaacattaatcatttcattatgccacggcttctgtggctcaggaatctgggcgtggctaatctgggtggtcctcgctcagagtctctgcaatcatctgaagtcttgactgggatagaggatccagtgtgactatgggagcctcaattccttgctacttagggctgtctcaaacgacccagaatgagtgggctgagggcagaagttatagtctcttataatccagtctcagaagtaactgaacagcactcctagctcttgtgggtcacacataccaaccctggtacagaggcaggcgccactgggaccatcttggaggctggctaccacaggagtcattgtcatgtagattgtacttaaagccacgtggctgtttgcgattacccagggagaatgtgtagatggagaagcagaaacccatgaccaagttctgaggcacatcaacatttggagttaatcaaaagatgagaaaccagcagaaaaaaaagagaaggagcagccaatgagataacagtgcacagtcacagaaagtcagagaagggcatgctcagttgtgtggaatgctattgaaaattctgctaaagtgaggatagaaaaaatggctgttggacttagcagtattgatgttcttttggaccttgagggtaattttagtgcagtgccagaacagaaacctacttagtgtgagctgaggagagaagatgaagaagtagaggagacagcttttccaaaatgtactactcttaagaggacaaagaaatggagcaacagcaagagacagatgtggagtcaaaggaggagtttttgctcgtttttaaagatgtatgtttttaaggcatgtttattaacttaagggattgggagaatgaggtgcaggaaagagtgcaggtaagagcccagcctgagagggtaagagaggtgagagctagagcacagctgacaacagaagcggagggaaggctgagaggaaggatgtggatttaggagggctggtagacttgatgggaatgatgagaaaattcccattttgaatacttctgctttcttcatttaggagagaacactgaccactaagaatgagcaaagacaaggagtagaggtgatgtgagaagaggagaaagtgtgaagtagctgtttttagaggaaggaaagtaaacacaccagagaagcaaagtaggattgctggcagtgttaagtaccacttatggtcataaatttaagaaaataaattagaatttatggtcataatttatggtcataaatttaagatttaaattttattaaatttatggtcataaatttaagatttgactagcaagtttttgtactttcttctaacaacactcagtagcccagcaactggggtctctgaatatcaaaggttatacagagaagggactggaactcacaacagttaaggagcccatctagttactgccagatgctgttgatggcttattcctttgaataatctgccagatgctgatgatggcttattcctttgaataatctgacacctctggagctgtccatttcgatacccaactcaggttgtctccagtcagcacaaagagatataaacagaccttcaagctcttgaacttgaactgtcattgaagcatatgtgtacaggattgtccttgccttcattctgtgctgttaactttctccattccttaggtctggtgggaatgtctcctttcagtgcattttccagctccactagtatatcttttgtttgtttactcatcttttatgagtttcttttacagaatgtatttgattctgatcagtttatacttaagttggcctcctcgtatgaactttcacaagtcaattataccttaggtttatgtataatacagtcttattgatttaacattaaaatatatttctaatttttttttctccctcaataagtctcattcagttacttaatttcctgagaaacactgaaccctggaaagcctgtagatgccacttttggctcctgctatgctaagctgtatgaccttgaacaacaaactggcttttctgagctccatatctttgttgaccaaatatagaaaatagtatttgttttgtccgctttcccagggatattatgttccttatttgtatgttatgtaaaatgaaggcattagacaagttatctcccatttctaaaattctgttcctttacacaggcctttatttagatgttttctttagcaactattaaaaaccctagtatgtttattttattctttttttaaaaataaacctggtgtcttaaagtgctttagtgagataattaggccctcagtgaggacagtatatctattaggttgactgtagacaccaacattagcctccattgctaatttgcagttcacaggttaatggcctagtcattttgttagacagatatgctttgccacttagtgtcttcaaaaactaaacagggaaactgagaagacattgtgataggctgttatttttgaaggttgcagttctctttgttggtcaagttgtggacaacaccctgttcaagctacacatagaggagccgtgagcaactctctgatgctgtgtatcctaaagttggcttcccagatgccactggagaacaccacggttcagcagatggtttttatgcttctttcaaacctggccttgtcgcatgactgtaaaggagtaattcagaaggtacgcacttaaactccccacatatcttaaaagggtactcagtgaaataatctttccaatcaaaagtttacaactcaatttctaagattattatgattttgaggcattttattttaaaggattataaaagggttaagaggttcactttgtttaaagccagttgatagatgacacgtgcagaaggacaggagctagagtagagtcataccatttccttctcatttatcttcttagctttcggattgtattttatcattctcaaagatgagggttttagaaagatagccgtcttacatttattggaaataataaaagtaatatattggtctttaaacagaccaaattgggcagtaacaatttcagtttaatttcattgacaaaatggtttatgaaatcacagcccacttcccccagttagacttaacttccttatggcatgttaagcaattttatgagttctctaggattccagttcccaatctagacttctcatcactgattttaacttaaggtaatttaaaagggatgtaatgagttaaataaattctagtacacatgtgcacttatattctgtatttagatgtgtataaacagaatccctaattgggaaaatcccttcaaatttgaatgtaatcagattatatactacttactagtattgtaatttgagtgtttccatttcttttacttgaaggccaagataaattgcagaagttgagagcatttataagaattgagtctccttttcctctactgtttcttctccctgaactcctcagaagatactttgttatcaccacataaatagaaagttcggtctttctaaggaaatggaaagatcaatcttaccaaggaaagatgttttcagtggcacgttggagccagcctcctactgactcatgagtgtcatcttaaatttgcaggaattttataaaaattccagttgatgttacattgttattttgaaatcagccacagtgggcatatcacaccacgtaattcagcgaactgtacaaatcttggatcttttctaccctcaccacaatcagttgtttatttaccagcacatggctggatattttcttcatgtatatgttcatgtatgtcatatatgtatatatatttgaatatattttcttcatatatgtattcatatacatgcatcacttccaaaatgagacattctcttgaactggatatatgtgattagcatccataagaatgagagattctgcatatgtgagagcagagcgggggcagtgctttccaccacttccttatagagcatgttggtgggaagctaagtgggagcacccagaaggaatgtaagtgccaatctcgagtctggtctgtgactttgagctggagacctattctctttcagcttcatttgggtttaacaaaataatctctaagatatgttcaactcttaatctgttattctggtgctatacttaagaatattttgatgaagtgtgatcagactctctttccagggacggattaatcaagtctttttcctctgctctaattaggaaatgcctgagacttcctctgctgcattaagtaataatgagcccagacacttaacacttctacttcttcattactcatctgtaggacatagaaaatgcagcaggtggtattgtacaactcaggctccgaaatatcctgcttgtttgtttttttttctaccatggtatacatctctacatattctacctggtgtaggaaattgtctgaaaacatctttagaagcagcaaaaaaaaaaaaaaaaaaaaaaaaaaggagtgcccacagcacatttatatttgagagcactgacatctgctttatcacccttgtcagtcccaaatccagcaagggttgaatctaaaaactgtcagtttggctgacagtaggtgtgagtgacagcacatgcagctgaaagtgggcatgtaattttacagtttacttattgtgtgggtaatgttgataatatttctgtagctcatttcattcttaacactcagagtccttttgtataaaaacgttaagtttattttatagattaaagccaacatcttgattttggtctaggaaaacctaagagataaactggagtagatttaaacagagagagagaagagttattctgtgcaatcataaaagttaagtgattgcatttcatttctaaaatgtccacctaactgtggtttccatgctgccatgggctgcagcttgatgcagcacttttatactttgcatatagattagtctaagcaataatttattatctttcttatagtgaagggtttggtggggttttttggaaggggctttatttggaggttgaaaagactcttacagttcaaataatagagctttctcatctgtaagcataatagaatgacgtgtagccatcagaaattcttacttgtaatgataagtacctgggataaagtgaatgtaagatgtatctatagatttgataaaaacaacaacaacacctgtagctataatgattcaaaataccctcactacttccagagttgttaactagtattcaagactgatttggatttttgccttttttccttccatagggtagcttttaatagcaaaatcaccagaaggcagagagaagagaaaactcaagagccctgaaataatctccaaacttaattaccaattctaaataattaagagttaactatagtatacttcatccatcatgaggaaataattagcaggaattaaaacttgagcactattttgttcttcttacctttttcacttatgcttggaaataatatagatggaatattcagaagctattagaaaggagaaattaatgtagagggagagtatatcagaatgttagttaattggtcaccaagggactaggaaaataatgaaaaagatgagaagaaaataatattctctctatttatccacagagtaacttcttacagaacttcctctctctagcattgccaaaaggaggaaataaacatctaagtaatctgactattctttggttgaagttactcctgaatatatcatctggagaagatgggcaacaaatgattctgaggcttgatggctgtctagacttactaacagagatgagcaaatacaagcacaagagcagccctttattgcctcttcttatctttcataatgtttgcttcagtcctgcaaataaacccaagatcctggctaatggtaagttttcacacacacatacatttatatatgtagttattcatagactgttcaggtcaacaccaaataattttataaataattttctaggcatttattaagcacccactgtgttcaaagcactgtggaaggcatgggaatgaatcaggcatggcttcagccttccgtgggcttccaggagtctcctgaggttagcaaatcatgtcattccagtgcacatactggacacctggaggaaggggagccgtggacgagggctccctggccttaccttctgctccctctcctctctccttgctcttcctctaactccagctcccctcttctgcatcttcaagcaaatgctactatgtcaatgaagcctctcgggaaccatgtgttaatataatagccccgcacccagggggccttctctttcctcctcctcactatttcctttcctggttttgtttccctccgtagtattatcgccatctgatagattatgtgtttcatgtatctgtctattcctagtcttcccacactagaaggtaagctcttatggggtcaggaggcttttgtctgctttgtttatgtgtagcacctagaattgtgcctgcaactagcgagcactcaataaatatttgatgattgagagagatcccaagcagaccggagagagttcagggcttgagatcagatggtgcagtgagcctcgcagagacttcattctctgagatgtaggacagatggaggcgaggattggtaaggattcagaaaaaaattgaagcaaaaagaatcggaaagatctttttctgcaaccatgtgttatctctgtgaggagtatgtgaatttcgtggggagtgagttttataaaagacatgtgttctagtgaaaaacagaaggtgggctccagacccctacacacctggtcttgaatgccagcactagggcatcactccagcgtcgcctggtgcagcctcgctgggcccagcttcttcatctataaaagaagcccactcttcttggtttggtaagaatcagtttataaacacacataaagtgcctagcgctatttctggtacatgataaatgtttaagatagattcattctcttgtttttttcatgtttttcacttaaacttttctcagaagcatttttctgtgaaatcaagggttttctaagtgtacgaaaatgattcttcttatattttgtggtgtatatagttgtgattctatttttctgataagcattctgataatcaactgctagatatgatatagaaggatgtttaaagttcagttagcttgtagcagacctaaccttactgtggattttgcactctgccttccggtggctgctgtgctgatgctgcgttctctgttgctgcgtgatgtacatcactggttttatttccatcctctcccactgtagctgcttcagccctcacatttgtaaaatgagggtgatgataatccctcctcagggcaatgagagagcctgtgaagtgtttgtgaccattcttggtatatagcagctactcagtaacatctgttattgtttattcacctttcttagaatgattttttttttctttgagggctacttactccagtttattattgagagttggaaaaaggtcaagctttttgagaagtgaaggagagaagtctgcattttccacttctagacccctctagaattatttttagcatttctttgtagtcagcaatgctttttctccttcattagcttaaagcagatggataaactttggtgagaagcttcccctagcccacagactagagatcagtgggcttttcaggcaggggtaagataagagacatcagctgtgcagtttctgtgtggaactataaagggatgtcacagcctatgcctcgctttccacttggggatttatggaggaggccttagcagagtcagccagcttaaaagtctcccaggaaaggctgcctctgatcggtagcacccacacatctggtttaaatggtcaggagtggagtgtgcagtggagcttgaccttgctggtaaaaatagatctggggcttggcatggtggctcacaactgtaatcccagtactttgggagaccgtggtgggtggatcatttgaggtcaagagtttgagatcagtctggccaacatggtgaaaccccgcctctactaaaaatacaaaaattagccaggcatggtggcgggcaccttgtagtccccagtagtagaattgcttgaactggggagacggaggttgcagtgagccaagatcgcgccactgcactccagcctgggcaacagagtgagacttcatctccaaaaaaaaaaaaagatctggaacattccttgtttctggcaatgccagactaagtctcttctgaaaacgacaataacatgctagacaggctgtattaaaatgcacctcaaaataatcacaaaaactgaaaagatagaaactcccagtccagttttgattgaaagtcttgcccagacaagtaagaagtatatagaaaattattttgccccaagtgcatttgccaaggttgtatgcttggcttttgttgaggagtatcgaggggtgagaggacagaagccgcgattccccaaagtggggattcttactggctatcctgcttgtattaagctggacctccaaagaaccattctcttaatagatggatgggtcaaaaataagttggtttcccaaacttcatgaaggagactgtaaagaaaaggaaaaaaaaaatgtgagaatgggtactacagactgcttctgatagggctctgcacccaaagttggccgtgaacttggcttgaggtgtcttcgattgatggtgcctgtgggtacttagcagaaagcaaactgccttggtgatggatgaaagacaagttcatactgggcctcagggaacctctacaaataatttttcaaaagcattaaccagtacaaagttagagataatcaagcacattaggagacatggcaacatgtagtaagaaacagcagaagaataaaaataccagcttatctgcccagactttgaatatgggaattacaaagcatgggtttaaaaataactttaattataccatatttagataaataaatgacaagcttgaaaattttaggaaatgggaaactgacaagttgaaatatttgaaaagaaccaaacagaacttcaagaactttactgtgcagtatgataatcagccacatgtagctatttaaatttaaactaattaaaattattcagttgtactcactacatgtggctagtggctatcttattaaatagcaagatataaatatttccattattgtaggaagttctgttttacaacagtaatctagaacttcagtggccaaaattgaaaacttaatatacatgtctgacagcaagttaggtatagcagagaacttaggaattagaagatagattagaaaaatattatccagaatgcagcagagaaagctaaaaagatgagaaaggatcaaaagaatcaaaggtaagtgacacagcagatatatcaagacagtctttgtgtttaatgaagtgtcctaggagaatgggagaggaaatatttgaagaaatgatgggtaaaaactttaagaacttttctaagacattaatgtcaccataactgacaactcactgtaattaccaaactgacatccctaaacttatacttaaaccaattgtattaagaaggtaatattcaattattatattaaggtaacattcaattattatattaaggtaatattcagttcaaatattcaaaaatactgtctcattatttacattttactactgtatattcactttaggttatttaaatgtttatatgagagttcagacctacttgttgaactcaaaattgttttattgctttgttatatgcatgtttcacaataacatttgttttgttaaaaaagtcgatccacttgcattatcagaggggcccaccacattaattcacacacacacacacacacacagacacacacacacacacacatatgtatatatacatacacacacagtactttattaaaaatgctttaagggatagctggttgaaggagttataaacttacttagatcagaggagttatatattctgagtgtttgagacaacatttaaaaacatcacttgatgctactcagatggaacataaggaagtcaccctcccatttaataaggggacatttgatgtgccctaatgagtagcacttgcagccataacctcacgtgataaattgcatctgcaagctatgtacatggcttggttctgggtaggttatgatacacgacaaccaaagggcatcagatagtgcagatgaggtgttcagggagtcggctgcagcgtgcccgaaacatcactgcacctgcctttcacattgtcctgatgcacatttccagttcactttagggagcagctttttttgttttgtttttgttaaatatttaaaatcccttaaaataaaaaaattgaattatgtagacaaaatttttgtttattctattctggaatctttcacacaacgaatatttattgagctcctaaaatacactagcattgtggttggtctaataccagtgagtagacactgccatctaactaataccagtgagcagacgttgccctgtaactaataccagtgagcagacactgccttctaaccagtaccagtgagcagacgctgccctgtaactaataccagtgagcagacgctgccctctaaccagtaccagtgagcagacactgtgctgtaactaataccagtgagcagatgctgccctctaaccaataccagtgagcagacgctgccctctaaccaataccagtgagcagacgctgccctctatctaacaccagtgagcagacgctgccctgtaaccaataccagtgagcagacactgccctgtaaccaataccagtgagcagatgctgccctgtaaccaataccagtgagcagacgctgccctctaaccaataccaggagcagacgctgccctctatctaacaccagtgagcagacgctgccctctaaccaataccagtgagcagacactgccttctaaccagtaccagtgagcagacgctgccctgtaactaataccagtgagcagatgctgccctctaaccagtaccagtgaacagacactgtgctgtaactaataccagtgagcagatgctgccctctaaccaataccagtgagcagaccctgccctctaaccaataccagtgagcagacgctgccctctgtctaacaccagtgagcagacgctgccctgtaaccaataccagtgagcagatgctgccctgtaaccaataccagtgagcagacgctgccctgtaaccaataccagtgagcagacgctgccctgtaaccaataccagtgagcagacgctgccctctaaccaataccagtgagcagacgctgccctgtaaccaataccagtgagcagacgctgccttctaaccaataccaggagcagacgctaccctctatctaacaccagtgagcagacgctgccctctaaccaataccagtgagcagacactgccctctaaccagtaccagtgagcagatgctacactcacagaccctgccttgaaccttttcctattttagtacccttatttatttatcttgcctgattgccctggccagaagttccaatactgtgttgaacaggagtggtaagaaatggcatccttgtcttgtgccagttttcaaagggaatgtttccagcttttgcccattcagtgtgatattggctgtgggtttgtcataaatagctcttattattttgagatatgttgcatcaatacctagtttattgagagtttttagcatgaaagggtgttgaatttttttgaaggcctttctgcatctgttgagataatcatgtggtttttgtcgttggctctgtttatgtgatagattacttttattgatttgtgtatgttgaaccagccttgcatcccagggatgaaacggacttgatcttggtgaataagctttttgacgtgctgctggattcagtttgccagtattttattgaggatttttgcatcgatgttcatcggggatattggcctgaaatttcctttttttgtgtgtgtctctgccaggtttttgtatcaggatgatgctggcctcataaaatgagttagagaggattccctctttttctattgattggaatagtttcagaaggaatggtaccagctccactttgtatgcctggtagaattcggctgtgaattcatctggtcccgggctttttttggttggtaggctattaattactgcctcaatttcagaacttgttattgatctattcagggattcgacttcttcctagtttagtcttgggagggtgtatgtgtccaggaattcatccatttcttctagattttctagtttatttgcatagaggtgtttataatattctctgatggtagtttggatttctgtgggatcagtgctgatctcccctttatcattttttattgtgtctatttgattcttctctcttttcttctttattagtcaggctagtggtctatctattttgttaatcttttccaaaaaccagctccgggattcattgattttttgaagggtttttcgtgtctctctctccttcagttctgctctgatcttagttatttcttgtcttctgtaagcttttgaatttgtttgctgttgcttctctagttcttttaattgtgatgttagggtgttgattttagatctttccccctttcacctgtgagcattttgtgctataaatttccctctaaacactgctttagctgtgtcccagagattctggtatattgtgtctttgctctctttggtttcaaagaactaatttatttctgccttaattgtgttatttactcagtagtcattcaggagcaagttgttcagtttccatgtagttgtgtggttttgagtgagtttcttaatcctgagttctaatttgattgcattgtgctgtgagagactgtttgttatgatttcaggtctttggcatttgctgaggagtgttttacttccaagtatgtggtcagttttagaataagtgcgatgtggtgctgagaagaatgtatactctgttgatttggggtggagtgttctgtagatgtctgttaggtccacttggctcagagttgagttcaagtcctgaatatccttgttaattttctgtcttgttgatgtgtctaatattgacagtggggtgttgaagtctcccatgattattgtgtgcgagtctaagtctctttgtaggtctctaagaacttgctttatgaatctgggtgctcctgtattgggtgcatatatatttaggatagttagttctatttgttgcattgatccctttatcattatgtaatgcccttctttttcttttttgatctttgttggtttaaagtcttttttatcagaggctaagattgccacctctgctttttttttctcccctgcttgccatttgcttagtaaatcttcctccatccctttattttgagcctatgtgtgtctttgcacgagatgggtctcctgaatacagcacaccgatgggtcttgacgcttcatccaatttgccagtctgtgtcttttaattgtggcatttagcccgtttacatttaaggttaatattgttacatgtgaatttgatcctgtcattatgatgctagctggttgttttgcccattagttgatgcagtttcttcatagtgtcaatgttctttacaatttgatatgtttttgcagtggctggtacaggtttttcctttccatatttagtgcttccttcaggagctcttgtaaggtagggctgctggtgacaaaatctctcagcatttgcttttctgtaaaggattttatttatttttcacttatgaagcttagtatggctggatatgaatttctgggttgaaaattattttcttgggccatacgcagtggctctcacctgtaatcccagccttttgggaggccaaggtgggcggaccatgagatccagagtctgagaccagcctggcccatatggtaaaaccccgtctctaataaaaatacaaaaaaattagccaggtgtggtggtgcccacctgtcgtcccagctactcaggaggccgagacagaagaattgcttaaacctggtaggcggaggttgcagtgagccgagatctcaccactgcactccaaacctgggagacagagcaagactgcatccccctccccaacaaaaaaagaaaagataaattctttaagaatgttgaatattggcccccagtctcttttggcttataggatttctgcagagagatctgctgttagcctgatgggcttcccttggtgggtaacccgacctttctctctggctgcccttaacattttttccttcatttcaaccttggtgaatctgatgattatgtgtcttggggttgctcttctcgaggagtatctttgtggtgttctctgtatttcctgaatttgaatgttggcctgtcttgctaggttggggaagttctcttgcatttaatatcctgaagagtattttccaacttggttccatttttccccatcactctcaggtacaccagtcaaacataggttgcttcttttcacacagtcccatatttcttggatgctttgttcattccttttcttttttttttttctctaatcttgtcttcacgctttatttcgttaagttgatcttcaatctctgacatcctttcttctgcttgatcgatttcgctattgatacttgtgtatgcttcacgaagttctcatgctatgtttttcagctcccatcaggtcatttatgttcttctttaaactggttattctagttagcatttcctgtaaccttttatcaaggttcttagcttccttgcattgggttagaacatgcttctttagcttggaggagtttgttattacccaccttctgaagcctgcttctgtcacttcgtcaaactcattctccatccaattttgttcccttgctggtgaggagttgtgatcctttggaagagaagagttattctggttttgggaattttcatcctttttgcactgggttttcctcattttcgtggatttatctacctttggtttttgatgttggtgaccattggatggggtttttgtgtggatgtccttttggttgatgttgatgctattcctttctgtttgttagttttcttcctaacgggcctctctgctgcaggtctttgggagttggctggaggtccactcctgcccctgtttgcctgggtatcaccagcagaggctacagaagagcaaagattgctgcctgctccttcctctggaagcttcatcccagagggcaccccccagatgccagctagagctctcctgtatgatgtgtctgtcaacacctgttgggaggtgtctcccagtcaggaggcacgagcgtcagggacccacttgaggaggcagtctgtccgttagcagagctcgagcactgtgctgggaggtccactgctctcttcagagacagcaggcaggaacatttaagtctgctgaagctgcacccacagccgccctttcccccaggtgctctgtcccagggagatgggagttttatctataagcccctgactgggcctgctgcctttctttcagagatggcctgcccagagaggaggaatctagagaggcagtttgggtacaacgtctttgctgagctgtggtgggctctgcccagtttgaacttcccagtgccttcgtttgcactgtgaagggaaacaggctacttaagcctcattaatggtggacacccctctccccaccaagctcgagcatcccaggtcgacttcagactgctgtgcaggcagtgagaattttaagccagtggatcttagtttgctgggctccatgggtatgggatctgttgagctaggccacttggcaccctggcttcagccccctttccaggggactgaacaactctgtctcactggcattccaggcactactgaggtatgaaaaatctcctgcagctggctcggtgactgcccaaatggctgcccagctttgtgcttgaaaccctgggccctggtggtgtaggcacccaagggaatctcctggtctgtgggttgcaaagaccatgggaaaagcgtagtatctgggccggaatgcaccgttcctcagggcacagtttctcagagcttcccttggctaagggagggagctcccccaccccttgtgattcctgggtgaggcgacaccccaccctgctttggctcgccctccatgggctgcacccgttgtctaaccagctccagtgagatgagctgggtacctcagttggaaatgcagaaatcacccgccttctgcattgatctcactggaagctgcagaccggagcttcctattgagccatcttgccagccaccctagtcatttttaaaaaacatcaagcagtgtgatatttgatgatcgtttttgtatagtagctcatgctactgatgtgtttgtatgatagtctttataatttatcatgaaagcagatctgtttttctgcctgccagaatgttagctgtaattgagtaactcattaatgtacctaattgtatacttatttttacacacttgtggtctttaaatgaatgtgccttttcttgaattctggccaaaaaatgaagcagcttcagtgtctttgacccttctatgcctgacatgaaaacaatgttttgaggttgtcctcccatataccacatggcataaaagattggttttgccatagtctagtgataccaactttatgtatgcattctaatgggaaaagaggggggtgtctgactagtccaagataagaatacaatgcagtgtctgggactgaacttttaaaaaatatatgttcatttttagaaaaagtcattactgtgcttgctgcctgtctggaaagtgagaatcaaaatgctcagaggattggagcagctgccctttgggctctgatttacaattatcagaaggtcagttttaaaaatcattgttacacctggggagcaaacaacaaggtataacccaggtataaactcttaggatacatccaaaggtgtcaagagttacagcaaaagaaaaaagacaaaatcaaagatccatgttccctttgctgattcatacaattagtaaaccatcagttgaaatctttttatttaatcatttcaacagaatgtctcagtttagaagagaatctctgaactgactttttcctcttaatttaaattgatttactttattattgcaattttagtatagattgtttcttctaaaagacgtatcaagggaaaacacatcttaaagtaaaactgagtaacaaaagttttatccaattgtacaattcccctttatctagctcagttcttgtacgactgcagcccaaagcctgctctgagaaaagggcaggcaacgtggagatttgtgttctactctttctctggcctttggacttccactttattgcagacatgttgttcccaagagaaatacccataagtatctagtgattaagtagtagccaagtgacagtgttaggatagacagccatcctagaatggtgttctctcagctgactgtctctgccggggctagttttctccctgctggccagagtcacgtacacaaggacaagagggtgttgttttctttctcacctgggtatccccagagcttagcacaggatttggcactttgtagtcactctgtaaatatttgttgaccaactgctaatatttggtatatgtgatcagaaatctgaggtttgagggagtatgaaaaactgaaaccaaggatgactagtttaaaatagcaaattgagattaggggagaaggagtaaaagagaagggaagaaagaaaatgggaatagagaaagaatcaagttagataagaggatatgggcaagacttcagaatgtgcaaggggattggctcaataggatgtattatgctaagatggaactctctagttatattattatatttcataatattctgtttaatactgtagttagcaatgggcagaattagtgttttgctatcatgatccataacacatggcaagaaacctaattaatggattgttctaggcaaaaacagctttgaaaagcccatcagtaaaaagaagagtggatgaagcatactccttagcaaagaaaagtaagttgcaataagaaagagattatagttaaactcagaagctattaagtggattttctgattaatgagatatttggacaggccacagcaaaatggcattgtaaaatgtgccaatattcagtatgtgctttaattatatcattttttaaaataataaaatagatagatgaaggtttaagatgtgattgcttctaaaaatgcatctgtgatcttcgtcttatttttgtactaaattttctttgccaacagtgaccactgtgctgaagtatgttcttagtgataagaactggcccaattagaattaactgtgagcagaaaacctggatctaacatcagggagctggaggacagtcttccaagaattgatcctgttacccttatatccacgtttccctgtgatgtggtcacaatactagagacggttttcttttcaaagcacattattcatttttagtgacaccaaatttcagtgagcgttattctctgaacattttttatgctaaaacactgaattgtgtctttcctgtactgtaatatatctgttggttatttgtgtttttatagtctgatttttttttttaagcaggggaggttttagtttgttttagctgcgaccatgaatttctggagctagtgaagttaaagattatgctttaggaaggatggtacataaaaaaagattaatggcattcatttggaattatagttaatggtatccattatggggggtactttttaaaaaatactctgggtaagctgttaatttaaaaaaatattgattttgtaacttgtttattttttaaaaaatgcaaaatattctggaatgctattacatcaagaacttagagctttaaattatatataaatcctgttcatatgtatttgtttatgtgtgtgcctcctaagtatagtaccaagtttcataaactagtatttctgtactcttatttttctatctcagctttcccaaactcagaagcaaaccctctaaatgcctattatttgaaatgtcttgaaaacctcgtgcagctccttaattcttcctgagtgccatgggatgctacaccttgaagctgacagtcatcaacaggggagctaaagttgaagccagctgtgtgtagcagctgttacctgaagacgtgctacctctctacaaagtgttgatccccttctttcccatgagagagagaactggtgatactccaacaccgtccagttgtggcagctctccagaagtaatagcagctgacaactttctgtgccttttcctttctgttgaaaaggcatagaaagttctgggaacataaacatttttacccttttctatgccatttattttgtaaaaatcctatttaacagttatttaataaaacaatatttttagaaactaaaaattgactaataattgctgcttacagacttttatcagtctcatgaatattaattttaggagttgaaataagacactgtgtcctggttgtttctctctttttttaaattttaactgatgtaaaatttggctctgtcagtgcaaatccttattttcaaaactttctgttatccagagcatccacactggaaaagggctatgtagaagtaagtgtgcattatttgtaaagggctgtgtggaagtaaatgtacatgatttgtaagtagctttcttaggcaagttttagtgatgttatcttcttcctagatgactcttaaatcattacatgtataatcttcaccgttgtcttctgcaaggctgtgtaataaagaagaaagaaatagagttggggctgtataagcctgggttcaaatttagctcagcccaaaacatcatgaagaatagagtaagactgaaaaatgcagaagatggccgggcttggtggctcatgcttatactttcagctctttgggagaccgaggtaggtggatcacttgaggccaggagtttgagaccagcttgggcaacttggtgaaatcccatctctcctaaaaatacaaaaattagccattcctggtcttgagcgtctataatctcagctactccagtggctgaggcacgagaatctcttcaacctgggaggcagggaggttgcagtgagctgagatcatgccactgcattccagcgtgggtgacaaagcaagactctgtctcaaaaaaaaaaaaaaaaaaaaaaaa

SEQ ID NO: 1252 - DNA, 104416 bp, Homo sapiens
aaatacaggatttcagtacagcgcacaagacgggaacaaaagaggtggtggaaggaagacacccacctttggtttctcacataaagagctcaatactccaaacagtgaatcaacggttgaagttgcagtgtgtgaaaggcaaatggtacagtttaatacccgggggcagggaggtgcttttttaaaattagctttcgcctcttcttcaacccagatctttgtgccttcgtgctaccgataaagttggcggttacacgacaaaacgccgccaggtatttcgccaggtcttccacttttcaagcactagacacacctgaccgccttacagggcccagcgggggcgggtaaggaagaggcccagggcccgagggtcgggaggcagtcagcccagccggagggaagcggaaggtggggagtgggaagaggaggacgctgccccctaggggagccgagtcacaggctgggggccggggcgggaggggctggaggaggcggccggtagcgaggccgcgccgtcgggcggggcggtccctccagctggcttggaccctggcggggcgggctgtgggccgagcggcggagcccaggcgccagcccgtggccgagaagaaaggtggcggtggcggcggcggcgcagcggacgggacggggcggcggctcctcgccctgaccctctgctcccccgcccaggcccgggcgcgaatcggaggctgcggcgaaggaaggagtgagcatggctgagaccccgccgccgcccaccgctggtgccgaaagttgcagcgaggagccggcgaggggcggggagtggcggccggaggagccgcgccgcgctcccgccgggggcacggaccgagagggcgaggcggggccgccgccggcctcccccgccgggcagtcggagcccgactcgccggtggccgcccccttcttcctgctgtaccccggcgatggaggcgccggcttcggagtgcgcccgccgccgcagcagcagcgctcctggaggaccccgccgtcccccggctcaccgctgcccttcctgctgctgagctacccgagcggcggcggcggcagcagcggcagcggcaagcaccgtgagtggcggaggggcatggggacgcccgcggggaagggagcattcggctggggagggccggcccggcccccgcggagctccgcctcccgcggggtgacccgagccgggtggccgggaggcgggggctttaggggctaccctcgggaagctgttctcccgaggcgcccggtgaggaggcagcgggacgaccgcggttcgggcgccggattctacctccgcgtctccccaggccgcggctcctgcctggcctggtctctctcccgtcttgggctgggcgctggtcttcgccggcctcccacgtgcttgggcgggggcgagaagcggcctgcctgcccccctccacccggggcgccctggccctgtcccgggtcccgggctgggaaccttccccgaaggagtctaagagggggcggcgcccggagaccccgtggcccctctgacccgcctttttcgggctcccggcgccgcggcagctgagtaggtgtggctgctgcgccgccgccgccgccagtgcggccttagtaatactagtaactaattttttacgagcgttccttccatgccggtaaatatgacagatccgtcccccggattggaaagagaaatcggagcggtgcatgagaagacaagaagggaatgtgtggctttggaaggctacctcccagggttatatcggttgtcgggaagaggcctccacttttaaagccactggcacacgcgagcgctctgaatgcagctgacccacactccgtgctgtattttttattagtgaactgtttactgtgctggcaaacgagtagggccctagagtcgtcaatgaatataaggactcttagaggaatgttaaatctgattttcaaatacaagctcttacagtatgaaaatgtggctgacgatacaaggcatgctgtaagcgccaaatactttgctgtatgagttctggaaagggagacagaaacttgcctgaagcgatgagggaaggacctttcccaccatacaccctatatttttaaagcacaagtacaaatcttttagctgctctgccctgccaagaaaccctgactcaccttttctgccccgatccatctcctaggaaaagataatatttattgattatttcctatgtgcatgtgttgtgataatcatggttaataagtttgtgtgcgccaaactgaatgccactttttcagatgcggaagctcgatttatcccaagtaacagcttaagagaaggaatgcagttgacccagattgcttttctgctaaacccatgctctttaaatctaacaagagatccaaaactgtgatggtgggtgacaggttaacaggaagggtctatgtgattcagctggaggttgcccagtgttcacacctccttattacttactgagtaataagtcagtgggcagacactgaccattgactgtcttagtgaagccatagtttgtgtgttggagtggtctgcactaatgtgcagatggattgtcagctcatggcagaagtgagtcttcctatacagaggaggcaaagataagaatcttctcaaggagactttgcttttgttttctgaggaatccttctactttgtactttaaacaccgcctctttttttgtttgcaccaaaaatgttttctttctgtgtaatctacatattaagcatgctactatagaaagaagactgtcatttctctgtaacagttatggtacaaggtttgatgtagaggaacttttcaactattgaacagtatcaattgtgggaattacctgaatttcagttgactggactccctcattgttaaaggttatctttatgttattaattattgtagaaaataacagtattttgttactcttatcagttaatactgttgcttaagcatgatcaagatcgggactagaggacttaaagctaaagtttcatgagcgtgatctcagtctctaccttaggatactagcaaatgtatggtgtttttttgtttttgagacggagtctcgctctgtcgcccaggctggagtgcagtggcatgacctctgctcactgcaacctccgcctcccgatttcaaacgattctcctgcctcagcctcctgagtagctgggattacaggcacctaccatttttagtatttttagtagagacgaggtttcaccatgttggccaggctgttatcgaactcctgacctcaaatgatccacttacctcagcctcccaaagtgctgggattacaggggtgagccgccgtgcccaggcggtatggtgttttttgttaccacgtaagttctaatatttcctcatggtctttatttttgaaatagtttattgatgtgtatgtgttcagaaaagttactgggaatatatacgtgtcccacttcctctgcttttaaagattagtcactgagaacatttcatattagcaaaaaaaaaaaaatcactattacatgttttatttaaatataaaattgattcaaaatagttttttgttttggactgagtttttgtttttacctgttacatttatatgtgctttagaacgtaagcatacttacagaaaggaacactctagatatgaataaaaagttccttgttaccctgcagagtcaatggaatattgctttctgtaatgtatctggatatcagaactttgattctcttgactactcatttaagaaattagagaccaggccaggtgctggtggctcacacctgtaatcccagccctttgggagactaaggtgaaggatcacttgagtccagaagttcagggctgcagtaagctgtgactgcaccattgcactcctgcctgagcaacagaacgaaaccctgtttttaaaaaaataaaaataaaatacatgaacacttgagaccaaacagtttttgtttttttattttgtgtttttgagacagtctcactctgtgctcaggctagagtgcagcagtacaatctgggctgactgcaacctcttccttccaggttcaagagattctcctgcctcagcctcccaagtagttgggattacaggtgcgcaccaccaccccagctatttttttttttgtattttagtagagaccatgttggccaggctgctctcgaactagactcaagtgatccaccctcctcggcctcacaagtgatgggattacaggtgtaagccaccacacctggccccaaacagtttttaaaagacttcttaattacgagaatggtacatggactcaacctcaatgcctagtgaatattacgatgactggcatctgcctctttagcaacccaatttttaactctcagtaatgtatttgctaaaagtatataaaatattatagctttgaaagactgtgtattaaggtggtattatctttttattttagaaatcttgagtgtacttagaggttttaaaaattaaattttacatttgagttcagaagctctgtttttaaataacagtgctgaagaatagcaaaaatgtgtgagactggaacggtggctcaagcctgcaatcccagcactttgggaggcctaggcaggagtatcacttgagcccaggaattggagaccagcctgtacataagcagactctgtctctacaaaaaaaaaattttttaaattaaaaataagttagctgggtatggtggcacatgcctctggtgccaactactcaggagtctgaggtgggaggatggcatgagtctgggaagttgaggatgcagtgagtcgtgatcacaccactgtattccagtcatggtaatagagcgagatgctgtttcaaaaaaaagtttgtaaatagaaggtagcctaaacttttcagggtttgtcacatgaattgttttgttccaaaatcttgcaggatataatatccatgaaatcaatctgcttcaatgcagtgtgaaaggagacttctgatgtgccttgttgaggattatgtctctttctgagtctttgagtgctggtaatctgctaggtttttatacttctaactttaaatctcataaaactctctgccatgccttttaaaatttgattttataaatgtacaagtaatacatgaatctatgctcattgtttaaatgtttcataatacataagtacagttacaaagtgaactttcctctttgtggacctccagcaccctctccccggttccttattggaggatgcccacttttgagtttggggagttttcatcctgaactttttcatgcatttacagacatgtatgtttttatatttcgtggtggctttatcctcttggtgtatgtatgaccttccatgccagtttctcagcaactacaatttgtaaggaggatctgcttgcaggccatggtgtaatacttttaatgctttccttttccatcctgccgttagagatcgtcttgtgaatggacaggatagacaaaagatggcttccctttagtgttggttggaagagtcaccctgctgtttgcacagttaacagcttctatttagttattcttttctccttccaactcccacaactacggcaaacattgttcaaggcaatgctatgcaaatagcccacatccttgcccttgtcttttctctcccagttaaggcagtgtccaaaaaagtgtcccactcaccaagtagcagctttctgtatttttaagtgctgttttgagataggaggaaggctagaagaggaatagaagaaaaagaatcttgaaaaggactggcagcgttactatgactacccactacaaagttgagtatacttaacagcgagtgccatgattaagccccggatagtgcagagaatgaggtacctagaagcctttgtctctgacagatgcacttgaaaaatccattgtatggggaaggaggttcgaaatatacatgtaaacccaggaattagtgtttaaggggagaaaatttatgcttgcagtttcattaacatatatacacacacaagtatacagatatgtatatatcatatatattgcatgcatgcatgtatgtatgtgtagattgtatatgtgtttgtgtaaaatatatatattttagtttttcctctgtggacatttctgttattgtctctcttcttttttaattgtttagtagtactctagaaaacagtaaaggtcgggtgcggtggctcacgcctgtaatcccatcactttgggaggccaaggcaggcggatcacctgaggtcgggagttcgagaccaacctgaccaacatggagaaaccctgtctctactaaaaatacaaaattagctgggcatggtgacgcacacctgtgatcccagctactcaggagtttgaggcaggagaatcacttgaacccgggaggtagaggttgtggtgagccgagattgcgccattgtactccagcctgggcaacaagagtgaaactccatctcaaaaaacaaaaaaaaagaaaaagaaaacagtatacctggtcaggaattgaacacatgttttttgttttatttattaaaatttttaatttatataaagagatatgtcaatgggccaggcatggtggctcatgcctgtaatcccagcactttgggaggccaaggcaggcggatcacttgaggtcaggagttcaagaccagcctggccaacatggtgaaaccccgtctctactaaaaatacaaaaaaattagccaggtatggtagtgcacgcctgtaatcccagctactggggaagctgaggcaggagaaccgcttgaacccaggaggcagaggttacagtgagccaagatccgccactacactccagcctgggccacagagcaagactccgtctggaaaaaaaaaaaaaaaaaaaaaaaaaaagaagtatgtcaaagaagagccaaagtgaaaataaacaatttttttaaaaaagagatgaggtctcactgtgttgcccaggctggtcttggactcctgggctcaggtgatcctcctgcctcggccttccaaagtgctgggattacaggcatgaaccaccatgtccggcctcaagcacgtgttaatcagttcacctgctgtatgcttctttaaactttgaaaaggcaaaagtactttattgtgttttgtaaacatagaggcgtctgcccaggctggaacatatgagggaaatggtcaaactttcagaaccccaaaagattgggcatggttaccttcatactagtagttttggaaacagcagagtgatgtgtgactttttaaaacacagattttcggtattttcaatgtagatcagtgtcctcatttaccattctgtgattcataaatctgttagccctctgctcttttccaaccctgttaagaaggcagagagccattttctgatccattaagtgccttttgtcaaatagtagataaaaagcacccacccacatacaaacctcagaaatgtagcatctttccaaggatgtgtaactgccagagatctggagtttaggtgttcagtgtcttggtgcagttggctccttccacacacagctgacatgaccttggacctcctgagctactgagggacaggtagctgggtcatgcccccgtttccttcctcacgactaaacactctgcttgccttcctgattctgcctttgtgagcagggctccctgaactctcacagtttgtcttcccagccaattctccccttcttttctgccaccacctttttgttgcacctattcttctggcctggcattatcaaaaagtcaaatcacgctttttattgacagaacaacaatttcagaatatcagatgtaatctttgagtctttctttggttgctccccttctgataatcatagactcattctttgtagacagagttttcttttttcttcccatcttagttttattctggacactagagagtcctaaaaggctcttcattatataacaatttttttttgtagttctgaaacccaaacaattaccaataaaagatgtgactgtaagataatactactactagtggccaccatttgtgggatatttttgtgtgccgtgcagagagctagaaacttcacatgtaatagtacttagcacttttttgaactgaagccagggaatgaattcatattcctcaatagtcagccttcaaagcgcatgttcttaatcactgtacgttccctcaccaccaaggtcttaaagaagctggtttgagtggagagcagtaaaggttgctgggtaggagggatagcagaggaaaggtggcaaagaaagcaactttggggactaaaagacaagtattggcctcaaaacatattcacttgactatattctgtcttgtatcttttcccttttttaaaatttttcatagaaatctacatgtttaagaggtaggattttatcaagaagctaagagaccatatttttctagtatgggctatagatagtaaaaagtctagatgtatgatgatggaagtgtagcagaataaactggatgaaataatttttttgttggcaatatttttcaaaattccttaaataattaaaagaactaactaaaaaatgggctgcccctttatcattgcacaataggcaacctgtagccaacataaataaaagtagaatcccatttttgatgaattttacaggacatcacacctattacatgtctactcaatccttactaattttgaaacacactccctactttgtgaagtggctcaggttatgagctgtagaatttgttgtgggaagtcagtagcacaccgtaagcattaaaaaattggtttgaaattgtgtgaaaggaaatttttttttgttttgtttgcttttttgagatggagtttcacttttgttgcccagtttggagtgcgatggggcaatcttgcctcacagcaacctctgcttcccgggtttagctgattctcctgcctcagtctcctgagtagcagggactatgggcatgcaccaccacacccacctaatttttgtattttagtagagacggggttttgccatgttggccaggctggtcttgaattcctgacctcaagggatccgcccgccccaacctcccaaagtgttgggattacaggcgtgagccaccatgcctggccaggaaatgtttttagagttacaaagcaaagcagtggtacttgagaaggtaagtagcaatatggccatgccccctactgtatttgaataattgtgaaaaggttcatagtctccctaaaacttctcaaggctgctggccaaggtggcattccctctctttgcaaagccttttttatctgacatgctccctaccgaccggacaagatactcagctttgtcagagggagtggtggggcgggggtgggaaagtttggaagaaaggtgtgggaaccttatgatgtgtaggaaaggagagcctggcaggccaagacagcaaaaagcaggtggaaagctgaagtcgttgtagcatgtcgccttttagagtgtgattcttctaacttcagagtctgtttagggactctccacagacatttatctacttctgctgtcttttttatgaacttaggaaatctgatcacttgaggtgagaatgcttggtaaaattctgacccatctctcttccttcctcaaaatctgagagataccactgtaaccctctgctcacatctcctttttactttcctttgcctctgtcccataaacgtttatccttactgactttcattttatgtgttgatagggtttttccagaactctcaaaggagaagcacttatcatagtgcagttatggtgacatttacttactgcttactttgtgccaagtgccatgctaagcatttaactccgaaatggttaatattattatccccattttgttaatgtagaaatgggcacagagaagtaacttgccaaggttactcagcagctaggtggtggacctaggattcactgtgagcatgctgactccagagtccacatgctatgtcacactctttcatcacctcccgtaactggaatcaggtcctagattagaggcacgtcttcaggcaaccagccctctggttccatattctactcactaatgccctatttactaaaaatgagtaaattaatgaaactcaagagtcaccaatctgatagaaaaaatggttgtatatgtaaaaaacgctgaataggtccatttataacagacattaagactttcctaaacacctaaaattgtctgtttcttgtctattgccttgttctttcttctgcatccctagcatatgggaggtaccctgtacatgttgagtgaatgaatctgttatgtacatgtaatgaagccagtgttagactgacctgtttgttggggcataaatatggtttgattttatagaatttgggggttttcacaattgaagtgaaacatgagggtggaaaaatgccattgcaaggctatatacatatctataccagcaagtatctattgagagtctggtatttggtaggtactattttgagtagatacgtaagaggtatgcaaaatgcatatttctttggtggagcttctggtctttgtggagctagttatttagtttcattttacaactgagtaaattgaggcaagaggaggataaatttcccaaggtcacctactaagtttttgatagctttacgtctgtgtaaattattgcctacagccactgagccatgaaatcagttttacttttcagggtagaggttatttttaatcttatgctggttaattttaacaagtgaaaagatgatgcattataatactcctggtagtgtttgtttctaacaaagtaatgataaatcaactttctgagtatatcagtttatagttgttgtcaactttggttaatatctataaagtgacactgagcctatgaagtgtataaacttaaaattgaagaaatcttggaatcagaggtagacataatagattgtggttctgggaaaggaggtgggagggtgtactggagcatgtgaaataatcatgatcattgagttgaataatcatataatttaacagaaacatctgggctttccaccaatgtcatcatgatgatgattcatcaaagataccctttcatggctggatgcggtggctcatgcctgtaatcccccagcactttgggaggccgaggcacgtggatctctcgaggtcaggagttcaagaccaggctggccaacatggcgaaaccctgtctctactaaaaaaacaaaagttagccaggtccggtggtgtgtgcccataatcccagctacttgggagtctgaggcagtgaggcagaagaatcgcttgaacccgggaggcagaggttgcagtgagccgagatcgtgccactgcaccctaacccgggtgagagtaacactatctccaaaaaaaaaaaaaaaaaaaaaaaaagctaccctttcatgctaacagcaactagtgaaatagggggaaaatgagatttttcttcttaaattatgaaactgtgattcaggaagctgccaaacagaactttgtgagctttacaaatttagttgcacaacttgacaaattttaggaagaagtttctattctgcattatgaaaatcagaaataacccagatgcctaccaacatgaaaatgaatcagaagaccaggcacagtggccaatgcctgtaatcccagcactttgggaggccaaggcgggcagatcacgaggtcaggagatcaagaccatcctggctaacctggtgaaaccccatctgtactaaaaatataaaaaattagccaggcatgaatggcatacacctgtagtcccagctacttgggaggctgaggcaggagaatcacttgaacccggcaggtggaggttgcaatgagccgagatcgtgccactgcactccagcctgggtgacagagtgagactccatctcaaaaaaaaaaaagaaaataaatcagaatgtgtttttgttattgtttttttgagacggagtctctctctcttgcccaggctggagtgtggtggcatgacgtcggctcactgtaacctccgcctcctggcttcaagcaattctcctgcttcagtcccctgagtagctgggattacaggcacgtaccacattgcctggctaatttttgtatttttactagagacggggtttcaccatgttggccaggcaggacttgatctcctgacctcaagtggtccacctgcctcagcctcccgaagtgctgggattacagacgtgagccgccgcgccctgccgaatcagaaattttttgtacatgcattggaacactaccttgtaatacagcagccaaaaggataaactacatatgcacactacggtttggatgaatcttagaaaatacagcattgaaggccaggtgcggtggctcatgcctgtaattccagcactttaggaggccgagatgggcagatcacctgagttcaggaattcaagaccagcctggccaagatggtgaaaccccatctctactaaaaatacaaaaattagctgggcatggtggcaggtgcctgtaatcccagctactcgggagtctgagacaggagaattgcttgaacctgggaggggacaggttgcagtgagccaagatcatgccactgcactccagcctgtatgacaagaacaaaactctgtctcaaaaaaaaaaaaaaaagaaaagaaaagaaaaaatacgcattgagtgaaaggcttagaaagttttatagagcatgaaacactttctataagaaagttgaaaaaaactgaaactaaacatattgcttagaccttcatatatttgtgacaatatttttgaaataagataatgatttacacgaaattcagaaggttaccttgaaatgagaggcaggagtttagaagcaagaaggagcacataagtacatatgttggtccatttctccagttgagcaagggtttcagggatattggttatattctttaaggacttaaaattatacattaagtttgctatttttaaaaagcgtacaatgcatcattttagaaagtgattccccccttcatttatctttttctattttggaatttatcaggtgttcttaatgtgtccaactagtatgtaaatgtggagggaactcagagacagagtggtagtagggtgaaccaagtacatagtggaagcattttatctaccctttgtgagcccatgacagaaaagtccatactgggttctcagtttgtcagaatgtgcccacttactaaaagcctgaacttaatatgtaagttggggggcctagaggaaggtatgggttgtgcagcattaaggtgtaaagtatggaggctgataaaaaaaatttcttcaaatcttaaatttgttgaaactcatctttaggaaatttcatgaagagactttgcgtgtgtgtgtgtgtgtttgtgtgtgtgtgttttaaatgtctttttattttctctgaataaaatttaacatccggggatgaggaagagttaggatagagtgctgaagttgcagagtgtagaaggaacatggactttggaggtatctagacagaagtagcttggagtaacagatctgctactcgctaattgtgtgattctgggccagttacgtggctgaactttggtttcattgtgtataaagagaaggtatcaatctctgttttgcagtgcttttgtgaagacttgacatggtatttttttttttttttttttttttttttgagacagagtcttacactgttgcccaggctggagtgcagtggcgcgatcttggcttactgcaacctccgcctcccgggttcacgccattctcctgcctcagcctcctgagtagctgggattacaggcacccaccaccatgcccagctaatttttttgtatttttagtagagacggggtttcaccgtgttagccaggatggtctcaatctcctgacctcgtgatctacctgcctcggcctcccaaagtgctgggattacaggcgtgagccaccgcacccagccctttacatggcatttgtaaagcacctaacagaaaatagaaatttaataaatgatagctattttaggtaatttttccacaatatataacagagacattgagcctgtcaagttaacctttgtcttatagtagcagccgagtacaaatatcctttaagaggaatgtaacttctgactttgaagtgtgactcttatttgctttgaatccatcataatgtggaaaatacagactgtttaagcagctagaacgtagtattttttggatcttcattttggatttgaacttcacacaggcctattcttttagggccacagactgaactcccacccgcctcacaaccatcttacaaataggtgccattactcacaaatgggatcaaatgagaaaatagttcaatacagctcatacagtaattactctgtatgtgagaaaaaaaatcaaggtttgaatatcttactgatggcttaactttaacttcatattcaaagctaagatgtttacttagtaaagaccaaaatgtaaaaacggtactaagcaatatctaaaatcttttttttttttctttgagacggagtttcacaggctggagtgcagtggtgcaatctcacctcactgcaacccccgcctcccaggttcaagcgattctcctgcctcagcctccagagtagcagattacaggcatgtgccaccacgcccagctaattttgtatttttagtaaagatggcgtttctccatgttggtcaggctggtcttgaactcccgacttcaggtgacccgcctgcctcagcctcccacagtactgggatgacaggcatgagccaccgtgcccggccgtagaattgtttttataagtttctacaaatagcactgttttcatagtaacttctttgcctgtgaacaatggataactgttcgtgctgaagactcaatggtgtttacctaaagaacagcgtagaagtacagtttttcttgcccacccccgggtcttatttctgaaatggctgccaacacctcaaactggtagatctgggaaattcaaggataccaatacaggcatgtttttctttccttgccaaaaactttagttgttttgggcttgcctctctgtgtcctctacctggagagaggcagggtgggatggatcttccgaaggaatgttaatcaagtttcttgctcactaaccttgatgttcctgttgtgttggtatgttgcaatcaatctagatctgttcaagttagtaaatgcttactggggtgaagagattgttgtggtttgtgacaaggccaaattcaggttttggaccccagacaatcacatggcattcggatttattcatgtattccttgttctgttttaagaacatatcagtgatctagagttttgatatcacacatacagatagctagggctgtttggagttgtggttccaggaatgtcccatgtaatttgaaggttttaatgactacttactatgttttgaagtattgcatgatataaagtgaatctataaactgtccccttattaatatataatatgggaatatttttggctagaaaggaattgaactgaattaaatgagaatgtgttaaatgaaggcttgtgttcagtatttggatatgaaaattctgtttcctggaaaaggtgtttctgtcttactgctgcgtgcctagtgcctggatcactacctggcatgtggagcacctcttagtgaatatctgttgaatgaatgaatgaatgaatggctctgagtctagatgtagggtaatgatgagagagaatgagatagaaataaaaccaggagtattttgctttccttagtaacttactgattttccccaattataaataagcctatatatatgccttcttacattgtaccagtataccctccttcttttttttattttgagacagggtagagtgcagtggtatgatctcggctcactgcagcctctgcctcctggcctcacgtgattcttccacctcagtctcccaagtagctaggaccacatgtgcgcgcaaccataccttgctaatttttgtttttgtagagatggagttttgccatgttgcccaggctggtttcaaactcctgagctcaagccattcacctgcctcagcctcccaaagtgctgggattacaggcacatgccaccacatctgactaatttttgtatttttagtagagatgaggtttcaccatgttggccaggctggtctcgaactcctgacctcaggtgatttgcccgccttggcctcccaaagtgctggtattataggcatgagccaccgcgcccagccatccgccctgtcttcgtaacaatatgaaaatgccagtttctctacagaatttgattattagcatttttttctttcagttcagtctcaaattatgatgaagcatttgagattttaacaatattcaaggagaatttttttagttttcagaaattaggtaaatcaagatgtccctctgataacaatccctagaaaggaatagtctcaggtcatatttcttgaatttgtatgttcctccttaaaattggaacccttcaatacaaaaacaaacaaacactttctttcaattgtccaaaacattttcaaagaaaattcttattcttctctttgtaatttatgtagttcataaagcaagtacctgcccttttgctaccaaggtataaatgcctcattggataatatagggccgtgtgtgtgtgtgtgtgtgtgtgtgtgtgtgtgtgtgtgtgtgtgtattaagaaaatataattgtcttcagtatcttatcgaatgggaggattttaaaaatataacatggtttaatctgcttagaaacatatttcatgcttaaggctgggcatggtggctcacgcctgtaatcccagcactttgggaggctgaggtgggaggatcatgaggtcagaagttcaagaccagcctggccaagatggtgaaaccccgtctctactaaaaatacaaaaattagctgggcgtggtggtgggtgcctgtaatcccagctactcgggaggctgaggcagagaattgcttggacctgggagctgagatcacgccactgcactccagcctgggctacagagcaagactctgtctcaaaaaagaaaaaagaaaaaaaaagaaacgtattttatgcttaatacagaaacttgataaatacaacaaaatcaaaaaggggggaaattgccattaattgggaaagattttacttttttaacttgaagttttttttttgcatttctgcctaacctaaaaggtcaggtttttgtaccttggagaaggaaattataaatgcccaagaataagatatttaaattgaaaatctactttagcttttctttttatctttttgttttttttccctctgagaacctcaattttttatgctttagcttttcttaaaacataacatttagcatagtaaagaattttaatagctatgtagataagaatgaaagaggtgaattatatgcttgttaaattaatctaactgcctcttttaccatctttactatagattattatccggtattaattgtcatccttttattcagtccttgatcccaaagtaagaagaattgatgaggatatgtgcattgtgttatgtctgatcacagtttgactagcacagtctggaagtgggttgtacaggatgagagagagaagcctaattgctctcccagcatcagcagcatctataaagcatcctgggaattgcttgccctacgttcagagcagctggtcacatgagcctgaattttcagttcagttcattagtcagccattttggtcaacaccctgcttactgcgcacggccaatcctatgagaactcagcatcccagctcatctgagcagatcctggaagtgatttctgcagctcaggattttttttttaagctacattgaaaatataggtttattttttgttcaggtttttcttttatattttttttctgcacaaaggaggaggatttttcacttactcatatcgaggccagatttttaaagccagctaaggcagcatcagctgtgcgggatttaaagcctatagctcagctgaaaaaaaaggtggggggcagggaagggaagataaaaggagaggaagctgggagaagacaagcatcatcttattttgctatgtggtaggaactgtctataagatagtgtagaattgtttatcttgagcagtttgttcttaacctataaggtatttttccttttttttttttttaaacctcccccacccttttcctgaaagctttgtttcagagctttgtattgggtttttttggtgaggaggttgtatttatttttttggtgtgtgtgtgtgagtgtgtgtgtgtctgtgtgtgtgttgtggtcccagctgagtcatcatgtctgctctgacgcctccgaccgatatgccaacccccaccactgacaagatcacacaggctgccatggagaccatctacctttgcaaattccgagtgtccatggatggagaatggctctgcctgcgagagctggatgacatctcacttacacctgacccagagcctacccatgaaggtatggtcagatcctgtccgctagtatttcaccagcatcctcattgttatgggggagggctgggaggatcagggagaggtagaaagaacctacactctcaactgttaacagtcctgaaaaccttgcatccttacttaccacccagctccccttctcttgctcatgggggaaagataattttttttcttgcccctttaggtatcctttcaaaagatgctggatactcgtttagagttctttgtctttaagcctctaaataaaacatttgaggtcacttatcacatctgattctattcaataatgagaaagctattaattttgttcatatatgaaaatgttatagaaattgtagtgatttataacactaagttaagacaacatgactataattataggattgtacatgatgaatacagtagaaacaccagggtatttggtaatggtatcctcaccattatatgaggatacaattttaagcaagttatgacatctaggaaatgtttgataaaacatttttttaacaatatggattattaggttagatgagaaaataacttttcagcatttatttattgaatatggactcctaagaaagcataatgcctggaaaggttaaatatgattaatatggcatccctatagattacaatagaatggtaatattggaatctattggccattgctttttataaattatttgtggtaactattatgatccatttgagatttccactgtcagtacctctgagatctttgtggtctcttgacttgcgacttttttccaggactcttgctaatttatgagaggttttctgcttctaccctttaattctcttaataccacagaaagagagctgatttgaatcatagctacaaatcgttttgtttttaatacagttgcttcttagctaaggtttattctctgtccttatactgatgaaaaaaaacaaaaaacgcttgcatatgaggagaaattctttataaacatctgcctgatagttaggcacatcgacaggacaaagaagaccataggtgaattgtacctagcagatggggttaggaaaggtgattctctgcctttgaccttgagttgaaatcttatcatgactcagaattttcccattgtgtttgataagcattttatcttcccagtcagccttagccttgagaaagttttagggatggttaataacacagaacacaaagcagtcattttgggtgtgtctttaagaacaatgtttaagtggtttttaagaccctttgcatcttttaacaattggtttgttaattagacagctttctttggctgtatgtttcgttatgtgcacaagttataagacatcagctgaaattccatgcaatgccagtactatttattttttattattattttattctatattttcatcaaaacatcgttacatccaacaattccagtactacttaaaacagcctccaaagctttaaaagtctttagggaagaaaaatacagttttagaaggctaccaagaagtcttctggcaactgcctcagtttacatattttgtttgaaaaaaatgtattcccgtccaatttgagagttatacaatatgaaatattccctttatcatgaaatctagtttaccagtgtctcaaaaataatttttaacaattttaacacctcaaatatatgtttttggagcaggattcctatggataagcaaaagtgagctgtttggttcatgtaagcgtttttagcagcgccatttgaattcttcatagagaaatctgtagcaacacatttctcagtatggaaaatgtgtgagagctataatctaagtaataaattgtatgtctgctgattaaagaaatcagataaatacagagtttccaagacctgtaatcaactatagaggatttggaagaaaatagagaaatgccgacagtgcattttagaattttgccttaaattgggcaagaaagctattattttaaattactagaaatgaaaataaagaaagcatagtcccatgaaagcctgtgagtattactgccttgctccattaccaaactctggatatttaaacagtcatttggtcccaagaaatacccacttttatgttaataccactgatagttattagatttaatttagctataagcatttaagtggtggtcaccaggcccatgattatgtgaatctcaccttgttcacaaaatggaactcctgatgtctggacgcgggagtattcagactgctttccgggctgattcacagagggaaaaacatctgaccacccaaatcctagagtgaagtctcctcactcccacaaaagaaaataggcaaacagcataatgttccctcttaaaatgatgtagactgactgtgtgtactcagcaatagaggctctgtggcttccatattttattttcttaaaaccagagttcctggcccttcactgagcagtccgcagtataggcctggacctagagtttctgcctactttaacccttaaataaatgaaaataaaagcattcacttcattatctcaatgcttattggtggtcaatgagggattatctctcttttgtcttatatactcttttttttttttttgagacagagttttgttcttattgcccaggctggagtgcaatggcgcaatcttggctcactgaaaactctgcctaccgggttcaagcgattctcctgcctcagcctcccaaatagctgggattacaggcatgcgccaccacacccagctaatttttgtatttttagtagagacggggtttttgcatgttgatcaggctggtctcgaactcccaacctcaggtgatacaccctccttgacctcccaaagtgctgggattacaggtgtgagccaccatgcccggcttatatactcttattttcaaaagccaacagcaaatctacaacaagtttaattgcaaatagatttcccctaaaggcaagagcctgtgattgactccacaggagaagggtcaggagaggcttcattaagtgagaccttaagagataaacaggtgatcaccagaccgacatagggagggcatttcaaacagtacacagtgagctggcccagccagggaatagcaacaggagcacagagggcttctgtttggcacaacagggagcaagactggaaagataagcaggggcttgactgtagaaatcttattcatactgaaaagcctgcacttgattctgtagtgaaaagctactggtgctttatgtctgggagtaacataaaataagatttgtgtttggaatgatcactctggcaacagtgtagtgaatggatcagaaggatataagctctcagggacccctaactataacttttaaaatggtctgggtaagagatgacaatctcacattaaggtagcaagagtgaacaccaaaggaacaatccctggaaaagcagaatgtacccgatgactgaggggctgggtggctggagaatgaacataaggcagtgcctgggatgactctccaacttctggctgcagaagctaggttccctttaccagtagggaatatagaaggaagagaacatttgagttgttgatgcttaatagattgtgactaacaaaagcactaccatcactcttttttttcttttttttgagacagtttcgctcttattgcccaggctggagtgcaatggcgctatctcagttcactgcaacctccacctcccaggttcaagcaattctccttaactcagactctccagactccccaagtagctgggattacaggcatgcgccaccacgcccagctaattttgtatttttagcagagacagggtttctccatgttggtcaggctggtctcgaactcccgacctcaggtgatcgcccgcctcagcttcccagagtgctgggattacaggcgtgagccaccgtgccccgcccattactctttcagttgagccttctacccgccccacagaagcattaatcagatttatacttttccagattacatatcctggcttaagtctgtaccctaatttacattaagagttggaatcctcacatggaaaggcgggggtgaagataaaaggagtgagacttaaatggacattcagagatgtgagaatgtggcttactttcttactttgcttgtgccatgtcagtgctagaggagcagccttgtttatagaaaattcattttgcattttcttaatttagggaaacatgtaccaccattgaaataacctctcagacttttgtttgtttgtttgttttactttgtgaaagcgtagtgggatttctttccttttttttttttttttttttaaccgaagcaatgttggaagtaagtggaatttcaaagtaaaggaacttttaaagcaccatgaaaattttagagaacatgtgttctctgtttttttcaagaatggaagcagaacgcttcagttagacctttaagcatcattatattaatttcagaaatggtgttattactgagatgaagtggtatattttatttttgcgattttttttaagtcacatgctcatatgtatctgaatttcttggagtaacattctcaaaacaagttacatataattctaggatcaggaaagtaataactttttttttttttttttttgagacagagtctcactctgttgcccaggctggagtgcagtggcgagttcccagctcgctgaaacctctgcctcccaggttcaagcgactctcctgcctcagcctccctagtaactgggattacaggcagacgccaccacgcctgggtaatttttgtatttttagtagagacggggtttcaccatgttggccaggctggtcttgaactcctgacctcaggcgatccacccaccttgccctcccaaagtgctgggattacaaaaaattagctgggcgtggtggcgggtgcctgtaatcccagctactcgggaggctgaggcaggagaatcgcttgaacccaggaggcaggggttgcggtgagccgagatcgtgccactgcactccagcctgggcaacaagagagaaactctgtctcaaaaaaaaaaaaaaagatttttttaaagaaattcaccaatacatgttatgtatacgcatgtccacatacgtgaagggcagggatagtattaccttcagtattattgagtgtttaacaacaaaaccaactatagctatgactcagtttataacacgtttacccttaataagtttacctaattagaaatgtatatgttaataaaaatttttacactttaaagaggatttttaaagaatgaaatcctgactcatttgttgtctcaagtgactacagataccccttgaattaagatggggttatgtcctgagaaactcatcctaagttgaaaataccataaaatgaaaattcacttaacacacctactctactgaacttaatagcttaagtagcttagcctctcttgccttaaacatgcttagaagacttaaattagccaacagttgcgcaaaatcatctggcagcacagtaccctgtagcgtattggttgtttaccctgatctgtggctgatcgtgtggctgactaggatggtgtggctgactgggagctgcggcttgctgccgctgcgcagcatcgtgagagaggatcacctggcgtattgctagctcgggaaaaaatcaaaattcaaaatttgaagtagggtttctactgaacacatatcactttctcatcgttgtaaagttgaaatatcggaagttgaaccctcataagccagggactgtctgtgaattgaaattagcctaaaagacagcagtagtatcatatttcaaaaaagaaaatgttattttgcatatactgcctttactctgtaaagtgtttcagacagatttttttaaaatataatttgtgatctaagtccaattccttgttcttaaactaaatgtccagcttttggtctattttcttttttcttccacattcctactctctgttatcatttttcggatatttatatggtttgagtggcaggcaagttaaaaatcgcaatttaaaataatttttgtgtgcttttcaaagtgaagctaagttggatttttttaaataagacttttttccgattacaaaaggaaatttgttgtggagatttggatatttctttttttttttttttaaatgaggccttgagatttggaaatttctaagtagaattttgacacagaattcaaaatgactgaagaaatctgctggatacctaatgagtctctttagagttgggtggataaattagtcaatggaaaactttattgctgtcaatatggggtatatttgagaacagtaaaggaattagtacaataatggggttgatttggcaattcgtgttttagctactgtgatggtcattaatttagagataatataggatagtggttaaaagtatggattttgtggcttggacctggacctggattcagttccttacccagtactcagtagtcatgtgacgttgcacaagtgatcacttcatgcttgagtttttttgtttttttttgagacagagtctcacagtgtcacctggactggagtgcaatggcacgatctcagctcactgcaacctccacctcctgagttcacacaattctcctgcctcagcctcctgagtagctgggattacaggcgcataccaccacacccagctaattttttgtatttttagtagagacgaggtttccccatgttggccaggctggtctcgaactcctgacctcaagtgatctgcccacctctgtctcccaaagtgctaggattatagatgtgagccatcatgcttgagtttttctctcctcttaactgggaatattaacggtaactacttcagaggttaggaggattaaatgagatacttaatgtaaagcaccctataaatggtagctatttatattagtagttattcatgaagcagtagctgaagccacagcagtttaagccggattcttcaatacattgccattttattttatatttctatttttatatctatctttatagagtagtctgaacaagttatttatcagactaaagatgaacattagtagtagcttaaactcaagttttagcattgtcctttcttggacctctataaataagaaaataattgattaaaaatccacaagttatcagttatccaggaatatgcatttttgtttctttcgttttttttttttttttgagatggagtctcgctcttgtcacccaggctggaacacagtggcgcaatcttggttcactacaacccctgcctccccagttcaagcgattctcctgcctcagcctcccaaatagctgggattacaggcacccaccaccatttctggctaatttctgtatttttagtagagacaggttttcaccatgttggccaggctagtcttgaactccttgaacctgcctcggcctcccaaagtgctgggattacaagcgtgagccactgcacccagccaaaatatgtgcttttctattaaccttcttttagggataaggagtctgacattgagaggtgatgcacagatgatcagttgaatgcaataaaatatacatctggcctgattagttactttccgctaggaattatttactccaagtgttaaaaatgtattctctcatttaatttttacaacaaccttttgagcctaggtacaactattacccccaatttacaaataaactgacatttggccaggcgcggtggctcacacttgtaatcccagcactttgggaggctgaggcgggtggatcacctgaggtcaggagttcaagactagcctggccaacatggtgtactaaaaatacaaaaaaaaaaaaaaagattagctgggcgtggtggcaggtgcctgtaatcccaactacttgggagactgaggcaggagaatcacttgaacctgggagacagaggttgcagtgagccgagattgcaccaccgcactcactccagcctgggcgacaagagtgaaactccatctcaaaaattaaaaaaagtaaaataagctgacattcaagggtgtaataaccggtagaggcaggattcaaactcagactaccaatggttcaacccatacacaacactcctgtcccagaattctagagtgtaagtccaacaataggcctgcgtgtaataagaggagtcttcttcccagtctctgatgacatatttgcagaagttttatacacaattgaacacagcattggcagcttaagtacagtcagcatgcagataaggccaaaagcatcccagctgggacatgcttggtgattgccatctttttttttttttttttgagacggagtctcgctcttgtccaggctggagtgcagctgcgcgatttcggctcactgcaacctccgcctcctgggttcaaacaattctcctgccttaggctcctgagtagctgggattacaggtgcccgccaccatgcccggctaatttttgtactttagtaaagaaggggtttcatcatgttggcctaggcttgtcttgaactcttgacctcaggtgatctgtccaccttggcctcccaaagtgctgggattacaggcgtgagccaccaagcctggccagtgattgccatcttttaaagtggagactgagttttttgtccacatgttttctttttcctcttttcactcacttttataaagtaaatgaaaatatttacataatcgtgcatatactaccaaacagcaaaaatagtacactgctgaaactgacctggctggcaagtgacacctctatatgctaaatttagctttctgaagcagatgtacaaaagcaataagaaaagcagttttgttttgtttttgttttgagacagagtttcgttctgttgcccagtctggagtgcagtggcgcagtctcggctcactgcaacctctgcctcccaggttcaagtgattctcctgcctcagcctcctgagtagctgggactataaatgtgcaccaccatgcccggctaatttttgtatttttagtgcagacagggttttgccatgttggccaggctggtcttgaactcttgggctcaagcgatcacccgcctcagcctctgaaagtactgggattacaggcatgagccaccgcacttagcctgaaaagcagtttgtgatagcagtaatgttcacgattatggattgtttgaaatagtagctacaggtaatcattattcttttagccaagcattctcatgcccttctttggatgattttttcaatgttttttcaaactccttttcaacatacttacctgttccagtcagactgtgcttcagtaaaatcctgattattctttttgttttactattctgacttgtgattcttcatgcccgtgttatatcaggaagggtaatggacccctgactcccttcatctacaagtccttctctaacagatctcacacctttcatgtcctgaatcactggttagcatctgggacatttgtttgaatatgctagaaatcattccccagttatttaattcatgggattccttatttctgaaattatatagaaagttcttcagggcaaaccttttctttggcgttcttcagaaggccccatggtactgtgtactatttatcgtagatatccaacaaacttctggtgaactcagtgattccctattactccataaaatcattttaaaagaaaggatttgcatgttactgtaaagacacatgcacacgtatgtttattgcggcactattcatagtagcaaagacttggaaccaacccagatatccatcaataatacactggataaagaaaatgtggcacatatacaccatggaatactatgcagccataaaacaggatgtgttcatgtcctttgcaaggacatggatgaagctggaaaccatcattctgagcaagctatcacaaggacaaaaaaccaaacaccgcatgttctcactcataagtgggagtcaaacaatgagaacacatggatacagggaagggaacatcacacactggggacctgtcggtgggtagggggctggggggagggatagcattaggagaaatacctaatataaatgacgagttgatgggtgcagcaaaccaacatggcacatgtatacctatgtaacaaacctgcacgttttgcacatgtactccggaacttaaagtattaaaaaaaataaaaagccaggtgcagtggcgggcgcctgtaatcccagctatgtgggaggccgaggcaggagaatcacttgaactcgggaggcggaggttgcagtgagccaagatcgcgccactgcactctaacctgggcaacagagtgagactccatttcaaaagaaagagagagagagagagagagaggagagagagagagagagagagagagggagggagggagggagggagagagagagagagagagagagagagagaaagaaagaaagaaaaatggattttgtcttcctccattacacacaatttaatttatggtttctaatgttttctttatttttaattgtttatctcatattctggaccgactgtatattatttggaaaatataagtttagaataatgtaataatttgttgtttaaatatatcttaataatacgtagtattgataaaaatatgggacgacttggggcctctgctagtgggaatgtgcattggtacatcctttatagaaatcattttatcattgtgaatcaaggaccttaaaaaattaattctcagtaattgtaccagacacctatcctaaggaaataataagagatacaaacaaaaagtttatgtatgtactgtatatttatcacggtattctgacttcctgtaacacactcttgagagcaacttaaatagcctaagaggaaaattattcaataagttgtagaacaccttacactaaaaattattgtggaacaatatttgatgtgtagggtaatgtttggatataactttaaaagctgtctcttaagctgcatatttactatagtcacaatttttttaagtataggtatacataaacacaagtaaaaggaaatgtatcaaaaatataaaaattgattatctctggatagtggaattatgggtgatttttataatattctttatatttctttatatctcccaaatattctacaagaggacatattactctaatatgaaaacaaatgttcctttttcaaaggaaaaatctttatgaaaattaacgggtgtgcaatcatccatccaacagatatttgtattatatatcagtaccttctatgacagtttcacacatctgtgagtgggaacatttgcctcacagcagagctactgctttagattcaatttccattataattttttaatatttctattaggcattttattttgggtttttttcaaacacagacctgtgtttatttactggcatgctctgttttcatagctgtttaaatgctgtttgcagtgtatggggtggcccacagtgtctagatttagaagcatttacagcatttgatttattcctttcctaagtgtttggaaaataaaacctgagtcattgggattctctttttcacagaattgtgttattgttctttgctttcactgtggcacacccccttttgtaattggcccttggtgagattacagaaacatttgttgccaccagtgcagtcagccttagatttacactgtcaggttctctgagctgtgattatgtgttcagaaggcagtctcagtgaacttctcaaagtgagaaggttgtagcttttaatacagtctcagaagcctatgggacaaagttttctggacacggttcatcccttcttgttgctctgccctgaaaataacctggctagtcaccctttcaaggtaagttttacccacttagcttccaggattttgtaaaattctaaatctgggtgagaaatatcagtagctctgtacttgtatgccagttcctatctaaaccacgaaagaggtgcatgctgcctctgatctgaccgtaacatactctgcataaaatcagcttttccttcctgtttcaggactactttcagtttcttcctgtctctttgatactcttgcactagcgttggcttcagtgcactgtcattaaccacagtgccttacagtattttcttctattggtgagccttttctggacctttcgtgaaacagagcttctacttgaatctttaatttgtgcccttcataacagaactcacattaactcttctttgggttatcagcttctgacacccaagagtcatttgtcctaaactaatcactgaaatatgaatcattttccaaaaagaaatgctgtgccagagaagataattgccactcagtgatagagctcagaacggaattcacgttgtcagattcccaagcctgagtaccaaccaagatctggttggaaagagcaagtgctgtcgtctgagaacatccaccatattctgtactcttcagtagctgttctgtgttttgcttttttgatggtgcccctcctgagggggaggtggagagtatataattgggcatgttttttcattgtggttcctctagtccccaccagtcaactgtgactactatgaagtgcttttgagtacagggctgtaaatactaaaatctgttcctttgcaatttttggtatttgagcttttccagagaacaaatagaaggatttgatgagcttagaaatacatgtgtagaggaacagtgaaaaagacttcttcccaaatggctgctaagtaattatatatttttcatcataattaaatattctcaaaattgtatgtcagtgtgttgaaaatagtgttttcaaagaaaatattggctgggcgtggtggctcacacctgtaatcccaacattttgggaggccaaggcaggcggattgcttgagctcaggagttcaaggccagcctgggcaacatggcaaaaccctatatctacaaaaaaaaataaaaattagctgggtgctgctgggcactgtggctcatgtctgtaatcccagcactttcagaggtcgaggcgggtggatcacctgaggtcaggagttcgagaccagcctggccaacctggtgaaaccctgtctctactaaaactacaaaatattagccgggcatggtggcggatacttgcaatctcagctactcaggaggctgaggcaggagaattgcttgaatccaggaggtggaggttgcagtgagatgagatcacatcactgcactccagcctgggcaacaagagcaaaacttcatctcaaaaaaaattagctgggtgtggtggtgcatgcctgtggtcccagctactcaggaggctgacgtgggaggatgggaagattacttgagctcagcaggtcaaggctgctgtgagctgtgattgcgccacagtgctccactgggtggcagagttcagaccctgtctcaaaaaaaaaaaaaaaaagaaaagaaaaggaaagaaagaaatgtctttagcattattatgtacagatatttttaatgaaaacaactttagttatagaggtgatatatttgcattgtaagtcacaagatacagaaaagtataaaaatgcaaaataatagaatgcacctacatttcaaatacctagggataaccactgttaagatttagtatcagattctctttttcaatgtatacactttttcaatgtatacactgaaggttcacttgcaaactcaaaattttatacatgtaagatcataccacacctgtgctgtgtgacctgccttttttcctctgcaatatttttccatatgggtaaattgaaatttttgtcattttgtttaatgtcttcagttattggatgtgctataatttcttttcttttcttttttttttctgagacggagttttgctcttattgtctgggctggagtgcaatggcatggtctcagctcactgcaacctctgcctcccgggttcaagtgattctcttgcctcagcctcccaagtagctgggattacaggcgctttcgaccatgtccggctaatttttgtattttcagtagagacagggtttcaccatgttggccaggctagtctcaaactcctgacctcaggtgatccacccaccctggcctcccaaagtgctggtattacaggcgtgagccactgcgcctggcctggatgtgccataatttctttgactatttctttattacaggcatttaggttgtttctaaatttttctacccaagacagttttagaaaaattgttatgtgtataacttgaatatttaaccaatttttagtttttaatttttatacacattgccaaactactttaaacaattaaaacaaattttgaatagcatggtatcataaactttcatattagctactcatcaaagcttggttttgtctttcctgcttgcagttggttgcgtttttctcatgctgtattaacatctgaagtttccaaaagatacagttgtggttttcaagacagttggttcagcagctgaaaacctcatgatattactttctctactttttttttttaagctaacagtagtgtcctaagcaaaagagagtttttactgttaattgtgcaatgagaaactgcatgtttttctaagattgctagaatttgctttttgggatgaaaaagctgcatgctgggatttcctttttctttcttatacagatataaaactaagagtgtatgtgagatgtactacattttgtctgagaatcccacagtgtccagtcctgtggacagcagcttcccagctaaagtatcttagagacattatctctgccagcatagccattccagcatgagagcaaagggtctactggtcagggctttctttcctcatccgctcaccccccatcaggctcagccctccttagcgttctagtgtcacctagctgctcacctaagaatctgttttatcttcacttatgtcactaatattaattcctcttttttttttttttttttgagatagggtcttgctctgtcaaccaggctggagtgcagtggtaccatctcagctcactgcaatctccacctggattcaagcaattctcctgcctcagcctcctgagtagctgggattgcaggcacacaccaccacgcctggctaatttttgtatttttagtagagacagggttacaccatgttgccaggctggtctcgaactcctgacttcaagtgatctgcctgcttaggcttcccaaagtgctgggattacagacaggagccaccatgcccagcctattaattccttttttttttttttttttgagatagggtttcactctatcacccaggctggagtgcaagtggtacaatctcagctcactccagcctccacctcccaggctcaagcaatcctcctaccttggcctcccaagtagctgggattagaggcatgctgcactaccacacctggctatttcttttgtatttttggcagagacagggtttcgccatgttgtctaggctggtcgccgcctcctggactcaagcgatctgcctgccttggcctcccaaagtgctgggattacaagcatgagctaccacgcccagccttaattccttgtaaagcttatgtcatacttatttagatctcaagggcattgtctatgggtgtttcatcttttttttttttttttttttttttgagacggagttttggtctgtcacccaggctggagtgcagtggcacgatcttggctcactgcagcccccgcctcccgggttgaagcaattatcctgcctcagcctctggagtagctgggactacaggcatgcgccaccacgcccggctaattttttgtatttttggtagagacagggtttcactgtgttggccaggatggtcttgatctcctgacctcatgatctgcccgcctcggcctcccaaagtgctgggattacaggcgtgagccaccgtgcccagccagatgtttcatctttttaacttccattgcattagtaaagtcttttgctcaccataaatgctcaataaattttattttattttatttttattatttatattatttgtttttattttatattactttatttatttttgggtctcactctgtcacccaggctggagtgccgtggcatgatcatagcttattgcagcctcaaactcctggcctcaagagatcctcctgtttcagtctgtcaagtagcctggtctccctatattgagtaggctgttcttgaactcatgggctaggcgatgcacccacctctgccttccaaagtgctgggattacaggcatgaaccaccacacccagcctcagtaaaattaaaatggctgaagtgttgatgacttaatgtgttaccttttctagggctatttgtctttttttttttttttgctgatatttttgtggagaaagtagaccttggcccaaattactggtttattagaacaaaacctcaaagcatttatgaaaattaatatatgacaattgctttgttaccaagctaataatactatggttagtttaatagcacctcagctgttaatttgtcatttggtttatttaggttgactaattttttttcctgtttttaatatttagcttagctggctttttaaaattccattcactctattgtctttgaataattacggcaaatatagagaaatccagttgtaagtgtaaagttgacattgagtacctatgctttgctaagtacttcaaatttattagcttttattttcacaatagcccttcaaggagttatatgtgatgtgtctgggtttggggcttcagaaaggtgttgccttaagaaaccataataaaattctaaaaattaacactaaatcaaagacacttggtctcaaggggacaaaataacccccaggccttgtaaaatctgtcacttggttgcctatagcaatactgctagagaaaggctacctcaagaagagatttcacaaccatggatacataaacaaaggcgaagcattttttagcccattcaagcacttccctgtagaaaaggagcttcattcagccagttgcctcatccagagaaaaaagaagtacaagaggggccaggctcaccttctaccagaccatgtactccagaacttaaagtataaaaaaaaaaaaaaaagccgggtgcagtgggggacgcctataatcccagctactctggaggctgaggcaggataattgcttcaacccaggaggcggaggctgcagtgagctgagatcgtgccactgcactccagcctgggtgacagagaaaaactccgtctcaaaaaaaaaaaaaaaaaaagatgaaacacccatagacctgtttcaggtctaagaatgaaaaaaaatcaatagactaattatgtagctctgaaaagatttaagctggtggcactgtaaacatctacccttaaggtacatagtgactcaaaggaccttgaggtataaaagaatggcatgttacctattgtagtaaagtcctgagcatgccaaggtaaagtggagaacagctttacatggaaaagacagaccttttagtttctgggggagaaaagttctcttaaattaattgcatcactctgatacttaaaactttaatctctgttttaagaagaaaacagaaaatatgtctgtttgtaacagaaaaatgttctagatgggatatgcccaaggaaaagtccgagatccctggtatccaccacgcattcctacctagaaattcactttccagagcctttttctatacaaatcttggaggctcttcatattttgctttactaaggtaggcttttatcttcataggtgacaaatagagtttctaattaaatacaatacaataaagaacaaaatgggaatattccctctattgacttttgcaaggtcacagcaagtctgtaaagtaataatgtggatggtaagagtccattctcatgaatctgtaatcctacataatatagatttgtggcacattatattgtcaaaggattgaacctgaaaatgacttctgcaaatatgtctatatataatgtatttcagcactaatttactataaaataatagtagccaactcacagtatttttttttctgtatgagacactttccatttgctttacatatatagacacataattccaaaattaaaaaaacctctggaaatgaaaagcatttttcacaaatttgcctgaacttatttggtgttacaacatgatgtgaatttacttgaggctatttatagtctttattctacttaatctgaatattcatttcctgcagaaatattaatgtgcttgattgtaggttactgcctcagatcctgctagttctgtatggtgaataaacatctggctttattgaattatatgtgatttattttgtgtatcttcaaagtagcctcctttatttttgttttggggaaggagaattgggggagggggagttggaaaaagtatttggattttttttttttttaagaaaagtcactagtttgcatcataatatttgtcctgaatctaaaagaaatatatcgcacatacttttcaattccctgaagtgatcaaaataatagttgagttagattaatgtcgcctacacttagaatacaaagagcctttgattttcaatagaaaaataaatctgtgttgctttttaataggatatgcatctttgtttccctttatttgaaactttgaaattgctaatcttagctttgaaacatatttaataaccgtagttgctatctctgcttatttggttgtactcccagcccttgtcactgttaatcgctgtgataagtagaaagaatcctaggaacctccctttcagttatccctttggaaatcttgtttttaatagcacttttctttctgggcttgcatgacattttatctttcttttcctttctttttgccgtttgcaaagactcttgggaggatttgacagatttggtggagcaaatgcgcgatgatacagaaggtgcgtgccacaccaacatctttcagctttttctccttgctttttaaaattttctaaccaccttttaattgttttccgtaagaggaaatgtcagctttaggttttatttcccatggcaataagtggaaatcttaatgttttggttccaagtaaaatagtgtcaatgtatgtttatgttgcttttgaaagatatttgctgaataacgtgtttaaaagggacattatttcaagattatatcaagtttttgccatggctgttttttcacttgtttgttgagaaagtgtaaattttattactcatgcaaatacatgtatatatatttctgtgaatttcacagcagccaaaagcaaacagatcccaggaatctagtggttggcctggaatgttgctctgatttgtagatttccataacattacacacttaagctttgtcatgtcatagcattcttttctggtgtaattattttttgttaattttttcttcttcatacaagagactgaaacatggaatggtgtgattatctttttaaagtagcacacatgttctaatgtggaaaggttccccaaaccaatcagtgtttcttctgtatcaaggcagctaactatagggagctcagagcgatttacacattttatactaaaaatagaaaaattgagatttgaatctactttatcattttacatgttcccgctttgctgtagcacacacccctgacacacacacatccaccactctgtccagactgacctttcctgcccacctcctcctctcctactttgttcctgtgacatctcatgtatttatacccttccccctccgcctgtgccacctgcgaacccttcagtccttatgggatttccacaatttactctttgacagctttggcccacattcttttctccattcacttgctgctgcagaacttggagcttaaggaaggctttttacttattctctaattcttgtgtgtttatcaacctagttaaagggtaaactccttgagaacagagattgtcttaaacttcttggtatccttaatcagacctgggacgagtactgccctcagtagatctggtcattaccaaacaaaatcaaggcagctttaccctctctgttgatgcccaagagtatcttctgtttcagcccttgcctttgaatgtgtgaattctgaaatcctgagtgtcatctcttttcctttggtcaaactatttttatgccatctttgattctgcttttaatataactgattacatatagttcagtgaaagaacaaatcagtattgtctagttgattgacagttcacagacaagaaaaaagagaaggatgttgattcatttagtgtgtaatgtttactattgtgttagctgctattattattattattatatttatttatttattttgaaatggaatctcactccatcgtccaggctgcggtgcagtggagcgatctcatctcactgcaacttctgcctcctggggttcaagcaattctcctgcctcagcttcctaagtagctgggattataggtgcataccaccatccctggctaatttttttgtgtttttagtagagacggggtttcaacatgttggccaggctggtctcgaactcctgacctcaagtgatccacctgcctcagcctctcaaagtgctgggattacaagtgtgaaccactgtgcctggcctattatcattattattaattattggctaggcaccaccaggtttaaggctttaattcctttgatagactagatattaaaggaaaatgctacataaagtttatccccttcttgagaactttaccatgactcatcacaggcaagattctatttctttaatacaaagtattaataatgcaagagtcaagcttactgtgagagtcagactccttttttttaattttgtttttgctgggatttttgtcgatggttattataggtgaactccaaaagggagagaagatgaactttaacagtatagtacataaaatatccagaaaatgttgattatgtcagtaccttcatgatcttaatagatttccagtcaagtgatatatggtaatgttgatcaagatcctctttacagaaaagtctttctgaaaagtagttaaaaaaaaaaatgagaatggggagagggagatggcttcactttaactcttttgataatttcattcttcttgatatccttctctgcttttcttgcctcatggtctcaatcacagttatgtaaaattccagcatttcacacaactgtattacgtaacttggagatgttataaataagtgctagtactaagaagaaataagttatggagtattacctgcacataacacacaatagcaattcagggtctgggaagaatcctcatttcagactcagaaaaagctgatgatatatgcaggctcagatcttttctggagaccttcaactgctaagctgttttcaatgctgtttctcatctgttattgcagatgggccataacagttggcttttttaaaattttattttattttattttatttttttgagacgaggtatcactctgttgcccaggctggagtgcagtggcatgatcatagcttcctgcagcctcgaactcccaggctccttcctcagcctcctgagtagctgggactacaggcatgtgccatcacacctggctaatttttatgtatgtatgtatgtatgtatgtagagacagggtctcactttgttgcccaggctggtctcaaactcctaggctcaaacgatcctcccacttcagcctcccaacgcactaggattgcaggcttgagccaccgaacccggctatagtttgctttttaatagatagagtgttaacactggcttctggcctcctaaaaatttttaaaataacagactctagtgggttgcagatttgaactggtcgttgtttttgttttttgtttcagttctgtcacaattgaagcttcttattttgaatttttttttttttttttgagatggagtttcgctcttgttgcccaggctggagtgcaatgctatgatatcagctcactgcaacctccacctcccagattgaagcaattctcctgcctcagcctcctgagtagctgggactacaggcacatgccaccacatctggctaatttttgcatttttagtagagacagggtctcaccatgttggctaggctggtctcgaactcctggcctcaggtgatgcgcccgcctcaggctcccaaagtgctgggattacagacatgagccactgtgcccagcccttttgaatttttttagaagatgggagtcttgctgtgttgcccaggctggagtgctgtggtgcaatctcggctcactgcagcctctgctagtgattcttcttgcctcagcctcctgagtagctgggactacaggtgcacaccaccatgcctagctaatttttgcattttttagtagagatggagtttcaccatgtttgccaggatggtctcaatctcctgacctcgtggtccacccgccttggcctcccaaagtgctgggattacaagtgtgagccaccgcgcccggcctgaactattttttacagtgatgattagtttcatattctatgtgtttgtaacttatatctactagaatatgaagtgtcttcttagggtacaattgtatgatgtacaacacctattatattgcatctcctttccttatatgctagtaatttgtgtctaaaatgttttgaaactcactagggaaattatgaacattaaattaaataatgaaaggcacatagcttattacctttagtttttcaataaatatcggatttctgtctgtactcattacaagccttttgaacagattttgtaaatttgcagtggcccagattactgcccgtctctctgaggattaaaatagtcaggacagtacttgaatttaggcaataatatacctgtgtaaaatattacctaccaaaattgcatactggttccttggcatttgggggcagagggtgttaagacttgatgcatgttgaaaaacagaagaaacatatcttaagagattttattagcttctagcactgtgccacatcgtcattcaataagcttattaagttaaacaaaattgttataatggcttagagtggtggttcacttctataatcccagtactttgcggggccgaggcaggcagattacttgacgtcaggagttcaagaccagcctggccaacatgacaaaacccgtctctactaaaaatacaaaaaattgctgaggcgaggaattgcttgaaactgggaggcagaggttgcggtgagctgagatcacgccactgcactccagcctgggcaatagagtgagtctccctctcaaaacacaacaacaaaaaaattggcggggcgtggtggctcacgcctgtaatcctagcactttgggatgccaaggtgggcggatcacttgatgccaggagttcaaggccagcctgggcaacatggtgaaaccctgtctctactaaaaatacaaaaagttagccaggtatggtggcaggcgcctgtaatcccagttcctgggagtctgaggcacgagaatcgcttgagcccgggaggcggaggttgcagtgagtcaagatcatgccactgcactcaagcctggttgacagagcaagactccttaaaaaaaaaaaaaaaaattagccaggcatggtggcgggtgcctgtagtcccagctactcagaaggctgaggcaagaaaatcacttgaagctgtgagttggaggttgcagtgagccgagattgcaccattgcattccagcctgggtgactgagcaagactgtctcaaaaaaaaaaaaaaaaaaaagttatgtacatggaagaccataataattgcagtagctaacaacttttttccttagtatattccaagcacttctaaatggttacgtataagaacttgtttactcttcagaaccctgtcaccattttatagataaggaaagtgacacatacagaggttaagaaagtttcccagcaaaatactactcagttgtaaaaaggaagagaccactgatacatgcaacaacctgaatgattcttcggagaattatgctgaataacaaaaagtcaattttaatggttgcatactatatgattctatttacataacagtcttgaagtgatgaaagtatagaaatgaagaacagattagtggttggcatgggttgaggatggagtaggggcaaggagagatgtgggcatggctataaaacatcaatatgggggatccttgtcgtgatggaaatgttcagtgtcttgactgtaattcaacatcagtatactggttgtgataatgtactacagttttgcaagatacccttgggagaactaggttaaaagtacatggtatctctcgatattatttcttacaatttcatgtgattcctcaattatctcaaaacagaaaatgcaacaagagaaaaaacttttcccaaggtcacacagctagggaagagtttgaatagagttcaaactcccacagaccagctttagagcttgtgctgttaaccactacaccaaaattgtttaaacttatttgacacaagaacaactgtaaaaatacatcttcatcagaactcagtacacacatcatttatttgtatgtatcttaaaacaaaagtttcatgaaacaatacatagccttactatataggacattaaattgattttgtgacccactaaagggttgtgacctttgtttgaaagacactccagtatcctgtgctgcctctctggtatatacatccatttgtacggtagccactgtctaggtgtgtgcaaaaaaaaaaaaacaaattcctgaaaggactgttttggctctgtttccagcctgtaatcgtgggcatactttaaaggctgggctagtaaccttgcatccttctatttctctttaaaacatctccttgtgaaagcatcttttctcataactgctattattgtcctatgctgatgactctctaagtccaaacttccatttgcatttacaactaggtgatcaaaaatatcttgaaagctgggcatggtggttgcattcctggagacccatctattcaggaggctgaggtgggaggattgcttgagcccatgagtccaagtccagcctgggcaacatagtgagaccttgtctttaaaaataatatgttgagaatccttccacataaatatcctttatgatatccaaaaccaagtttattttgccctttatctccataacagttactcaactttttcatttccctttatagcacactcttccagtctctcagggcaaaaatgttggtgttattcttgaccccttcatttcctttatcttttctatgactatctgaacttgaatcactacagttcttcgtggcagaccattttgattctcttccctcaaattcattttgcgtaatcttctcagattagtcatctccaaacaaaattttaggcacgctgattctctgctcaaaactacagtggttcccattgcttcctccattaatatccaagtctagtttcagagacctctttatctgactctaccctacctgtgttttccagttctccccagtaagaactccctcttccactcttattttctccacctgacttcacacacccattccaaccacttggaataccgtccttcatgtgttctgtgataccacgacatttaggatctacctcaagtactgcagtatattgagatttatcacacttttattcatattacttttggtgttatctcatttgaagtacaaatgtacaatattccagggagttaaactaaggacagtggttattcctggtttttgtcaggtctgaggtttacctgctttaacaaattaataaagcctcttgctgtttcttggatgctggcaaaagacacaagactcctaggtcagagataaaggactttattactcatgacagtgcaagcagcctgagcatctgcatatctgtgccagttcttcttggaccagagtcccatggggtgacactggatggctcagtgacatgcttcacacgtggtaggtttgtgttgcagatgaagaaggccaagttgggagaacccattgtttttataggaagcagtaggaaagcttcgtctctcattatcaggttcataaatggcccaggaaagagtggtcagggccgtatagtcttgacataacccagtaaagaaatgtaggtgcccaagaggtccaaggaggattgtcttccccaacattttacagatgaaacagaagaatgaggatttcccccaacatcactcagggaatatgagagagacagatctaacccttctagatcatagatctaactgcgattgccctctcacatccatttacattgtttttcttttcttttcttttcttttttttatacctaggtaaagcccaaaacatttaaattatttctatgcaataaattgagcaaaccaaggaattcttgggttgtatttaccacctaaatttcttatgttgtatcaaaacaacgaaggtttgtcctaacttctaaatgtttccagaaatcttctaggtattcttctgcagcatggaattctcaggtaaaggtaactgaagaagtctgggaaactttccaaaactaaaattgattatattatgatatgggagcccaatgaagaagaaatcagtgtgtttcctagggaactcttgtgcaagctaatatatttttttttaatctattaaagattagagaaatgtatacctaaccaagaatgagtaagagtatatgaaaataatggttttggttaagtaagctgactcatttcaatgctaaagcccatcaaaagggtttttttttttttttggttatatacggaggtagaagaaactacactagtttcttcttaccttcttacaggaggccagcagctaaaccttgacctggagtaagagaaagcagaattacttttttcttgtcttgtcttttttttttttttttgagacaggatctcactctgttgcccaggctagaaggtggtggcacagctcactgtagcttacactttccaggctcaagccatcctcccacctcagcttcccaaggagctgggactacaggtttgcaccaccacacccagctaattttttgtgtgttttttatggagagggggtctcaccttgttgcctagcctggtcttgactcctgaggtcaagctatccatctgccagcctcagcctcccaaagtgctgggattacaggtgtgagccactgtgcccagccagaattttacttttactttaaattttttacttttaattatgaaacttttttttttttttaaagagacagggtctcaaccctgttgcccaggccagagtacagtagcatgatcatagctctcgtagctctctgtaactttgaactcttggttcaagtgaccttcctgccttacctcagccccgagtagctagggctatgggtgcgtaccaccaagtccagcttaattacacaactttttatagtacgtaaaaagaatagcttaatgaacttaaatatctccatcaccagcttcagtaattattgccaatcttatttaatctaatacctccatttttgtttctggagcattttaaagcaaactccaaacattacatctcagcacctgtaaatccttcagtgtcagagctaacaaaattaacaacaaagtcttatagtgtctcagcccattttcaaagtctgttgattgtctcaaatatgtctttttatagttggtttatttgaatcaagaaacatacaagttatatattattattatgtctaaaaactttagtggtttttttctaataatagccttattgaggtacaattcacataccataaaggtcaccactttaaagtgtacaattcagtggtggttagtatagtcacaaagctgtgcatccatcaccactctctaatcgaagaatattttcatcaccttttctaaaaagaaactctgtacccattaataaccactctctattcttcctcctcccagccgctggcaaccactagtctattttctgtctctgcagtttttttttgaggggcttcttcaagtatttacatatgtctctctccatagatttgcctattctgggcattttatataaacaaaaataaaatatgtggtcttttgtgtcaggcttctttcacttagtatatgttttcaagggttatccatgttgtagcatgtatcgtaacttcatttctttttatggattaataatattgtatgggcatatcatattttgtctattggttggtggacatttggcttgtttcactttggggcaaattatgaataatactgtgaacattaatgcatacattttgtgtggatatattttttaaataatttcagctcttgttttagattcaggggctacatgcgcaggtttgttacatgggtatactgtgtgatgctgagatttggggtatgatggatcctgtcacccaggtagtgagcatagtacccaacagttagtttttctgcttccctcccaccaccctctagtagtcttcagtgtctattgttggcatttttatgatgtgtggacatgttttcatattgaaaatgttgaattgctgggtcaaataactcatatgtttaattttttggagaattgccagactgccaaagcagctggaccattttacactcctacaagcaaggcacaaaagtttccagttttccacattcttgctaataccatttgcttcaatgaataattattattgttatcctagtgagtgtgaaaaggtatctcatcttgatttgtatttctctaattagcatcttttcatatgctttctggccatttgtctatcttctctgcagaaatgtatatttcaagcctttgcccattcttttttactaggattatttctcttctgttgttaaatcataataattatttatacattctggatattggatctgatttgcaaatattttctgccattctgtgggttgtcttttcactttcttgatgatgtcgtttgaaacacaaatgtttttatttttgatgaagtccaccttacctattttttcttttgttgctaaaccattgcctagcctatggttataaaatatttagacctgtgtttccttctaagagttttatagttttagctcttacactttggtctcagatctattttgagctttttaaaaaattattttgcatttggatatccaattatcctaccaccatttgttgcaaataataatttttgtaattttagtagagatggggtttcaccatgttggccaggctggtcttgaactcctgacctcaagtgatccacccacttaggtctcccaaagtgctgggattacagacgtgagataccgcgcccagcctgatcttttaaaatttcttgcagcaaagttttatagttttccatgtacaagtcttgtacttcttttgttaagtttattggtaaatatttttctggtgctattgtaaatggaattgtttttaaatttctttttcgaattgtttgttgctaatgtatacaaatataattaatttttgtgtattgatcttgtaccttacaaccttgccaaactcattttatgtacatactttgtgtgtgtgtgtgtggattccttaggattttttatatacaagatcatgtcatctgcaaatatagttttacttcttccttttcaaactggatgcctttcatttccttttcttgcctacttgccctggcaagactcgcctatacaatttggttagaagtagcaaaagtgggcatccttgtcttgttcctgatctttgagaaagccttcagtcttttgccatcaagtttgttagctgtgagttttttgtagatgccctttgtcaagctaaggaagttctttctcttcctagtttgttgaatgtttttatcattaatggatattggaacttgtcaagtactttgtctgcttctaatgaaatgaccatgtgatgtctttctttactctgttaatttggtgtattacactgattgagttttgtgtgttggaccgaccttgcattctgtgattaatcccacttggtccagttatataatccttcttatatgtttctggatttggtttaccagtattttgttaaggatttttgtgtctgtattcataaggagtattgatctatagttttcttatgatatctttatctgatttggtctcaaggtaatattagtgtcatagaatgagttcggaagttctctcttctaatttttggaatagtctgtcaaggattggtgtcaattccttaaatgactggtagattttaacaacgagactatctggtcctggcctcctctgtatgctatttttttattattattactaattcaggatctttacttgtaggtctgttcagatttcctatttcttcttatgtcagttttggtagtttgtgtctaagaaattgtccattttgtctagattatctaatatgttgacatacagttgtccgtagtattcccttataatccttgtttctgtaatgtcaatactactgtcccctctttcattcccgattttagtaatttgaatcttctcccttttctactgatcagtctagctaaatgtcagtattgttaatcttgtcaaagagccaactttggattttattgatttttctcagtagttgtttttgctttttaatttatttctgatctaatctttattatttccttcctcctagggctttctacttatatacatgtatgttggttgcccttgatgaagccaactgtgaaatcatggaattataatatgctagctaggagagtgatctaggccagtgcttctcaaactttaatgcacatacagattgcttggggatctagttaaagtgcaaaacctgattcagtggtagtgttgaagtctacagcttcccttgtctaaaagctttcctggttatgccagtgttgatgttctgagaccagagagtagaaaggatctagttcatttggtatcaatcatttgtgggattttccaaacagaacatgtcatttctctggttccaggtatattaatatgtctctccctttgagaatcagtgctgctatatgtcattatgactattatgaatgtgcatggtttccaagggaaaaaactgaacaagcccaaccctctcattttactgatgaggaaattgaagcttcaaaggggtgagatttcttgcctgaagtcatataataggttaattggctccatggatgagtatattaatcctttctgatgacaagtcctaactcagtgaagttcatcattgattatactgttaccaagaaaaggtagcaatgaggacaagtaaatttatggttaatttttttttttttttcgagatggagttttgctgttgtcgcccaggctggatggagtgcaatggcacaatcttggctcactgcagtttctgcctgccgggttcaagtgattctcctgcctcagcctcctgagtagctgggattacaggtgcctggcaccacacccagctaacttttgtacttttagtagagatggggcttccccatgttggccaggctggtctcgaactcctgacctcaggtaatccacctgcctcggcctcccaaagtgctgggattacaggtgtgagccaccaagcctggctggttaatttttttgactaacccctttaacagatttcaatccagagaaaatgttacttaagtaaattttcttattattgagtagaaatatgatacctgagacgccattaagaatagatagatatagttatggatatagatatatagatattctaagggtcctaagactctattataatttttttttttttttgtaaatgaggatagaataaaagttcatgattgtctcatacaaataagtgtcatcaggctaactaaatggtgttttattacaaggtctttttcagtactttcacttctttctttcacaattaaggactcattttctgtccagttttatacgctaaggtctttttagtactttcacttctttctttcacaatcaaggactcattttctgtccagttttatactctaagaacaattattgcaaaagttcaaaatagatttatttaaaattattgttcttcagtcattcccaacatagagtaagcttttctttctatatgtttctgttagtttgttgtttttaatctcatattaaagcttttttttttttctttttttcttgagacgggggtatcactctatctcccaggctggaatgcagtggtgtgatcttggctcactgcaacctccgcttcccgggttgaagcgattctcctgcctcagtctccctagtagctgggattacaggcgcctgccaccatgcccagctaatttttgtatttttagtaaagacgaggtttcactgtgttggctaggctggtctcaaacttttgacctcagatgatcctccctgagccaccgcgtgagccaccagcgtgagccactgcgcccagccaaaagcttttacacatctttgaaaagtcttctgtgtgataaccattttgtttcttatataagataaaagctttaatctgttagataataagaaaattctgaagaataactatgattgtgctacatattaatatcaattattctctgccaagaattgcatataacatacttaatactaatattaaatatatctttcttttccttcaattatttagaaaacatttcaagattttgctgtatgaacattagtcattgcattataagaagataaaatggcaccttggtgacatgatttgttttcagaacaatatgactcactgtcactgttagctatatgacttcagatcacttttatcatcactattaactaaatgagctacatgactctgtaaagtttattaaaatacccttatatggaaattagcagtcttgaagagatacagtgaagaatcacatgctttttgaaagaacattgaggtcgggtacggtggctcatgcctgtaatcccagcactttgggacactgaggcgggcggatcacgaggtcaggagatcaagaccatcctggctaacacagtgaaactccgtatctactaaaaatacaaaaagttagccgggcgtggcagcaggtgcctgtagtcccagctactcaggaggctgaggcaggagaatggcgtgaacctgggaggcggaacttgcagtgagctgagatcacgcctctgcactccatcccgggtgacagagcgagattctgtctcgaaaaaaaaaaaaaggaaaaaaagaacattgatttgagaaccagtcaacataatgtattattttaactatagtcacttccacatgatttctttagtccagtgctcttgctgtattccccaccaatgtgatctgcaccatcgtccatctaatcgccaaaactacaaatagggaagttactctccattctccttgactatgtccagatagtcaagctatgaaatgctaacgttctaccccagaatgtctctccatgctgactccctcttctccatacagccccactgctctagttctaccctttattatttattttcctctgccattgcagtagacccttacttgcccctcagctttgagttcatgcacccttccaatcatcttccaaaaggatgcaagaatggcttctctaaaattcaaatttgtgacatcacatcccacgttaaagtcttcactgactttaaggtgaaatctgtactccttaaacaaggtccttagcagtctgcccttgtctctttctcttgtctcatctctaatacttaaacccctggcattttttcagtgttgtttttcttctgtgtatgttatgttcttccatacttctgtacctttacctaagctattccttccatcctgttcccttcacatctctactgctaccccttccttacgtgactcctttctttttatcctttaagattgaactcaaaagtctcatcctctgaggatttatagaaacacacggggcccctaaaattgaaggaaaaatagggagccaggtcagatacctttctcctatgcatattcccctggtatcctgtatataccattgttggagttcttactgcagtgtagttgcagtacttctcagtcttctccacagaagtgcacccaatgtcagaggaaattgtattatgcttacagcctgcctgaaaccctaaattaatgacatcaattatcttagttttaagaaatgtagaaaactaacatttccatagaataggtttatgtcatttaacaaaaaaaaaatttttttaattagctgggcatggcgacccatgcctgtaatctcattactttgggaggctgaggtgagaggatcacttgatcttaggagtttgggaccagctgggcaacatagggagaccctgtctctacaaaaaataaaaaaaaaattagccgggcatggttgcacacacctgtttattatcccaggtactcaggaggctgagatgggagaatcacttgagcctgggagattgggactacagtgagttgtgatcgtgccactgcactccagcctgggtgatagagcaagatcctgcctcaaaaatcaaaacaaaacaaatggaacatttaaaattatttgttctgggccgggcgcggtggttcatgcctgtaatcccagcactttgggaggccgaggcaggtggatcacctgaggtcaggagtttgagaccagcctgaccaatatggtgagaccctgtctctactaaaaatacaaaactagccgcacgtggtggcacatgcctgtaatcccagatacttgggaggctgagacaggaaaatcacttgaacccaggaagacgaggttgcagtgagccaagatcgcgccattgcactccagcctgggcaacaagagtgaaactccatctgaaaaattaaaaaattaaaataaaataaaatatttgtcctggaataaaattgatctttgttaaatatgattatgtttatcctgaaatttcaggtgtttgctgtacactgccctatttgttctctataagtttgtattaaccaactgcgataaatagtaagcactttgatggcagggactaagtctattattacctctgtatttctagcattaaaacaatatctaacacatagtagatgttcaatatgtattgaaaaaaataattgcatgaaagttctctattggaatgatagtgttaaatgccagtgttgtgaacattttaaaattttaaatcatttttctcataggaaaagcttgactgatgatatcatgaaagtcatgcatgttttaaaatggctttctggcttatacaatataacagaatctttttttactttatatagttaaaagtacaaaatacacagaaaagaatcctatattataagtattcagctcagtacaatgttacacacacaacatgcttgcataataaacacccataccaacaaacagaaattcacctgccctcagaagcccctccatactctgtcaggtcattgcagccctttttaacaggataggttagttttgcaaaatcattttacacttgaatagtatttaagacaagtaatgttgaatagaaaatattctgtgacaaatcaggttaatgatttaatattcattattagcagccaacattatttgtaggccaggtgtagtggcttatacctttaatcccagcacttcgggaggccaacatgggaggatggcttgaggccaggagttcaagaccagtttgagcaacatagcaagactaaatagccatacttttgtatactattcagcacaaaaatgttaataataagaattaaataatactcattttagcttttgtgttcatttacaatgagcaatatattctttttaaaatttttgatgtgtaataattatacatatttagggatacagactgacattttggctcatgtatacaatgtaatgatcaaatcagggtaattagcatatctcttgcctcaaacacttatttattaattttgggaatattcaaaatcctctcttctagctatttgaaaatataaaaaaaaaaaaattattgccaggcgtggtggctcacacctgtaatcccagcacttgtgggaggccgaggcaggtagatcacgaggtcaggagatcaagaccatcctggttaacacagtggaaccccatctctactaaaaatacaaaaaattagcccagcgtggtgtgggtgcctgtagtcccagctactcgggaggccgaggcaggagaatgacatgaacccgggaggcggagcttgcagtgagccgagatcgtgccactgcactccagcctgggcgacagcaagactctgtctcaaaaaaaaaaaagaaaattattgactatagtcaccatacaatgctacagaacactagaacttactcatcttatctagttgtagctttgcatctgttaaccaacctctccctatcttcccctcctccatactcttttcattttctaataatcacaattctactctctacttctatgagctcaacttttttagcttccacatatgagtgagaacatgtggtatttatctttctgtcccagacttatttcacttaacataatgtcctttaggctcatccatgttgccatgaatcataggatttcattctttttatggctgaatttgtgtgtgtgtgtgtatgtgtgtgtgtgtgtgtgtgtgtgtgtgtataccacatttctttattcatgttgatgacacttaggttgatttcatatcttggttattgtgaatagtgctgaattaaacatgggaatgcagctatctctttgttatatcgatttcctttcctttggataaatatctggtagtgggattgctgaatcatatggtagttctacttttagttttttgaggaacctccgtacagttttccataaaggctatactaattgacattcccaccaacagtgtataagaattcccttttttctgcatccacaccagcattttttattttttgtcttgttagtaatagccattctgagtgaattgttacttttaagctcttatctctaacaatcaaattactataacagatttttgtttcactttcatttgtttagattagtagttctcaatgtggaaggacctgatttaatctcccaaagaatatttggcagtgtctggagacatttttggttgtcttaacccaccaaaaacagttgtcagtgctactgacatctagtgttacccactactgggttgctgtgaaaattagttttcagaacagagccccataaaaatgaattatctagcttaaaatgtcaacagtgccaaggttgagagtagtgttttttaaagaatgggtaggttgtttatgtttgatggaagttagtttaaatagattgtagcaccttactaatggagtccatgatatcagaaatttaattcccatagacgctagttaacctgtctgtagttcatgcactccagacctcagccagatgtcttaaacatttctgctgcagattataagaagaacaagatgagaaaatgtagatgggttggtataaatctatcactacttctggaaaaatgtctcaatatgatattttttacttaacccaagtctatctctcaccacatgactagttctcactacgttggaatcagcttgtaaactttgactagcagcattgtttaatcttgttataagttcctgaattaatggtctacaggcttgaggcagagtgaatgcctcaaagttatgggcaggcagttatctagtaccaaccatagtctcctgccatctattgggaggtgtcaggtgggaaggctagtagccctctacacatattcatacccacaccccagctctattttttttttttgagtaattataggaggtcagaaacactagaatgtacatacatgctggtaataaatggaaattaatatctgatagttttcttcatggctgtctttcagggcatagttttccatgtattttgctgtcctcttgtgagaatactacccttgacaagttgatctacatttaagctatggccacatttaaactatggccctaaaacatttgttgttatgcaagaaagaattaatggtgatatataccaattctgactctcacataaagtgtttctccaaaagtaacctcagacaacataacaacaaaccaagatttatatagttggaattgcaaatccgtaagtccttaaacttaatgagaagattaatttggaatttgaccatttgactctgctcatttaactttgaaagcagatataaataaaaaccttgtatgaagaaaattgcttgggataatttgcattaaacagtctgttttttgctaagtggcttatttgtattatggaagcatagccttattagtatttttagtcttcctaagaagaaatggaatacatcatagagctctaggccttctttagttttcagtacaaatttggtatatttggtgtttgggaggatatacatggcataaggtaaagagagcattagctttcacgtcagatccaggtccagattctgccacttataaactgttacaccttggaccacctagctattatgggcctgctttagcaccggaaagaagggagaatacctaaatatgatgagagaataagtaggtaaaataatcatgtaaaagaatggtcaggaggagtctggcctctggctctgtcatttattattgtctgtgcccatgggccggctgcaactatttgattgacctaaaatgggatggtgacttgcccgaggtcatacagtgagtcagggcagagcagctgaagctttactctctaagtctcattttccttccctgtaaaattgttgtattggtgactgtctcacagcatgttgtaaggagagatggagatcataattgtaagaggtagcccacagtgctggcacagtgtaagcaccaataaatgaaggtaatgagtacaataaaatgtgtcacttagcccctttccccaaatagtttatccatctggttgatgagagccatacactgtatgctaagacttaaaaatgtgggagttgattaagttctagtactgcattatactaataatgctagtgcatagtttaaagaataataaaataccataatgcaaagtttgtttaagccctttaccctttttttcctacattggggctttatttttagagcacttcacaaattatgcagagaaaagaggggtaggcaagaatggaagcagagagagcagtgtgaaggtagtacagtagggagttatgacagatgcttaggttagggtgatagcagaggtggtggtgagactattaaaagactactcagccaggcatggtggctcacgcgtattatcccaacactctgggaggtcgaagtgggaatatcgcttcagctcaagagctcaagaccagcctgggcaacaaagtgagaccatgtctctacagaaaatacaaaaattagccagtgtgatggcgtgcgcctatagttccagctacttgggaggcagagacagaagggttacttgagcccagaaggttgaggctacagtgagctatgatcatgccactgcattccagtttgggcaacagagcaagaccctgtctcaaagaaaaaaagaaagaaaagactactcaaggcttgagatttgataaaatagttcattttactgcttcattgaggatattcttaaaggaaactggcattttttttcacagtgagtacatggtggagaagaatacaactaatactgaattttaaaatgtgctatttctagtaaccagccttcatcttcttcccctttggctgcagatcctaattatctcatggctaatgaacgcatgaacctcatgaacatggccaagctgagtatcaagggcttgattgaatcagctctgaacctggggaggactcttgactctgactatgcacctctccagcaattctttgtggtgatggagcactgtctgaaacatggcttgaaaggtaggccatcaccccaaaatgcaaatatgcatgcagctgttttctagcaatgcatactatagaagaaagcattctttgtggagccaaagaataagaggcttgaattaataatattaatccattggaatgcagtcttttataggagcagggttatggttgactcaatggacttatagggctttaaaaatacagatcattaaatgttacagttggaggggccattataagtaatcaagtacagtacagtagttctgtttgacaggtggaaataggcctgcccagaatgagacatgacttggtcaaggtcacacattgagttgtggcagagtaggtgctagaactcaggtctcccgactcttgggtcagtgttctttccacttaactataagcttttgagggcagtaactggtcttgttcacccttgtttcctttcttcttgccttctcaatattcttttcttgttgttttttgtttgattgttttttttaaatctgtatgcctatgcttaccaacttcccaatattccatagcctatttctggattacatattcttttctattgagctgttttcttcattaataccacacaattttaggcactaaattgttaaaatgttttattatattatagggctaggccacaaactgtttgtgaaagaagaagggctgagtcttgggaagtagagaatttttttattttcacaaaatattatctattctaaaagcatgaatgaatccaaaaccatcttataacctaggattggtttcctgaaaagttgtgtgtgtatgtgtgtgtgtattgagagtgcgcttatgttgtaaagaatattaaaatactgctttatttttgttgccttagctaaaaaaacttttctcggacaaaataaatccttctgggggcctctagaactggtagaaaagcttgttccagaagccgcagagataacagcaagtgttaaagatcttccaggacttaagtaagtctaaggttgaattccatttctcaggaacagcattcttattaactatcccttgaagagcaagactaaagacaattatgtacgaataatttattttataacaatccaaaatgcatgatgtcatgaataggtgctgacaggagagaattggtatacagaatattgagaaaaatgtgctcttgagggataattattcatctaagagagattgtctttttgttgaaatgccaaacatttgcttattttttaaagcacttgggagaatcatatctaagggggtggcatgctgtacttgacttagggaaaaaaggtattcagtgggtttgagagtcaagattaaaacagctgtcaaattaacctgaagagctagtgactgtagcctgccttagaactataaagtagtgaccaccttcccaaatgagactggtttaattttaatcagacagaggcctagattgcctgtgtccacattcatgctttggacatttatataatccacactgaatttataaggatttgctattattgatctgatggaacatttttagttgggtctcccagaggctgtgtcttcaaattgtagttacattcagtaattctttttgaaagcatttgttccgggtcacattagcccacacacaaaaattccttgcatgggaatgtactgggagaggtcctgaggagcacctcagtgtgcttgttacactggaataccattagcaagaataagtgaactgattctactgtagcctttgcttctggtgcttatgttttcagttgtttgatttctgtgtttttgtaggacaccagtaggtagaggaagagcctggcttcgtttggcattaatgcaaaagaaactttcagaatatatgaaagctttgatcaataagaaagaacttctcaggtatgaacaccttcttgaactttcttctttccttggtatgttctacatcgtataaagtcaaaccatataagttcactatttttgtagatcagaaacatttgattcataacagcttcactgatactttctctcatacctcacacacatatcctcccaaatggatgatttatgttatgtgtgttctgtctgtcactgtggcatatattggtcctttccaaggcaggccaagacttacctctagaaaacagaaggcaccttagcatgtgcccaggctcaataagacaagaacttgacatgtagcattaaattcaaatatagcacaaaattggacgggtgcagtggttcacgcctgtaatcccagcatttcgggaggccaaggtgggcagaccacttgaggccaggagtctgagaccagcctggtcaatatgtcgaaaccctatctctactaaaaaaatataaaaattagccgggcgtggcggtggacacctgtaatcccagctacttgggcggctgaggcacgagaatcgcttggacctgggaagtagaagctgcagtgatccgagagcgtgccaccactcttcagcccgggcgacagagtgagactctgtctcaaaaaaaaaaaaaaaaaatgtgtatatatatatatatatttgtaaaatcacaaaatcttccagtagatcatagatacaactgggagaggcaaaacaacattattttatccgtctttattatatgattccattgtataaaggtcaaaactaggtaaaatcaatctatggtgatagaaatcaggataatagttaccttgaagaggtgggggtagagattggaagagagaaagaatccgatttctaggatttcagtactgttctctttcctgatcatgatagtgattacacagatagatgtgttttttgtgaaagttcatggaactaacagttagctgagatttggaaatgtgtgaatgttggaattcagccatattccacttctgaacagttcataaggttaggcttttgggacaataaactgtcaaagaaccttgttcattccagttctactcagtttccttcagaggctatcaaagaacaaaaatagcatgtgatcagtttttgagagaaacagtaaatttgcagctcattcacttgctgtttttgtgctattttgtcatttgttaatatcttttttttttttttttgagacagagtctcactctgtcaccaggctgtaggctgtagtgcagtggcgctatctccactcactgccacctccgcctcccgggttcaagcgattctcctgccacagcctcctgagtagctgggactacaggcgcacaccaccacacccagctaatttttgtatttttagtagagacggggtttcaccgtgttggccaggatggtctcgatctcttgatctcgtgatccacccaccttggcctcccaaagtgctgggattacaggcgtgagcccagcctattaatatcttttatagtgaatcagaaaagaaataaggaactaatatcagtgaattatattgattgttaacagtgattgaggttgacctttacccccaggtaacttgttgaaaacaaattgattgcagtgttgttttaatcatgatgtcaaattgactgaaaatgaataattcaggtcactgggttttcgtgttttgttttgttttgctttaagagactcgcgctctgtcacccaggttggagtgcagtggtgcaatcacggctcactgcagcttccacctcccaggttcaatcgattctcctgcctcagcctcccgagtagatgggactataggcatgcaccaccacacctggctaatttttgtatttttagtacagacagggtttcaccacgttggccaggctggtcttcaactcctgacctcaagtgatccacctgcctcagcctcccaaagtgtggggtttacaggcgtgagccaccgcacccgcctgtttccatttttttaaaaaatctaaaagactattttttagagtggttttaaatttatagcaatattgagtagaaggtacagatatttttcatacatacccttcccccctgtacaacctccctcattatcaacatcccacaggagtggtacatttgttacaattgatgaacctacattgacacatcattatctcccaaagttcatagttcacattaaggtttactcttggtattgtatgttttatggattttgacagatgtataatgatatgtatccatatgtcattatagtaccatacaaaatagtttcatggccctaaaaaatcctctgtgctccacctattcatctctctgtcctccaacccctaataaccactgatcgtactgtgattgtactgttgttaccaggggtttactgtctctgtggtttttccttttccagaatgtcatgtagtgggaatcatagagtatatggccttttcagactggcacctttcacttagtaatatgcatttaagtttcctctgtggcttgatagctccctttttttttgttctttgagacagagtttcactcttgttgcccaggctggagtgcagtggcacgatctcagctcaccgcaatctccgcctcccaggttcaagtgattgtcctgcctcagcctcctgagtagctgggattacaggcgtgtgccaccatgcccggctaattttgtattttttttttttttttttttttttttttttagtagagacagggtttctacatgttggtcaggctggtctcgaacttccgacctcaggtgatccacccgccttgacctcccaaagtgctgggattgcaggcgtgagccactgcgcctggcgatagctccctttttttagtgctaagtcatatgccattgtccattcatttactgaaggacatcttggttgctcccaaattttggcaattaagagtaaaactgctataaacacatgtatgcaggtttttgtgtggacgtaagtttttaactcagttgggtaaataccaaggaatgcaatagttagatcatatgaattacatcactggtttttttgtgtgtgtattagtaatttaggtgcattataagcagtatttaattatctatgggtcttcacgaatttttttttttgagacagagtgttgctctgtcacccaggctggagtgcagtggcacaatctcagctcactgcaacctccgcctcctgtgttcaagcgattctcctgcctcagcctcctgagtagctgggattacaggtgtgcaccaccacacccagctaatttttgtatttttagtagagatggggtttcaccatgttggccaggctggtcttgaactcctgacctcaagtgatccacccgcctcggcctcccaaagtgctgggattacaagcgtgagccaccgtgcccagccaataatttttatccattcagatttttttttgtttttagtagagatggggtcttactatgttgctcactctggtctcaaagtcctgggctcaagcagtcctcccgccttggtctccccaagtgctgggattacaggtgcgaaccaccatgccgagctaccaaacaaatgttttaagatgcataaaagattgcaaaattatctgatggtgcatcacaagtacaaatatgtcagaaaagtctgaatacctgcttcaaccacaatactgttcagtcacgtctttctgccagcctattatttaaagaatctattcatgcgcctattatttttttcttttaaaaaattttttctccagtgccacttgccaacatccacctattattctaaaagtaaaatatttactaaagcctttctttttgtagttttttttttactatttttgtagatggctataatcaaccatgatgactatgattcaaccatgaatcaaccatttttgtccttgtctctggatttttgagatttttgttacaataaggaattctgtggatttctcttacagtgaattctacgaacccaatgccctcatgatggaagaagaaggagccataattgctggtctgttggtgggtctgaatgtcattgatgccaatttctgtatgaaaggagaagacttggactctcaggtatgggaaagagactcattcccatgggtgtcactctgagttctgctatctcagaagtggatttgattaggttataccaaccaaattaggccatattctatgagtcataaacaggatttccttccattttgatgggaatataaaaaaaagattgtttttccttccagtttggctcatttatacgttacgaatgttttttagattcttgtcttggctgtactctctgttaaacatacatatacacacacacacatacacatttacatacacatacatacacacacaaacacaggtatacccagagatattgcaggtttggtttcagatcacaacaataaagcaaatatcataataaagcaagtcacatgcattttttggtttcccagtacatgtaaaagtttgtttatactaggccaggtgcgattgttcacacctgtaatccctgcactttggggcaggagtatcacttgaacccagaagtttgagaccagcctgggcaacatagtgagaccccgtctctacaaaaaataaaaaattagctggttgtgtagctacttgggaggctgaggcaggaggatcacttaagcttgggaagtcgaggctatagttagccataattgtgcattccagcctgggtgacagtgagaccctgtctcaaaataaaactctaaaaaaaattttttaaataaaaagtttgtttgcattatactgtagtctattaagtatgtgatagtgtaagtgtaaaaaataatgtacataccttaacttaaaaatactttattgctaaaaaaatgctaacaatcacctgagccttcagtgagttgtaatctttttgctggtagagggtcttacctcagtgttaatggctgctgactgatcttggcagttgctgaaagttgaggtggctgtggcaatttcttaaaataagacaacaatgaagtttaccacattaattggcttcctttacaaaagatttctctgtagcataccacgctgtttgacagcattttacccacagtagaatttctttcaaaattggagtcagtcctctcaaatcttgctgctgctttatcaactaagtttatgtaatactctagtaaaccatgctgtaaacagatgtgctgtctttgttgtaccctttatttttgttttgtttttgtttttgttttttgttttttagagacagagtcttaatgtgtctcccaggctggaatgcagtggcaccatctcagctcactgcaacctccgcctcctgggctcaagcaatcctcatgcctcatcctcctgagtagctggactacaggcatgcaccaccacacctagctaatttttttatttatagtagagatggggttttgccatattgcccaggctgatctcaaactcatggcctcaagtgatctgcctgccttggcttcccaaagtgctgggattacaggcatgaaccaccatgcccagcccactattccatttataaagcataggcagagtagatttagcatcattcttaagggccctaggattttcagaatggtaaatgagcactggcttcaacttagagtcaccagctgtattagcctctaacaagagagtcagtctgtcctttgcagctttgaagccaggcattgacttctcatctatagctatgaaagtcctagatggcattgtctaatagaaggctgttttgactacagtgaaaatctgttgttgagtgtatccaccttcatcaattatcttaattagatcttctggataacttgctacagcttctattatttacatcagtgcttgctgcttcaacttgtacttttatgttatggagacactttccttaaacctcgtaaaccagtggctgctaacttcaggcttttcctctgcagcttttttacctctcaatctccatagaattcaagagcattagggccttgctctgaattaggtgttggcttaagggaatgttgtggctggtttgatcttctatacagaccactcaaactttattcctgtcagcaataaggctgttttgctttcttgtcattcatttgttcatgagtagcacttaattcccttcaagcacttctcctttgctttcacaacctggctgtttggcccaaaaagcctaccttttggcctgtcttctctttcgacatgccttcttcactgagcttaattttttctggcttttgatttaaaataagaaatgtgcaattcttcctttcacttgaacacttagtggccattgcagggttattaattggcctaatttcagtattgttgtgtcttagggaatagggaggccaaggagaagggagagagatgggggaacggccagtaagtagagcagtgagaacatacacatttatggattgcttgccatcttatatgggcgtagttcatggagccccaaaataattttgatagtaacatcaaagatcactgattacaggttatcatagcagatgtaataataaagaaaaagtttaaagtactgtgagagttaccaaaatgtgaaaccgagacatgaagcgagcacatgctgttggaaaaatggcactaatatacttgcatgacgcagggttgccacaaaccttcaatttgtaaaaaatgcaatatctgtgaagcaaagtgcaataaaatgaggtatgtgtgtgtgtgcgtgtgtgtgtatactaaaatatatgcagttgactcttgaacaacagagtaaggcattccacatggtagaaacatcccacatagaaaattcacctaaaacttttcattccctaaaaacgttaagtactaatagcatacgattaaccagaggccttactagtaacataaacagtcaattaacacatattttgtatattataaatagttatatttatatttattttattttatttttgagacaaagtctcactgtcatccaggccggagtgccgtggagtgaactcagctcagtgcaacctctgcctcccaggcttaattgatccttccacttcagccttcagagtagctgggactataggaacatgctaccacacccagctaatttttttgttttgtggagacagagtttcgctatgttgcctaagctggtcttgaactcctgagctcaagtgatcctcctgcctcggcctcccaaagtgctgggattacaggcatgagccatggcgcctggcctattgtatatttcatatgctgtattcttacaataaagtaagctagagacaagaaaatattataggaaaattataaagatgagaaaatatatttactattcatttaaatgaatggattatcataaaggaaccagatcatcataaaggtcttcacactaaccagattgatgaggaggaggaggaagaggaggcggttggtcttgctgtctcaggagtggcagagatggaggaaaaccttttttttttctgcctggatgacagagtgagactttgtctcagaaataaaataatataatataaatatatattttatattgtgtatatatatagtatataggtggactcgcacaattcaaagtcgtgttgttcaagaatcaactgtacagttgtccttcagtgtccaaaggagattatttccagcacctccatgaataccaacactcacaatgctcaagcccttacagtcagccctctgcgtccttggattttaggacttgctgagaatgagagcgaactgtactaaaggccattaaagcacggtagttaagagtaaaggctctgaagctaactgcctaggtttggattctggcttcctcattttctagctgaatatattttataattacttagtttcttgttgtttcagatttcttgatgtaatgcagttagaacagggcctagtacacattaattgcccaataaataatgttttcactttaattacttctcaccctttctgtatgaaatactatgacaaacttctgttatgttttattctggtaaaataggaagggaagtaagattttttggtgtggattttttttttatttttttatttttattttttttgagacggagttttgctcttgttgcccaggctggagtgcaatggtgagatcctggcttaccgcaacctccacctcctggattcaagcaattctcctgcctcagcctcccgagtagctgggattacaggcatgtgccaccacacccagctaatttttgtatttttagtagagacagggtttctccatgttgttcagtctggtctcgaactcctgacctcaggtgatccacccgcttcggcctcccaaagtgctgggattataggcaagagccactgcgcccggcctttggtgtggatttttaaaaagaaataagctaaataataaaatggcaatcttgaaaaatgaagacgtgtacatcaatgaaagtttggaggaacagacaccaaaatattagcaatggtcatcttcagtggttgggattatgagtgtttaatattacttccccttttttttagctgtattttctgaaacttctacaggggaaatgtgctaatttttaaaaagttatttctaaaaatgaacagggattcagtagcagaatacccgaaataagcaaaagagaaagaaactttagaccttatttatattaagtattctgttgactgtgttagttgtgatctagtcttctagtcttattgacataatcttgattctttacttccaactcttgttaattcttgattaaactgaaagtaaaacagtacatttttaatcgtaaatttctagtaagtgtcatgactgtattactgttttgagtgcctagaaggagacattgtgttatgccttgtaaagaatatctaattttatattaaaacctgaaaattctctctgtaggttggagttatagatttttcaatgtatctcaaggacgggaacagcagtaaaggtactgaagggtacgtacaaagaaaattagatttcttttctcctgatgtagcattttttttcctttggtggtacttaaagtttacaacaatactgttttaacagacgtgctgaaagaatttctgatcatatagctttaataaagtcttgccagaaatatctgactattacgcctacctctaaaccctaaaaggatttttttgtttgtttgtttaatgattttcctgctatgtggttcaggggcaaagaaaatacaaattttctaaaggattccaattctccatgtcttatagtagggtttaaaaacatggtcattttgaccagaggagtcgcattctcagtttgcttaaaattggcaatatgaaatatgcactgtgaggttatgtaaaatattgacattaggggaaactgattgaaggtacatgggaactctgtgctgcgtttatacctcttcttgtatatctaaaattgtgttaaacacttttaaaatattcattatggtacttagtaattagagatcagaagcacatctattctttttataaatttagccattgaaagcataattagtctgatttttaatttttgacattgagctaagattatctcactgttcttttagtaattgtataggtttggggccttaattttatcttacagctgaaaaatctggctgtttatcttttgtctactacagattagttggttgtagacgtgaaccttctttatccacagtttaatttttcatgtaataataaacatttgggccgggcatggtggctcatgcttgtaatcccagcactttgggaggccgaggcaggcagatgacctgaggtcaggagtttgagaccagcctggccaacatggtgaaaccccatctctacaataatacaaaaaaaaaaaaatagccaggcattatggcgggtgcctgtaatcccagctacttgggaggctgaggccggagaattgcttgaacccgggaggtggaggttgcagtgagccgaaatcacaccattgcactccggcctgggtgacaaagcaggactctgcctcaaaaaaaaaaaaaaaaaaaaaaaaaaaaaaatatatatatatatatatatatatataaaataaacattcaatcttcgtgaaaccctttttaaccattcactttaaatgttaaatagcacttacagacaaatatttagcccttgagaacagctatattacatcagagtgagcttaattcaagtcctatgacaattggaaagttgttactataaatactactagtgaagctgaaaaacctattaacaagaaaatttttatcctttaaatgcgtctaatagattgcaacatcatacctgtgacctaaattattaatactgaggtttgtaagctataacaagagctttattagtgaggggttttgtcatttttaaactcctgactctttcttgttgctatgtcaagagggttttacatcaaatctgtcttatggttcagtgtatctgtgccacaatttttttctcatgttttatgaaaagatggggtggggtggggttgggatcttggtatttcttatgttatttattttatttctattttcttccccttcccccagagacggtcagattactgcaattctggaccagaagaactatgtagaagaactgaacagacatttgaagtaaataatgaataaatatattactttactggggaattgttgaaggagaagggaagagtaagatgatgcgcagtgaggataaattcagacagtgttcaacaaatatatgtagaattcctgtttgccaggcactgagttaggcactagataaataaatggcatttaacagttttggtgacctttagtgaaaggcagtatataatgttatatataatatataataacatagtatataatattacgtatgtaattataactctagtgattaaatagataaatacgtaaatacattcagttaagaattttaaaatatgtgacatatacagttgaaattggtagctttttcagtttagtagagatagctgcatatttcagaactgatcttgggtaaaccactcattacattagtacctttaaattaatcatatcgtccaggtgtgctgggccaaagcctgtagtcccaacactttgggaggccaaggcaggaggattgctttagctcaggagttcaagatgagctagggtaacatagcaagaccttgtctctattaaaaaactcaaaactagccgggcatgtgcctgtagtcccagctacttgtggggctgagacaggaggaggatcacttgagcctgggaagctgaggctgcagtgaaccctggtcttgccattacaccccaccctgggttacagagcgagacactgtcttaaacaaaaaaaaaaaaacgaaaaaaaagatacatgctttgttttcctgcatttctcatttatacattgaattaatagcattaatttaatatataaattgaatttctttgccattattacagttaattcaccaagtattcacaaagtacagtagttcccccttatgtggaggggatacattctaagacccccaaaggatatctgaaaccacagatagtaccaaaccctatatatgctatgttttttcctatacatatgtacctatgataaagtttaatttataaattaggcaaggtaggagattagcaacaataataaaataaaacaactttaacaatagactataataaaagtaatgtgaatgtagtgtctccctcaaaatcaacacatccttttattttgttttcattgaacttcttcttcctagttttctcaggtttttttcccccttcagttttctgtatttatatttcttattgtccttaaatgactatggctattctatatctgagcacagtgaataaaacattaaagtttaattaaaaattaaagaggccgggagcagtggctcacgcctataatcccagcactttgggaggccgaggcaggcggatcacaaggtcaggatatggagatcatcctggctaacacggtgaaaccccatctctactaaaaatacaaaaaaaattagccgggcgtggtaccaggcgcctgtagtcccagctgctcgggaggctgaggcaggagaacggcgtgaacccgggaggcagagcttacagtaagccgagatcgcgccactgcactccagcatgggcaaccgagcgagactccgtctcaaaacaaaacaaaacaaaacaaaaattagagaaagaaagcattagaaataccagtttcaagattttgtgcattgagaaatcattatttccaaaagattttctaagggccactgtccttacgacaattcagtgttgtatatatgttcacagtttatttttttatcttaggagaagtaaaaatccttactggataatccttatttatttgtgttttttaaacatactcatacttccctctattgtttgtgtcatagagagcacaaatcagatttggacatcttatgtgggatttaaacaaatacgtttatacatgagtctatcaaaatccttatttacatgtaagaaaaaaatacatgcccagctttgcccaaggaagtcccagagggagaacagtatcttattgtactattcttacctatttttgaaccacagttgagtgcaggtaactgaaaccacagaaaacaaaactatagataagagaggactactgtattttcagaattttccagaacataaaacagtttcctctctcctgagaagagctatccaaaagctattggtattctcaagtactttgatgttcttgttatgttaagactactgaataattttgaagaataattaatatattcattaattatcttgtttgtagttctcttatgaaaaatagacatttttaatttaagtaaaacttataatatgattatactactgtcagtaaaattttaagtagtcttggttccacctagcaaattcaaaacaatttaagtacattttctctggggaccaagaactaatataatgactttaatgaactatggagatgttagccaagcaaagatatggttacagttaacaatgaaatataaacaatggcactattatttactctttctatgccttagtttctttatctgtaaatgagaatacctaacataaagggttgttgaaaggaataaatgcaataacgcaaataacgtaatttagaagagggtttggtgcatgtaagtatttaattcatatagactgttattatcatatgtagataaacaaagtttattctgtagggaatgaactcttttatttcattgaataaatacttactgaattaaaactcaaatgccaaagataatagccttttgtaagcctagaggtcaagatttgtgagcattaaggcctggcgcagtggctcatgcctgtaatcccagcactctgggaggccgaggcaggtgggtcacttgaggtcaacagtttgagacctgcctgggcaacatggtgcaaccccatctccaccaaaaaatacaaaaattagctggatttggtggtgcatgtctgtagtctccagctacttgggagactgaggcaagagaatcacttgaacccaggaggcagaggttgcagggagccgagaatcgcaccactgcactccagtctcagcgacacaacgagactccgtctaaaaataataataataataaaataaaaaattatgaacattagacaatgaaggataagtgtgaagggtttaaaaaggaaggtacagagtattgtctgtttttcaaaagtgacttttttttcttctctatattatagtgctactgtaaacaaccttcaggcaaaagtagatgcattagaaaaatccaacactaaactgacagaggaggtaagttttggaaatgctttgattgacttatagaatttaatatgcattagtagaaccaataattttaatgtaaccttggaaagaaagaacttgacttttcaaataatattgactgtagtacataacttcttattctttttttttttttttttttttttgagatggagtttcgcttttgttgcccaggctggagtgcagtggcgcgatcttggctcaccgcaacctccgtctcccaagttcaagcgatgctcctgcctcagcctcccgagtagctgggattacaggcatacaccaccaccccggctaattttgtatttttttagtagagacggggtttctccatgttagtcaggctggtcttgaactcctgacctcaggtgatccacccgcctcagcctcccaaagtgctgggattacaggcgtgagccacctcgcctggcccataactccttattctgactagaacggcccagttggcttattgcagggatctcatttacccaattagactgtgtaggggcatgttgccaggttgatggagtatcttggtttctttcgtgtgcatgttttgtctgggctagcctagattaaatgtttagcatatagcatattcatcatttattcagtaagcgtttcacacagtttatgtgcaagagctagacaaatatttatatgtgccaggcattgatttatgttccagattggcaaactccccaccacttatgtccttgttttcttcctgggacagttacatagataaggtgaagagtactggtcagaagatcagtaatccctgcctacaaatcatgcttatgtaactcatgtgctcctgagtaagtcagccacttgacctccaagaggctgagttccgtcactggaaaatgagagtgtttacaatacacttccttttcggcctcacaattaactctgaagatcagataagaatatgaaaactcttagaaaagtccctaaaataagaacagaaaaataacctcatgttttacttctaataaaaatattttttccttaacttgccaagccttagctacagatattttttctttaaatagcattagatggttttatgaaaaatactaaataacattgtccagatggcaaagagtttaccttccttatttctttttctttttttttttttttttctgagatagggtatcattctgttgtccaggctggaatgcagtgacacaagggcttactgtaacccccgccccccgggctcaagtgatctcccaccctcagcctcccaagtagctgggatcacaggcacacaccaccacacctggctatttttagtagagagggggtcttgccatgttgcccatgctggtcctgaactgctgagctcaagtgacccgcctgcctcggccttccaaagtgctagaataataggcatagccactgcgcctggcccaccttctttatttctaattgtaatgatgcccttacaccccatgggatgaatttagtttaaataaaatcaaattaaagcactagtcaggaagatgcttttaatcagtttttctttagaatgaacattttcattattatagttttaaaataccttttttattactcaactctgtgaccttcactttcggacaaaaatttttaaattttatatatcttaaaactttatgcttagggtccttagaatcttatcacataggcttttggaatgttcagcacagattttttactgttattctgctgctactatgttgaagcagtacagcatagcaattaagcatgatctctaaagttaggctacttgggttcatgtcctggctctggcacttgctagttttttgtttttttgttttgttttgttttgttttttgttttttgttttttgagacagagtattgctttgtcgcccaggttgaagtgcagtggtgccatcttggctcactttaacctccacctcccggttcaagcaattctcctgcctcagcctccgagtagccgggaccacaggcatgcaccatcacagctggctaatatttgtatttttatagaaacagagtttcaccaggttggccaggctggtcttgagctcccggcctcaggtgatccacccgcctcggcctcccaaagtgctgggattacaggcatgagccgccgtacccagccacttgctagtcttctaatcctgggccaattacttaagcttctattccttgatttatttatctataacatggaaatagcaataataacattttatgagattgctgtgtgaatgaaatgatttaatacatgattagggcttagaacagtacctaacacatcataagcactcaataaatatagttgttaattttattccctcagtcataagacttgtcttccttagagtcatattaatactaacaatatttattcattgacttatttattttaccagtagcacttattttcttaaagaaaatatgctctaagagagtagacgaggctcattagttctgccttttttcatttccattttgggtttaagaaagccagtaaggccaggcacagtggctcatgcctgtaatcccaacacttgggacatcaaggtgggtggatcgcttgaggccaggattccaaaaccagcgtgggcaacatagcaaaaccccatctcacaaaaaaaaaaaaaagggccagtaaaaaagatagcagacctcttttcccctcctgggttttgaatctgaatgacaaactaagaagaattaagcagatgaagatataaatatccacttcaggcctggcacagtgactcacacctgtaatcccagccctttggaagccaaggcaggaggatcgtttgaggccaagagttcaagattaggctgggaaacatagtgagaccccatctctacaccaaaaaaattagccggctgttgtggtgcacacctgtagtcccagctactcggcatgctgaggagggaggattgcttgagcctgggagaccaaggctgcagtagccaagattgtgccaccacactccaacctgggcaacagagggagaccctgtctcaaataaataaatagataaataaatgtctacttcattattggtaaagctgaattggaaagcctcctgtgatctgcagccataatcaggtttcccaatagtttctcttaaatcaagattttggaatgacctgcctgagggcatacttgaatctagagaggagacctacttgcccagaattggtttcgtgcacatttttaggccacaggatctgagagagaattggacttccaggcctgcccccagaaagcatgagcttctctgtgcttaccatgttaggacaggaactgagcagagcctgcacccactgctaatgaggagataataattgaggagactagcctggctgagaggagcctgcttggttattcctctcggcctcatacaggcaccttcacattctccgggagtttagtagatgcagagaagaaaaaagtgtttccaccttactttttccttctaagaaagagatataaatgtttccctgtagcagttgactgctaataacgttacctgatctttttaggtgttgaaatgaaaaatctcctcaatgcttaatgggatcttttagcatgagaactttggagttcatgtctttaatcttttaagaaatcatctataaaagatcttatagagcgtttgtcacatgggttccatggtgtgacaggacccctttattaaacattttagaaatagacattattaataaataatttttttcttactaaatatgtgtacatctataagaacacccttgagataatcttaagttaaaacttttcatataaaagtagcagtaaggtgatattttatttcttttttttttttttttgagaccgagtttcactctcaccaggctggagtgcagtggcgcgatcttgatctcgggtcactgcaacctctggttcaagctattctcctgcctcagcctcccgagtagctgggattacaggcacacaccactacgcccagctaatttttgtatttttagtagagatggggtttcaccatgttggccaggatggtctcgatctcctgacctcgtgatccgctcgcatcagcctcctaaagtgctgggattacaggcatgagccactgcacctggccaaggagatattttttatttttatttagactgctctaaaaatatttcttggtcgggcgcagtggctcatgcctataatcccagcactttgggaggccgaggtgggcagatctcttgaaggcagaagttcaacaccagcctggccaacatggtgaaaccttgtctctactaaaaatacaaaaattagttgggcgtggtggtgcatgcctatagtcccagctacttgggaggctaaggcatgagaatcacttgaaccaggaggcagaggttacagtgacccgagattatgccactgcactccaggctgggcaatagagtgaggccctgtctcagaaaaataaagaaaaatatttctcttgagttcttataagaacatttttattgggttatagcttccttgctttctaagaatatccaagcctgagaattacatcctagcagatcgtgaattatcttatactatgttaattttaaaaagataaaagattatttttaaaattttatccacagcttgcagttgcaaacaacaggatcattaccttacaagaagaaatggaacgagttaaagaggaaagttcctacatactggaatccaatcggaaggttaatcttactggatttataaaatattcactgagagcatatcaacttgttagtggtaaaggggagtctctaaaggactattttaagcagctggcctgtatcaagcacactttttatttagactccatgcataattgtgtgatgaaggttgtgggagggttatgcgcctttttctacaagatgcttcgtggcttcacagccacctacatctgtttagagacttcaagaaacagtctaattcagtttcttgtttttatgtactaatggttcaaacagtatttaataatttgttatgttaaacatactattacttttatagcatgttactgttttgtaagaagtgacaccttatttatatatcactgggaaagagctaccatataaatgtattttctacataacttaattccttaaagtatcaaactttttatacatgtctaattagaattttgtaaacctttatgttttgtacaattccaagccttcttaattaaggacataatttaatacatttagccctttacgatgactgaggatcattaattaccaacattgacaattccctactaaattataatagtgccactttaggaggctattgaaattgatagagcttctgacacctacacttaaatattccccgatttctgtggatggttttttttcctgtcttttacgtattcaatagcatctcttactttttactgatgctcggtgttatctttaggatgatctctactttcttttatcttcatgcttctaatctactctccctaggaattcaaatccatagttattaaaattgttcttaaagagttactaggctctgcgaggggacaaaagcagttttccatgagtaaagtgattgactttaataatgcatggacttcatgactgctcagaataatttttttatgacctgcttgtttttatctgtgatcttgctggatagttgaagataaccagttgcgaattctctggagattgaatgtattaacatttaaacctatagcccctgggctgggtgcagtggctcacgcctgtaatcccagcactttgggaggccaaggaggcagatcacttgaggtcgggagttcgagaccagcctggccaacgtggtgaaaccccgtctctactaaaaatacaaaaattagccgggcgtggtggcgcacgcctataatcccagctactcgggaagctgagacaggagaatcgcttgaacccaggaggtggaggttgcagtgagcagagattgagccactgcagtccagcctgggcgacagagtgagactccgtctcaaaaaagaaaaaaaaaaaacctataacccaactcatattttgaaatgaatgctatgttatttttagaggctgatttttaaaacttctaccatctggtttggaaacctattttaggattttaaataaagtgtcaggaagcccccaattcagcttaacctttaaaaatgtactagacttcaatttctttgttgtgtttgttcattattatacctgcttcagtatgatctttttttcttgctaagtagcagtgttagtgtctaattctgtatagattaaatccttaaatatgtacaatgttatttatcttttcaagggtcccaagcaagacagaactgcagaagggcaagcactaagtgaagcaagaaagcatttaaaagaagagacacaattacgattggtaaactatgcttaatttctaatagttcaggaatatattaaaaggtaactgcccacttagaggttttatcatacagaccaagattaggaatatcagtagtgttctgaaaaattctagatcctataaaatggttcatctctttttaacccacattccttatcatactttctcaatctttttctgagtattctcaacaagattttgttaatctttatttttttgcttttatagtttgtattacaagaatattaagtatacagaacctacttttttaaactatgccgtctcactcctacctaagtcctcatccctgcaaagattcttggaggtggtggctcctcttttctttacaaagaatcattaatgtaggattactctattttatttttagctgttatttctgatttattattggtcttagatataaatggaaaatttatcatccagtattagtcttaagatttttttagaaattaaaaaaaatacatatcaatatatagatagagagtatatcatctcactctaatcagaatggcaactatcaaaaaattgaaggataagtgttgacaaggatgtagagaaagagaacctttacacactgctggtgaaaatataaattagtatagccactatggaaaacatagttgtcttaaaaaattaaaaatcgggccaggcacagtggctcacacctgtaatcccagcactttgggaggctgaggcggatggatcacgtaaggtcgggagttcgagaccagcatgaccagcatggtgaaaccccatctctactaaaaatacaaaaaaaaaaaaatcagccgggcatggtggcatgcacctgtaatcccagctacttgggaggctgaccaggagaattgcttgaacctgggaagcggaggctgcagtgagccaagattgtatcactgcactccatcctaggcaacagagccagactccgtctcaaaaaataaaaaataaattaattaaaaatcagtctagcaaaagatccagcaatcccactactggggatatatccaaaggaaatgaaatcagtatgtcagagagaatctgtactcctatgtttattgcagcactattcacagtagccaagatagggaatcaacctaagtgttcatcaacacttgaatggataaagaaagcatggtatatatacacaatgggatgctattcagcgataaaaaggaatgaaatcctgtcatttgtggcaacatgggtgaacctggaggacattatgtgaagtgtagtaagccaaacacagaaagagaaatgccatatgataacactcatacgtggaatctaaaacgttgttctcataaaagtagagagtaaggtggggttaccagagggagaggaggcaggggatagtaagagattggtcaacaggtacaaagctatagttagataggaggaataagttctggtcctctgttgcatagtgtggggtgactagagttaacaataatacacattttaatatagttagaagaaaggtttttttttttctttttttttattgatgcataatagatatacatagctctggggttcatatgataatttaatatactcatgtagtaaagaccaaatcagtgttcttggtatacccatcaccttaaatatttgtcttttctttatgctggaaaaaaaagaggcttttgaatgttctcatcacaaatgataaatgtttaagatgatagatacattcatttctctgatttggtcattacacaatttttatattatcaaaacatcatgttctataccataaattactatgtgtcagtcatactttttttaaaaagaatttataataagggatactattcctgtactagattttatccaggtgctagtgttattatattaataacccctggtattcacatactaactcttcctggagtttagatagtataacaaacacaaggacctccccagaatgtctttaagaataaggaggagcctgaaaataaggggtgacttaacttgtactaaaaaattattacaggccaagcgccatggctcacacctgtaattccagcactttgggaggatcgcttgagcttaggagtttgagcccagcctgggcaacatagggacaccctatctctacaaaaattacaaaattaaccatgcttgatagtacatgcctgtattcccagctacttgggaagctgaggagggagatcacctgagcccaaggaggttaaggctgcagtgagccaagatcacactgcactccagcctgggtgacaaagtgagaccctgtctcagaaaaaaaaaaaaaaaaaaaatatatatatatatatatatatatataaaaacaaattgacagtatataacataattttagatttatttatttgtttttttttttttttgagatggagtcttgctctgccacccaggctgaagtgcagtggtgtagtctcagctcactgcaacctccgcctcccaggttcaagagattctcctgcctcagcctcctgaatggctggaattacaggcgcctgccaccacacccagctaatttttgtattttagtagagatggggtttcaccatgttggccaggctggtctcaaactcctgaccttgtaattgtgatccgcctgcctcagactcccaaagtgctgggattacaggtgtgagccatcacacccggccagaatttcagattttttgaaaacaaagcgatattattttgacatccttaaaatagttagcatttgccttctatgtatttgtgaatgagatctcaaaatataatacttttcataagaaaggtcgcagaaataatatatgtcagcattttaagaaggggtatgattcgttttctataatgctaatcaagtaaaatgagaatctcagtgaagtggcacataataaaaatcttaaaatttttcatatccttttatcacagtaagacaaatgtttgttaagaaggaaagaaactaagaaagtatttgaggtcctaggtgagcccaaggcacaaggcagatgcagaagatcctcaggtctttgtatcttcgatcacccacataatgttgcagtaataatggttgaaacaaaaagaggtttcatgttaagtgaactaaaaattctgttagcggccgagtgtggtggctcacacctgtaatcccagcactttgggaggctgaggcgggcagatcacgaggtcaggaattcacaccagcctggtcaacatggtgaaaccccgtctctactaaacatacaaaaaattagccaggcatggtggcatgcacccgtagtcccagctactcaggaggctgaggcaggagaatcgcttgaacccgggaggtggaggttgcagtgagccaagactgagcccctgcactccagcctgagcgacagagcgagactctgtctcaaaaaaaaaaaaaaaatctgttcgcctcgtaaccatactagtcatcatcctcagtaattgcgatgttaccccagggacccagatggtcctctgggttccctgggctcttgaatatatcaacaacattcacatttaggaggactgcaactgcttcattttgtgctgactgctgtaaccctgtaggtatatttctataataagatatgaccatcagttgtcgtaatatctactgaagtgtctcaaatatgtatatattttagatgtattaaataacactatctttggcttagcaggtttttcagatttgtacattattgggcaaatgttattgtatatcctaattattattgttaattattaattaattattgttaatgtctctgaaaatgaatggtagcttaagctattttgccagaatattcagacctgagagttttggtgtactttttcctgtgaaatattatggtttgtacttagttgaaggaacagagtgtaagcaatttacttacctttgggggcaggatgttgagaaagaactggagatgcagatcagcatgaggcaggagatggaattggctatgaagatgctggagaaggatgtctgtgagaagcaggatgccctggtatctcttcggcagcagctggatgacctcagagctctcaagcatgaacttgcctttaagctgcaggtaggggaaatatgaggaatagactcactggctctctaaaatcctggggcttccctcctcccatctgatcctccagaatcacactttaattacaagaggaaagaatcacatctcattttgatgctagctgccagtaaactactttcagaatcagacaaccatgggatcctgtattgctgttctagaaaaccatggccacttttcacattatagtagaggatgagggtcttttttatcctatagggtaatttctactctgcagtctaccgtgccagctaagttatatattctattagcttttacactggaatgtgatacattgatgaactattactgtgatcacactgcatataacaatactaactttagataaattgcttttttttccatttcaggattaactgatattgaaatatatgaacatttctgttttcccacttaccattagattcaaaaggcatgtgtggttgtattttaggatttatgttatacaggttgtttatcgttattttccataacagagttcagacttaggagtaaaacagaaaagtgaactaaacagtcgcttggaagagaagactaatcagatggctgctaccattaaacaacttgaacaaaggtaaaagtcctgtttctttaatgaaacactttggattgtcagtgctgaagtgaaaagaatgtgctgtacattcggcaaatagaaaatacatgaaattcttccaaattagcatcagacattctggtagaaaaaagccagttgaatgttatgtgtgttttctaaggtatgactgaaatgtttttaggaaatgtcaatcacttgactagcctttaaaaaaaaaaaagaaaggtcagccttttatgactgttttgaacatcagaactcttaatccatgtcagagtcatgtgttagaggaaggatacttaaaagcatggaaggactcttaaatgtatgtatgtaattctgtgattttattgttcatcactgaagtctttgaatacttggatgctaggggatatagaggcactgagagataggtgtcctccaaggatctattctggatctttctctcccttctttaacccttttctcttatctcccttttctttctcctgggtagttctgtagcttccactgtcacctccagtgtgttttcccagctcttaccttcatctggagaccagtcttgagttttcatcctttgggcagctatcttccaccagtatctacaattcagtctgcccaaagcacatcttcttcctatgctactctctttctgtgcttatgtgaaaccaccattttctctctggcaacttagcagccaagagaaatggctgagtcttcaaggatgaatgtgacgtggtacccaaggtcatttgatgtttctacccttaacacctgtttgtcacccttcttgcacttgagcaaaactaaactgctggtccctgtacttcccatttttcccatttatttctttcccaatagttccaccaattagaaatgtcctaattcttcccactcccttattcgtcagatacatttttaagtttaggctcaaatgccacctccccagagtttcctctgatacctctttgcagctagaaatgatctgtctttctgggaactcccatagcttcatactcatatctatctatactgcttatggcacttctcactgtctactgtaccttttaactctttatatatgtctcctccgatgcgagtgtaagctccctgagattagttaacgaatcttttaagttcccgtattagatctgtcgcagtgccttgaatatacaagcattcattcagtagatatatgaatgaatggattaatgggtgatttcttatattcagatgattcttaaccagtaagggtcctgaacagcagtgcatattaatgttaactcaaaacttaatggcaaatttataaataaacctgaaacctcttacatagccaaatacaaatgtatcagtctacctaggaaagatggttaggtacttgctcataaacagttatatgtttatgatttaacaaaatgattttactgttcataaattgtgcttttgaaatgaaatgtatcaaatttcttttcaatgatgttttgacttggaatttaaagcaaacagaaagagaataatgacttatctctttgagtattaagctgacttattctcttgctatttttgtgtttcctgtttatccattttctcattctcctttcacttcattgtcatttttattttatttagtgaaaaggatttggtgaaacaggcaaagaccttaaatagtgcagcaaataaactgatcccaaaacatcattaggcatttttaagttggtcacgtcgcaagtccgatatcacaacttaattgtaaaaggaagaaatctgaaagttactacatttaagctctgattctatataaaatgtcaccaaaaagttgactttgaatttgttggacttttaaaaaaccagttggaaatataggttgggtttttttcttattgttttctccccagggttagaaaaattggtataagttcctaattaaaagctgaataaactttgagaaattatttctgagttgaccaataaataaaaataccactttctttaaaaaagcctagggaattgaagctctgtacatatactaatgatgcctttacaacccagtccttgataataccagattctcggtgcattgttcatgtctgtatctgcaagcctgttctgccattgcagtgtgatgaacctagaggtaactaccatgtgaacttgaactcttctaaaatagttctgtgtctcttagaccatgaccccttttcacttttgttatataggtttaatccccaagccaaggatagtacttagtatttcactacacttctattctcagtaaccaagattgcttgcaactttttttgccttggtgacttttgaaaaaaaaagaaaagaaaaagcagcatccttatatttctttaaaatacatagaaataaagttagtaattaggtaacctatgataacataataatgtggacgcctggggaaaccctcctcatgtttgtcatcttctacctctgccgttttcctgcaattccgcttcctacttaggcagttcagagagaacaattctaataaaaacactcctctcctattaacaaaaaatgatgcagtacccatttttcgtatcctgcttttcttatattggagtaaaaaggacagggtatagacatgaatgatgatattctgcctggcctgtcatttcttacctggaaacatttacttaagagtttctgttactttttgttcagatggggatttgctaaaggttctgggaagctaataattgaattattagaaaaacatttcagaataggaagtaaatgataaacttatattctttattattatttagtacaaaaatagattcccagtagatatccacaagcaatattagcagggcttctgtttctaagtgaccacagactaaccctttctaggctttaacattgtaaataatcctataaacagtttgattttttaagatgatttttgatttgaagagacaggctttacataagccttcattccttcaaaaggtcctgacaaaatacttgggtttttttctctttttttcattctggtatgctttgcagcatttcagctgctttggtggggacacagataaccccttcgcttccagctcttaaaattctttatctttttcttggcaaaaccagaattaagagtgtaagatagattccatgtgtgcttatataggtccctgcacagattggacttgaaccaaaattaagtccaaagaacatatgtttagaccaacttcatggaagtggaagatcctgtgctcttgaacttattttaattcttataatttgcacctatataaacaaagctcctactgtattcttctcttcatcaaccttttgtggtgatgggttgccttttctacgagcatttggaaggagtgatcaaataccgaaattgaactttctaaaacctacacatagcatgcgtttaaattctattatataaagccccaagtgctttaccttctaaaacatgcttctctataggtgcaaagttataagatatgtagaagaaaacatccatcagaatcttctggagaatatggtcagagtcttaaacaggcccagtgctgagttctttgtccacttagtcacacatcttttgtgggaatgggaaaggaaggagacagccaaactctgacaaaggcttttccttatagaataacccaaagcctaggtgagggttgatatataatgtcccatgatttaatatatgtggtttgggggaaaggacaagaaaaaactataattccacatataagaaggtagttgcccatttacaagttccagttatgtgtgtaaaacagaaaaattaagtaccaaacctattaggaaatttttttaaaaagtggatttaacttaaattactgtgtacttgaggttggctttggatatggattttctaaaaagtgatgttttattgtttatcatctaatggctgtaaactgtagtactagaataaaaaaaatggaaaatcagcttttcctctgcctggttcaccttcatcttacttttctttagaatttgtttcttctccatcttttcccccccataatttcttcacctgtgtcctgcaaagtttttttcctctctctgtctctctgtgcattcttccttgggttattttattttgtgttgtgaacttggtcttcttccccaccatggcttttgttttttatcacaagttcatgtggctcacatccagattgcgccaggctgagcgaagccgccaatctgctgagttggacaaccggctcttcaaacaggactttggagacaagatcaacagtctgcagctggaagtcgaggagctcaccaggcagcggtgaagagggggtagcttgagctgacagggtggtcatgggtaattcttagggtagacagcaagaaaaggggtctcatgacttccagccaggttggctctgtctttgcaatgtcctttctctggaattggaattcagaaagcttcacgtacttcaacattccccaaatccgatcaacatgctttgtgatcaaagaattaggaaattagagcccaagatcccagataaatagtaattattagccaaaataacactaataataatatgtaatatttcctgaattcttactgtgtgccagatactttaggcacttcacatgcaaactctcctaatatcttcatatcaaccctattagtgatattattgcctccactttcagattaaagtagagcttaaggctgggcgcagtggttcatgcctgtaatcccagcactttgggaggccaaggcaggtgtatcacctgaggtcaggagttccagaccagcctggccaagatggtgaaaccccatctctactaaaaatacaaaaatttgccagacatagtggtgggtgccagtaatcccagctactcgggaggctgaggcaggagaattgcttgaacctaggaaatggaggttacggtgacctgagatcatgccactgcactccagcctggcaacagaacaagactccatctcaaaaaaaggtagagattagacaggttaaatgtgtccagattcacacagttaagcttagaagtagcaacattatcatttaaaaacctgtctctctgacagcaagcccttaaccattcgtaattactgcactttaagacaaggggttggcattctttagagaatatgtctgtatagaattccaatttttcatccttttcctctccaacttacctcaggaaccagcttgagttagaactaaaacaggaaaaagaaagaagattacaaaacgacaggagcatcccaggaaggggttcccagaagtcagaatccaagatggtaatatttgctattcccttgttcttttacttaatttcagtttaaattttagaggctaccttgatagtcctgtcagttttcctttacagatcacatacttagtggctgtgtcctcaagtatgtagatagcaaactagtaattatgtgaacaaatgaaagcttgattctgagtctgcctctaggatactttctccaacttgatttcatttggaaagggggattttaataatcacagtgaccctatttcccttttaataattttttaagtaagattattttggtgtcttaacaaaaatatatgtttcttggatttctgctaaataataattttaataaaatagtataataatccctctccaaccctgaattcccctttaacagaattttcctcaatgtggatttgcttctgtatacctttttcaaatcatgaggatttcattttgagtatccttaaggaacttctcgtgggaataattagggaattaggcttgaggaaaggaaggtaatacagaataaagagcaaaagtagaaatttctacataataatcttagaaggagacccctccagcacctccagtgatgaaggagctacaattgggtaagatcatctctggggcccaggaaataatgaaatcagaaaaacataaaataactttttctgtaaaagacagtgaaaaaattgccttctgtgtgtacatattatacaaggcgacttcaaaaagatcatgggaaatggaattaaaaggtaaagatatataaactttatttctcaacctaagttccatcaagttcaagagactttagtaagtgatgatactagtcatgtaggccatccctgaagaactgagggtcctaggaatttaatcatatcaatacaatcttttttacattattaactgaagaaaaattggtgcactttaatgatgttttaagattaggaaacaaaaagaaatcagaggcaccaaatcaggactgtaaagtggatgcctaatgatttcccatcataactctcacagaattgccattgtctgatgagaggaatgagttaggagcatatttctggtggaatagcactctctgttgaagctttcctgggcatttttgtgctaaaactttggctaactttctcaaaacattcatcacaagtattagccaggtgtggtggcacatgcctctagtctctagtcccagctacttgggaggctgaggcatgagaatcacttgaacctgggaggtagaggttgcagtgagccaagatcacaccactgcactccagcctgggtgacagagcaacactctgtccccaaaaataaaaaaaattaaaaacactctcacaataagcagatgttggcattctctggccttccagaaagtcaacaagcaaaatgccttcagcatccctaaaaactgttgccatgacctttgcttttgacccgtctgcttttgctttgattgcaccacttccacctcttcatagccattgctttgattgtgctttgtcttcaggattgtactatgaagttgttacatctcctgttacaatttctcaaacaaatgcttcaggttcttgatcccacttgtttataatttccattgaaagctatacttttgtctgcagctgatacgggcacaacagttttggcacccatcaagtagaaagtttactcaactttaatttttcaaccagaattgtataagcctaaccaattgagatatctgtggtgttggctattgtttctactgttaattgttggtcctcttcaattagagcatgaacaagatcctcacaaattgatgtggatagtctgctactgcaggcttcatcttcaacatcatctggccccttcttaaagtgagttatccttttgtaaactgcccacttctttggggacaatcctaaagcattgtccccaaaagctttttgtaaagcatcaataatttcacaattcttccatccatgcttcaccaccaatttgatgtttgttcttgcttcaattttagcagaattcatattactctgataggggctcttttttcttttcttttcttttcttttttttttttttgaaacagagtctcattctcacctagaactgagtacagtggcacaatcatgcctcactgcagcctcgatttcccaggctcaggtgatcctcctgcctcagcctcctgagtagctgggactgtaggcacacaccacaaaactcagctaatttttgtatttttttggtagagtcagggttttgccatgttgtccaggctggtcttcaactcctgggctcaagcgatatgcctgcctcagcctcccaaagtgctaggatgacaggcatgagccaccgtgcccagcccggggttcttttcaaactgatgtcttatcctttttagtgactcaaaccaaatcctgattagatatattaaaataagttaatacaagtttattttggtgcgaaatatttttgaagtccatgcacagtcttttcgtaatacgcgttttccatgaactttttgaatacctctagtatataacaaagcaggaagagttcataaactatttaaaatttctagagagtgagctgctaatttactggcaaatagaaaacaatggtatgtggaaatttattaaatagtaccactactaataatttaaagtgtacaaagaaccactctaggccaggcacggtggctcacacctgtaatcccagcactttgggaggccaaggtgggcagatcatgaggtcaagagttcaagaccagcctggacaacatggtgaaaccctgtctctactaaaaatacaaaaataagccgggcatggtggtagtctcctataatcccagctactcgggaggctgaggcaggagaattggttgaacccgggaggcggaggttgcagtgagccaagactgagccactgcactccagcctgggtgacagatcaagactccatctcaaaaaaataaaaaaataataaaaaaaaacactctgtgtagcatgctatctttattattttagtttagtgaacataaaatctaaaaggcttacaaaagtttacttaaaatcttggcctacctcaccctatttttccaatgaggttttaagtttttcagtcttcagttgttgcctgcagtggcatttccaggaggataagtattgacctctcttccttgattcttgagtggtgtaagaacacacatctcagctgggtggctcacacctgtaatcctaacactttgggaggccgttggcatgaagattgcttgatcccaggagtaagagactagcctgggcaacataggaagacctcatctctacaaaaaaatttaaaaattatctcggtgtggtggctcgtgcctatagtcccagctgctcaggaggctgaggtaggaggatcacttgagcccaggaggttgaggctgcagtgagctgtgatcatgccactgcactccagcctgggcaatagcatgagaccttgtctcaaaaaacaaacaaaaagaaaacacattccacttttggatgcacatgggcagcagtcgaaggcgggcagcagtcgaaggcaagcagcagtggttgtgtgtgcctcagaaaaaaatgtagcccttagaactgcccagcaccttgccaggcacagtggctcatgcctgaactttgtgaggccaaggcgggtggattgcctgagcccaggagtttgagacaagcctgggcaacatggtgaaaccccatctctactaaaatacaaaaaagtatctgggccttgctgcgtgcacctataatcccagctactcctgatgctgaggccagagaatcgcttgaaaccaggaggcagaggttgcatgaaaccaggaggcagaggttgcagcgagccaagatcgtaccacagcactccagcctgggtgccagagtgagagtctgtctccaaaacaaacaaacaaaatttgcccaggcagggcttaagagtattggtagaaatgcagtttgaggctgggcgtggtggcttacgcctgtaatcccagcactttgggaggccaaggtgggcagactacctgggtcgggagttcaagaccatcctggccaacatggtgaaaccctgtctctactaaaatacaaaaattagccatcaatggtgggcgcctgtaatcccagctactcaggggctgaggcaggagactcgcttgaaaccaggaggcagaggctgcagtgagccgagatcatgccactgcactccagcctgggcgacagagcaagactccgtctcaaaaaaaaaaaaaaaaagagaaaagaaaaaagaaatgcagtttgaaactttacatctgtcctgccaagtagaaaattccttgagttgaacaggctatagagatggtggcactgggccgggtgcgatggctcacgcctgtactcccagcactttgggaggccgagacgggtggataatttgaggtcaggacttcgagaccagcctggccaacgtggtgaaaccccatctctactaaaaatacaaaaattagctgggcatggtggcgtgtgcctgtaatcccagctactctggaggctgaggcacaagaatcacttgaatccaagtggatcacttaaggtgaagagttcgagaccagcctggccaacatggtgaaacctcgtctctagtaaaaatacaaaaataagccaggcacggtgatgcacgcctataatcccagctactcaggaggctgagacacaagaatcgcttgaacccgggaggcagaggctgcagtgagacgagatggcaccagtgcactccagcctgggcgacagagcgagactctgtctccaaaaagaaagaaaaatattgtggcactggggcatcaacttgattgaacgtccagaggattatagtctgctgtatatggccatccttggttttaccagtttttcagagctcagtctggggaaaagaaaaaaaaaattatacttcccctaagaagtaactgatatctggagccaactttgcaagtaagtagaatacattctgaattttatttgaatctcaagaattaaaatattactttgaaaatcatttgtcacaaactgtcagaataattaagaaactacttagagcaaagaatgaggaaacatagcttgaaagttagatcccttccctaataaaaaaagctacttagctttatacccaaactaaggcattgcagaagaaaatatttgcaatatcattatttagcattctgaataattaataaattgggctgttttcttttggcaggatgggaagcacaaaatgcaagaggaaaatgttaaactaaaaaagcccctggaagaaagccacaggtgtttgttaatcaagtattaactaagatgtaaagttattctggggtggtgggaaggagggagttctttatatacattggcattgacaccgaccagacactgacttataatattaatatgccaggaagacatttgaagtggaagttaataataaaacgtataacatgtattaaaccaaacccattaggccatttcagaggaaagaaggatgatcaggctgtcctctcttccctgattaattcccaagctcagattatcacttaagaggttatttcccacctttactgaattggtatcccaggaaaataaagtataagtcatacatagcatttcttaacttcttaaatatatttgagtatgacttgtttctacctctgtgctaaatttcaaataagtggctgggcgcagtggctcacgcctgtaatcccagtactttgggaggccgaggcaggtggatcacctgagattagaagttcgagaccagcctgccaacatggtgaaacccggtctctactaacgatacaaaattagtcgggtctggtggtacctgcctgtaatcccaactacttgggaggccgaggcaggagaatcacttgaactcaggaggcagaggttgcagtgagccaagatagcgccactgcactccagcctgggcaatacagtgagactctgtctcaaataaaaaaaaaagttcaaataagtactctgatttctcttatgtctcatctctcatttttcctttatcttgagaatctcaaacagcttaacttcattcctttatcctaactctgtctgatttgctcatgatgaagagcataggatagtttcaaggaagctgactttttatagttattttagcaggttagaaatataattaaatattacatagtgccactgcattaaaaagtgaaggaggtccagttacatgacattctggaaaagacaaaactatggagacaaaaaaaaaaaaaaaaaatcagtggttgccagtggtaagagaaggaaggaacgaaccggtggagcacagaggatttttagggcagtggactactctgtatgatactatgatggtggatacatgtcattatacatttgaccacactatagactagacaccaccaagagtgaaccttaatgtaaactatagactctgggtgatgatgttgtgtcagtgtaggctcatcagttgtaacaaatgtaccactctggtgcagcatgttgacaaagaggccagggatggggcaggaagcatgtgggaagtctctgtactttctactcaatttgactgtgaacctaactgctctaaacataaaggtctactttaaaaggtggaggaagaggttagtgatgaggaatgataccacagtgaggttttgagagaactatacagctgtccctagccaggcttcgtcaccttaagaatgaggtagtgtgtcatctggagcaaaagtagctgctggagaagagaaaacacacagtccaatagtaagctaattatgcaggtgcttggcctaaatgtccctttctggccttgctcccaaagagcatggtttgatccagagctaactttaaactatcacccatctcacattacagaatggcataagcaaagagaagggaactagaagggccataaaattaacctgggcttccaggtgcctttcagggtcagcctcgttccaaactaaaatcaaatcatttacttgagcaaccaggagtgtcttaaatgccaacttctgatttaggtcctgagaatatggaacagtgcttccttatatctgaattgtgctctgcaacttagaatttgtttcacatttattatctccttatgattcagtattccttacaaaagtacctaatgcaactttacagatgagaaaactgagaagcagagaggctgggtgacttatccaagttgcctctgtttatcatgtctactgtttttaagtcctttggctctgcactacctattagcaacttccaggacttattctggccatagctgcaatcgttagacataccaggcttcctgggattatgatggcaaggaacatcggaaaacctggtcaccccatggtgtatgtctggtggtcacactgctactcaagtgaaaagaataagaaccattgcaatctgtagtgcattttccctgtaaccgagagcgggctttgcttcacctctcatttaggctctagtccatgctggaacatcggagttagctcagcttagtccctcatgaagaaatatttcaacctgaatgggttttctggtgacagtctcattcatttccccttcttgggttaatttgctaaagctcacatcttaagaatatttgggactgatacacaacatgtgataatggataatggatagatttccataatatcaaatagaaaaaaagctactaaaatatatggccagtgaaccattggagttttacacattgggaaacataaatgctaactattttgatagcaaaaaggaatgtaaaatataacttcaaatctatttttaaatgggaacccttatataataagtcaagggtcagattctagtgattcattttaagaagcaaagtttcctctccttggaggtcaaaattaataattatgttgttctaagtaatataaaagacctacagtatttcttgtttgaaaaaaatgtttgtattctgagctttttattgaaatgatataaatgaaaatacatgaagttcctatttgtcacaattttttacttctccattgtaggctgcaaccccaccctatggatgaacaggtaacagagcctcctgtttcaaaacatcttgtatgaattatgaagttggttgtaccgtgcctagccagcaaataaggtagcatgggcggaagatgagtgaatacagtgtgccatccttctaacaataccctgaacaaatatgtattgcctgaagctcacacaggaagtagcacagctttgagcagtttactaagtaaacatcagttctcacctattttaaattatccctgacataagatctaggagagctcactttatgtccctttcctctagtttttccttacataaaatggagagaaaaaagatgttttgatcacttagaaataagctaacataaatgattgtaaaacactttgttaatctaatagtatatgataagcccatgagaaagacagtgaatgctactgtgtctgagtcaccctgtcatttacctcttaggttataaaataaaataagtcctactgctttcctttttttttttttaaatggagataaggtcttactcacattgcccaagctggggtgcagtggacgatctcagctcactgaagcctcaacttcccgagcttaggcagtcctcccacttctgcctcccgagtagctagggctgcagagattaggtttcaccgtgttgcccaggctggtctcaaactcctgggctcaagtgatcttcccgccttggcctcccaaagtgctgggattacaggtgtgagcttccatgccctatgcttgccattctttttttccttttttttttgagacagagtctcactctgtcacccagggtggagtgttgtggcacaatctcagctcactgcaacctccgcctcccaggttcaagtgattcccctgcctcagcctcccgagtagctgggattacaggcgcccaccaccatgtccaactttttttttttttaatatatatatttttggtagagatggagttttgccatgttggccaggctggtcttgaactcctgacctcaagtgatctacctgccttggcctcccaaagtgctggcattacaggcgtgagccaccaggcccagtccccagtgctttccattcttgatggtagagtgaacaagaggaatgggatagtgttaaaactttttactctatacttgcatgtgtttgaattttctttttagaaatcatgttattataaaaattaagagctggaagcataatgataggattatccgagttgtattatggtggtaggactacctatttataattggtttagtttccagatagtctatagtgtgattatattaatattgtaggtaaaaaatgcatattctgaaagtactaatatttctggcactaagaaaaactaaccagctccctgtgtggtttaggatcagctgctgctctctgaaaagccacagttgtgtcagctatgccaggaagacggcagcctaacaaaggtaactgtgatgagaaacggacaggcttttcatagggatgtctacagcagcccccagtccctccccaggagtaacagggactttcccgcatagagtgcagagtgcatgcagagtgctgggagtggggtgaaaagcaaaaggggcaagcatttactgggtacctgttttttcagtcataataattcatgtcagaaaattcccattaaaataaacataaatagccaggcgcggtgactcacgcctgtaatcccagcattttgggaggccgaggcgggccgatcacaaggtcaggagttcaagaccagcctgatcaacatggtaaaaccccgtctgtactaaaaatacaaaaaaaaaaaaaaaaaaaaatagccgggcgtggtggcctgtaatcccagctactcaggttgctgaggcaggagaatcgcttgaacccgggaggcggaggttgcagtgagccaagatcacaccattgcactccagcctgggcaacagagcgagactctgtctaaaaataagtaaataaataaacaaacaaaaataattatgtaataaagcaaataagcagatagaaatgtataagtaaatattgagtgcctgctgtgtagaatgtgctggagaaagagtaatgaacaaagtagaccaagtctctgttcttgtcaagcttatgtccttcatagctgtcattttatagatgaagaacgttgaacatctaatgctaactacatttcccaaaattaagtcataagtgatgaagcccagcttccaacctagctttcgctccaaagtccacagtcctttcagcactttatcctgctcagaacaggatatgagctctccctgctagaccacttgttttccacccgatcctcaagggtgcctgcctgagcatcttcccagtttgttatcctagagtaggcagagttaaggaagtattcagaaagaatgagtgcccttgatagctggaactgtgtcttgttcacagaatcccccagcatctaatatggtacccaatccatagtagatcctcaagaaaagttatgtacaaatgagtgtatgaaacacatgcttggaagagatacaggaaacaggctcaaattctggatcacaacctgcatagcaccatctgtgatcatgcaaaattttaataaattataatatgacctagtcttaaattcacagaatcagataacaaatgaactgcccttatagaactggaagttacaattatagaaatatgttacaaagtagaacaaactgttaattctggctttcctcttctaagccatgcaatattagcttctgtatgtcagacaaaaattcttcttaggctttcagataaaagcaaccccctactcctctcaacctcaggaagatgaattatttgggatgaaggtagcacttcatgggagaaattattctttacagctttttatataggacccttggagctttgtgtataccaccctatcacagccttactgctgacattgctatagtgacttcttgctctctgtgcttgaccattaaagatgcaaaacatttaggaaaacaaaataatttccctatgaacaagatgcaggaagctgtgctcctgctgcattgataacccagtggatgtgcttacagagcaccagagaccacaggaaagcataaagcacatcagtgtatttattaggaattatactttcagttcatactctggacatttttaaatcttagcctgttcactcaatccattgctctttcactgccttatttggagtatgcgcaggtacttgcaaactaattttaaaactaacctacctcaaagtgagtatggggaacagatgtgtgaaggatattctaaagataagtgacttgtatgttacctgtttttatttttaactctatggcactgcttcttttcatttaaatctaaaaactagacggtgaacttttttgtagattgggcctgtgttcagatactacctggcacatagtaaacattcagtcattgtttgattaggcattgagcatttgccatatttggctttttatatcccatgaatccttatgccttgctcatcttctattccccgcctaacctcctcttctcatagaatgtgtgtaagaactgcagcggaaccttctgtgatgcctgttcaacaaatgaactgcctcttccttcaagtatcaagcttgagcgagtttgcaatccctgtcacaagcatctgatgaagcaatattctaccagcccatcataagactggaggccaagacctggaccaaaacgtttatgcaggctcctctgtacctgtgttttagctgtcaggatctcatagagcccagttcttagagtcaactaaagagttgataggaatttactaggtccagggagaaaaggcagtggttggggttactggaaattttgctcattttctctaatgactgtatgaataaaagtgaacttacttgagcctttctcttctaaatctaaacaacctgatattgaaggtttgctttatagcatatctttggaaaggcaactcatttttatgattagtgatactggggtggatttaataggagagagaatccaggcagataagaataaaaaggaaaatgatcatctccttctatagcatttgcagattcaagggggagaggtagatgctgagatcaaaatgacagttgttacttatttttccaggtgctgttagtataaacattgtttcctcttcacccctgctaactacctctttaaagtatttctaccaaactgtgaacccaatctcagggaaaagaaattaaaaagtaatataaattctgcatatattaaaaacaatattgtaatatgttataatttcaggaccagaattttctggtctttacctacaagggttttcattatcaaaaaaaagaacatttgtttttctactttatgacttcaaagtaaataactgcccttttcagaatctccttccacaaaacaagccaactcttccccattccctccatcttcctttccaagtcataatggaaattgtaaggagttttaaaaatagggtttggcttttgcaaatagaagatattgattaaagcaaagtcaaatatagagtaaaataagtttaatttgttttcttaagacagggtcttgctctgttgcacaagctggagggcagtagtgcaatcacagctcactgaatccctgttctcccgggcctcaagcaatcttcccaccttagcctcccaagtagctgggactggctttttttttttttttttggccggggagggggtctcattggttgctcagcctggtctcaaactcctgggcttaagcagtcctcccaccttgacttccacagtgccgagattacaggcatgagccaccacacctggccaagtttaatttgttcatggctgagaacagttagctcggaatacttacattgttttttgaataaggaattccttattctgagtgagtcacgaatgagagctgatagatgctttcttgaaaagggcaatacagtcatcccttggtatccatgggggattggttccaggaacccaacttgatatcagaatccatgggtgctcaagtcccattatagagaatgggttatatggtatttgcatataacctacatacatcctcctgtgtactttaaatcatctgaagatgattacttatacctaataaaatacctacacatcacttcatttgcatggattcaacatagtgcttggtgttcagtaaattcaagttttgcttttttggaactttgtggaatttttctttttctgaatatttttgattggcagttggttgaagccatggatgcagaacccatggatatggagggctgactgtacttacttacatatctatctatctttgagtaacaaactctttgggggaaaagagggaagtgtattgagcaagagaaggcaaaaaacattacataatattttgattctgttacgtgtgtctatagattgtttcattctaatcaagacctaagaaggtatgattctgtgactgatttagaattctggggtggaaatatcctggaaccatgttttttaataaattctgtctcttggaaagagttaacaacagcctgggaaagagttgttattccaaaagtcagcctgttacttggtgaagctgaagtttaagagttctggggaaaaataaaatctagtaattccagccta

SEQ ID NO: 1253 - DNA, 9989 bp, Homo sapiens
aaactttacggcacggcgggcggtgcgtggggcggtggctggcctggtgggggcgggggctgcttcttaaaggagccgtcagagggtccccagcggccccagggtgggaaggggccagagtggagagatgctgctgcggaagtcctcggtggagtgtgagaaggcagccagtgttggcctggaagacctctagaacctgagaagaggcagcggcaagtgtcagcggagggaaggagggaggtgggggtcctggcctgggatggggccaggagctgggcaggagtgtgggtggaggggcctggaacctgcctcagcagctgctccacttgcttaatcccacctggaaccttgtcccactccctgggctcctgtgtccagcacctgcccagctgacccctgggaaggagggtgggcatagcagccaggtctttgccccagctgagggccagggggaggtgtctggctcctagagtgaaggggctcaaagatggggaagaactcaaggggtgagagaagtgaagggagaggctcagagaggctgtggaggcgttgagagggaaggccagctcagcgaggccaggaggctggggtgcaaatgaagggctgcctcaccttgcccctctttgattcctcaggggtgtggagagagagccctcaagctcaaatgcagaggctgcttcagctgggttgggagcagtccccaagtcagaggctgaggcttctgcccaggtcttgggtctcctgggtagcacttctccctctgaggaatggagtgattgatgctgcagttggatttgctcacttgcatgcccagagacatgtctattcttatgggtgcacacgtttgcacatgcacaaatgtgcaacacatctgtgtgcaaaatatgcacatatcacacatatgtactgcatggattgcacagtgccacatgtgtgtgcacaccaacccatatccacacatgtgcaatatgacacactatatatttgcacatagatgtgcacacacatgcacatacacactacacacatgcgcacatcacaaggggacactcggaaacacattcacaggcacccacacccttggctccagcctcaaaagtgtctctgtgtttttctgcgggactgtggggacactgccacctccagaggcctgaccccctcctgtcactctcactcttttgactggcttgttttgctcattgcacttggcaccctctgcatccatctgattccttgttggcactctgtcccctttcacatggggaccttgtctatgtctcccagtatccctcctcccaggtctaggctggcatgaagtgggtggcacattgtgaattaatgtctgtgagtgtgtatacaagagaggagattactgggaagggtgacgtggtgaggcgggcttgccagtgcagggtgaccctgagggtgtgcccagtggcgtgggtgtgtctgtgattgtggccaggcggggcaccctcggaggggagggttcggaagtggaatgcgaccccccagcctctttcccctaggggctgtaatctgatccctggggactccccccctagcctcccgccctcgccctcactgctgactcctcttccagatcctggggcagagtccagggcagctcaaggctcctccacacacacacccgctgaaccctgagcaccctgagctgctgagatggggcgggccggggctgccgccgtgatcccgggcctggccctgctctgggcagtggggctggggagtgccgcccccagccccccacgccttcggctctccttccaaggtaggtgcacctggcaggcgggagggcccagcttgaggtgggcaggaaagggtccccgtatggccagggggctctgtgttggctgttgccccatgtgcgtgcctgtcaccagactctggtaggattagtgggcactctcaggccacctccagttaaccctgtccgggcctcagcccccagcctctgcccacattctcttcgtgctttctcaggaagacccctcctgtccccacagcaacagaccttgtctctgttccgttcagtacccccaacaaggcgatactccttcagcagagcaacagggaagtcagagcccccttctcatgcctcctgtataggagggtggcccctgggcagtggcagtgaataggcagttctgctgagctcaggctggtggtggagtggcaggaaaggaactctcagcctgacttttgggagttggggttctggccatccctgcatgccagtctcccccaggactctggtgtccataagccttgcctcccagtgcgcccgcctggagacaccacctgtctgagcatgcccaagttcaacctgccttcctcttcctggggggatgtaccacctaccctggcagctccacacgtgcacctgggtgggcttgggtttgcgtgtgtaaactcacacacatgtaaactcacatgtgtacaggccaggtcctaatggcaaccttggccgatagagtcaccaccaggcaggacctgggggaggcttccagcatggctggcgagtcatcagcagtgtcctgccctgcagagctccaggcctggcatggtctccagactttcagcctggagcgaacctgctgctaccaggccttgctggtggatgaggagcgtggacgcctgtttgtgggtgccgagaaccatgtggcctccctcaacctggacaacatcagcaagcgggccaagaaggtgccagggactcccaaccccagcactccccagggaaggagccctgggaccccactccagcctggagagacccagaggaatggctccctgaggtagagaatatcccaagttcctgacctgtgtcccctctcccccaacctcccgatagctggcctggccggcccctgtggaatggcgagaggagtgcaactgggcagggaaggacattggtgtgagtgccagctgcccgggccgggagtggggagggtcagcccctcaccccagagacagggcagggctaaaacagaggcctgcctgttctggctgggatgagggcagggaggtcgaggtggctgaggtctgggggtggtgagtcagggtgggggctcgtgtaattcttctggggtgcctctgagtcatgggaggctttgcaggcctgtgcttccccagacacccaccctcgtgaggcctgggctggtcagcaagggcccccaggtccctgtagcccatgttagtacttgcctgggctgatgccgaagagagggaggggtgaggatgccactggtgagctgggacctcttaaggctacgtccctgggggaagcctcacacctccaaccctactagactgagtgcatgaacttcgtgaagttgctgcatgcctacaaccgcacccatttgctggcctgtggcacgggagccttccacccaacctgtgcctttgtggaagtgggccaccgggcagaggtaaggccggatctaggcagggagggaggtcaggagggtaagaagggcctggtagtcacaacttgccacacctcccaggagcccgtcctccggctggacccaggaaggatagaggatggcaaggggaagagtccttatgaccccaggcatcgggctgcctccgtgctggtgggtgagtccaagggctaaggccccaagagaaccccttagaaactctagaacctcacaaagtcccaagacccccaagagctccagggaatcccccataacctcactcactcccagagctccccaggccctcctgccccaagagccctccatttgcctgagtggcccttgctctgtctgcaggggaggagctatactcaggggtggcagcagacctcatgggacgagactttaccatctttcgcagcctagggcaacgtccaagtctccgaacagagccacacgactcccgctggctcaatggtgagaggctggtggggttggtgggtagaggtcgtcaccctcccacagggcaggtgccaagcaaggcccataaagtaagtgagcagtgggtgtggccaggtcttaccaaataccctccttaatcaggcactggcgtcacagagacagacaagacaggtatgaccgtgacctctttgagttcacagatcacatacatgataagatcaagtccaatggccttgaggccagagagagacaagggaggaagggaaaaggagactgggtggctggagggggttgggtaaaggaagccgctgtgctgaggggagtatgagctaattcccaagcacaagacagctagccagcaaaatttagggatgagcattccaggcagagggagcattccaggcagagggagcaactagtgcaaaggcctggatgcaagaacaagcaaaggaatagacttgcagagctagcaatgaaaagggggcctggactgtcaggggccagagtcatttattctaagagtcatgggggctgggcacaatggcttgcacctgtaatcccagcactttgggaggctgaggcagacagattgcttgaagacaggagtttcataccagcctgggctacaaagcaagacaaaaaataaaataaaattagctgggggcagtggcatgcacacacctgtagtcctggctagtcaggaggctgagatggaaggatcacttgagcccaggagttggaggctgcagtgagccatgatgctgccactgcaggacagagcagaccctgtctctaaatcaaataaaaattaaataagggctatgggctggtgggcacagtggctcacacctgtaatctcagcactttgggaggcggaggcaggcaaatcgcttgaggccaggagtttgagactagcctggccaacatggtgaaaccctgtctctactaaaaaatacaaaaattggccgggtgcagtggtgtgcacctgtaatcccagcactttgggaggctgaggcgggcggatcacctgagttcaggcatttgagaccagcctggccaacatggtgtaaccccgtctctactaaatatacaaaaattagtccggcatgatggtgtgcatctgtaatcccagctactcaggaggctgaggcaggagaatcgcttgaacctaggaggcggaggttgcagtgaatggagactgtgccactgcattccagcctgggcaatagagcgagacttcgtctcaaaaaaaaaaaaaaaagccaggtgtggtggtaggctctgactgtaatctcagctacttgggaggctgaggttgcagtgagccgagatcgagcactccagcctgggcgacagagcgagactgtctcaaaaaataaataaataaacaaataataataataataataataataaagagcaatgggacccagcagaaggatttgaagcaggagtggggagcatctggttatgctagagaggaagattcatgagtgaaggtgaaaccagattacctcatctccctcctaccccagcctaaggtgctgggcgacgtgtggggcgagatcggaggctagccgggcttcacgcctgcgcccccaggtagccacggtctctgctgccccctcgcggctgcttcttgcctcgcaggccctgatcctttggattcggtccgcgcagagcgccaactggacatggtgctagaggttgggtggtcagacactgtgatcccgggtgctgtgcccgcactacgggaaggggaagcagcgcgtgggtctcgcatcaggaggcaaggccaggacccgctgacccatgcctcctgccgcggtcagagcccaagtttgtcaaggtattttggatcccggagagcgagaacccagacgacgacaaaatctacttcttctttcgtgagacggcggtagaggcggcgccggcactgggacgcctgtccgtgtcccgcgttggccagatctgccgggtgaggagtccctgggccacacccggcgaccctgcccctacccctttgcctgccctggtctcgccctcatcccctttgatcgtcccggcagaacgacgtgggcggccagcgcagcctggtcaacaagtggacgacgttcctgaaggcgcggctggtgtgctcggtgcccggcgtcgagggcgacacccacttcgatcagctccgtgagtgcgggagtgggtatggggttggggaggggggcagcggcgcagactccgggagcccccgccgcagcggggctgtgcgccctaccccagctaggccccttccccgcagaggatgtgtttctgttgtcctcgcgggaccaccggaccccgctgctctatgccgtcttctccacgtccaggtgaggggcaggaggtagggagcgcccggggcgggccgctgggctccacccggcccctcacctcgccctggtcttcgcctccagcagcatcttccagggctctgcggtgtgcgtgtacagcatgaacgacgtgcgccgggccttcttgggaccctttgcacacaaggaggggcccatgcaccagtgggtgtcataccagggtcgcgtcccctacccgcggccaggcatggttcgtagcccagggacttctgctacaacccacttcaaagcctcaagggtttgagaacttggcctggggtcttcttggtgaatgtggtttcttcctttagttatgggtgggaaaacgtttccatcataagacaaggcttgtttcccgcctctgacttcctagggcaaggctgatctcctctctaattctcagggcagggttctgtccccatccccctccatgttcccagaggctgggcatggagggctgcctatcaagcccccatatctatatccctgctgtgcctccctttcccccacccccagtgccccagcaagacctttggcaccttcagttccaccaaggacttcccagacgatgtcatccagtttgcgcggaaccaccccctcatgtacaactctgtcctgcccactggggggcgccctcttttcctacaagttggagccaattacaccttcactcaaattgccgcggaccgggttgcagccgctgacggacactatgacgtcctcttcattggcacaggtcagggtccctccacagcgacccccaggctcccagccaggccctgtgggctgctgatggaagctctccctgttcagtcccatctccacatcctttcctgggctgtgtctccaccctgtggatgctgcccaacccacactcttccagtccacactcttcacaacccaaacatgctgagggtagacgcctcaaaggcgaggagacactagccccagctgtccgggagcaccaatggtcattaccccttctcatccctgcagacgttggcacggtgctgaaggtgatctcggtccccaagggcagtaggcccagcgcagaggggctgctcctggaggagctgcacgtgtttgaggtgaggcctcacccccagtcgcccgggacccccccaccccactaagccctgaccccgtcgcccctcctccctctcaggactcggccgctgtcaccagcatgcaaatttcttccaagagggtgagtgaccaggatgggggtcggggtgggatggactgagcttgtgcctggcgcgtcccaagcctctggccccttttggtagtttgcagtcccgggtttgagtacaggctctggctttgttagactgtgtgacctgaggcgtaagacctcagtgttcccatctgtcgagtggaagaagggatccctgaccgatgggaggcaggcgtggggtcgccctcggtcagcccagagcccctcgtgccccctagcaccagctgtacgtagcctcgcggagcgcggtggcccagatcgcgttgcaccgctgcgctgcccacggccgcgtctgcaccgaatgctgtctggcgcgtgacccctactgcgcctgggacggggtcgcgtgcacgcgcttccagcccagtgccaagaggtgggcggggtcggggttgggccgccgggagggaggcgaagggtctttcactgcccggggctgaaagaagggctcacagaagatcggatgttccccacaggcggttccggcggcaagacgtaaggaatggcgaccccagcacgttgtgctccggaggtgagtgccccagctgcccctaccctcagccccagaagacgccccacctgccctgccttgcctaaatctgactttcttctcgccccaagactcgtctcgtcccgcgctgctggaacacaaggtgttcggcgtggagggcagcagcgcctttctggagtgtgagccccgctcgctgcaggcgcgcgtggagtggactttccagcgcgcaggggtgacagcccacacccaggtgagccttactccgccctccccgccaggctcctgtcccaccccctgcatccaggagaggccccgccctacccaacgaagccccgtccaaccagacccactccccgccctgtccagtttggtccctcacctgcactccacaagctgctgaggccccattgcgtccaacggggctcccgacccgcctcccctgaatcaaggagaagacccgccctcgaccctcccattaaggtccctgaccaccccccaccaagttcatgtaaaccccgcctctttcggattctcccttgaagaccaccagctcccaaacactcagccttaaaatgtgcgcctgcgggcacccctttcccgctccacctcggctcccaatgactctttgcttcttccgtcgcgtgctagggcccggaagccctgttcccggcccgacacccccgcctcacgctgccctctgcccgcaggtgctggcagaggagcgcaccgagcgcaccgcccggggactactgctgcgcaggctgcggcgccgggactcgggcgtgtacttgtgcgccgccgtcgagcagggctttacgcaaccgctgcgtcgcctgtcgctgcacgtgttgagtgctacgcaggccgaacgactggcgcgggccgaggaggctgcgcccgccgcgccgccgggccccaaactctggtaccgggactttctgcagctggtggagccgggcggaggtggcagcgcgaactccctgcgcatgtgccgcccgcagcctgcgctgcagtcactgcccctggagtcgcggagaaagggccgtaaccggaggacccacgcccctgagcctcgcgctgagcgggggccgcgcagcgcaacgcactggtgaccagactgtccccacgccgggaaccaagcaggagacgacaggcgagagaggagccagacagaccctgaaaagaaggacgggttggggccgggcacattgggggtcaccggccgatggagacaccaaccgacaggccctggctgagggcagctgcgcgggcttatttattaacaggataacccttgaatgtagcagccccgggagggcggcacaggtcgggcgcaggattcagccggagggaagggacggggaagccgagctccagagcaacgaccagggccgaggaggtgcctggagtgcccaccctgggagacagaccccacctccttgggtagtgagcagtgagcagaaagctgtgaacaggctgggctgctggaggtggggcgaggcaggccgactgtactaaagtaacgcaataaacgcattatcagccaaagctggaatggccccagcagaaaaccccagtcctcggccttgctatgtggtcttgggcaccttactagcggtgtcagggcccgagtttctcctgtccaaggttgcctggtgaggattaaaggtggttccggccaggcgcggtggctcacgcctgtaatcccaacactttcggaggcccaggcggacggatcacgaggtcaggagatggaaaccatcccggctaacacggtgaaaccccgtctgtactaaaaatacaaaaaattagtcgggcgtggtggcgggcgcctgtaatcctagctactcaggaggctgaggcaggagaattgcttgaacctgggaggtggaggttgcaatgagcctagatctcgccgctgcactccagcctgggcgacagagcgagactcc

SEQ ID NO: 1254 - DNA, 34031 bp, Homo sapiens
cccgcgcggctctgagcgccccgtcccgccggcggccgcgagaccagagcgagcgaacgaaccgcggcggtccggagagccccgagcgcagcgcaggacctgggtacgccgcgaggaaccgtgcagcccagcgcggccgcccggcccgggtccagcagccaggagagcgcagcgcttcgaagccgagtgcgcgccaccgcccgcgccccgcgctggggaatgcgccctcggcgcgccggccagggggcgcccgcagcccaccccaggggaggcggccccgagcgcccctgagccttcccatggcccgggctggggcccgggccctcggctgctgacgcgcccgaagcccgcggaaccggttaagccgcggccgcggcgccgatcccggctgaggcgcagcggcgagaggtcgcgggcagggccatggccccggggggccgctagcgcggaccggcccaacgggagccgctccgtgccgccgccgccgcccgggcgcccaggccccgccgctgcggaagaggtgagtgcagcgggaaccgggagggagcgggcaggcggccgggccaccccgcgacccctctgggacccgcggcactgcaactccgcagaagtgtccggggagcgggtctcgtcgagccggggggctgcccgcggacataggggcaacaaggctggggtgggattcttacctgtcctggaggcccggaccccttacctacggggcggcgtatggatgtgtggatgatgtggcctgcggggtcacccatgtgcaaagcaactttttcctgcaaggttctgggtgggtgctctcatacacccccaccttcacgcttctggagcgggagttccgatcccccttctgcctcagctctctctcccattaacgcccgaggcagcgctcttccccgtagatgcgcttgccctacctcagtgtctctacttgaggactggccagcccgaagggaagcggtatactggcagtccccacgtggggggtctcccacatcagcagagtgggaggacctccagtcctgaggcatttctcccagcattgtgccagccccttgacccccagctgccaccttgggtttgcttttacagcagagtcctgcctggattaggggcacggctgtatgtagtgtgtaggtgagcttggagagcctgcggtcaatccctagtttgaaccaggggtcccagtggtgaagtgggcaggggacagcgggggcttggcggggttgcccccagcagatgggacaggagggtatcaaagttggcctaggaatgaggcagtgctggcgggagttggctggagctggggctgggggccccactggataaataactcctaatttttgagatagctgtgttttgccaccagaacattactgcttgggagaggtaagggagacgccaaccaaagacaccagtatgtccaccctgaagctgggccaggttggggacctctgtcctcctgaattcacccagatagtctcccagtagttatcctagttgcagagaagggaaaactgcacccaggggttgggagccccatctcagcccagggagttggatggagctgaggcctcttcccaggctacccaaggggtgtgccaggaccccgtagggtatagtgtctaggcaggcggggggcacaggcatgcctactcctgctgctcccccttcagctccgaaggagccaggcccggaagtggggaggtgggggccggagagaaagcaggggccagagagaaggcggcagcccacccagcctcagcccctcgctgctcagcataccttggggggaggatggagccaggctcaggtgaccttgactgggaaaccctggccacaaaaggggggtttcagtcccagctatgctggggtggctctgcttcctggtccttgaggtgttgggggatggggaagctgaggagccaagaaggagacagagctcttgttgaagtgggggagggaatctgaggggctgggtagcgggtggggtgctgttgataatctccccatgttcccctacggcccctgttcctgcctcccttccatccaggcagtcctcagctcggaggagccaacctcccttcctggagacaggctgtccacccccacccccaactccaagcctgggcggtctggatccggctgtacagtttggccacctggccccctgtcccatcccaggtgcctccggactccttcctctggccgcctcttccctgcaccccttgccagccccggctcctcgtttctttgttcaagcgtctctcctccgtccctccctctctcctccctctctcctcctccctcccgcctgcctccctcccttgctccctcccaccagccttccttccctccttctctgctttcttcctggtgggctcccaggtggcggtggctgttcttcctctgtccactgacctgggcttggtgtgacttgggggcttttctggggctggggctgggtgacaggcatctcgggactggcagaggggaaggcactgtgggtttgccctttctttccctctctgtccttcttctccttttcttccttccctctccttctttcccccacctgccaggctgtccaagaggggacctggacttgagactgaggccccagcaaacttgagcccctccccattcacctctttaaaaggccaaagcatttggatgggaagtccctgtagggacccagtagaaagactccccacctctctggacacattgggtgactccaaccctgtccttggtgacactgactttgtcaccatgaacatggatgaaggaaaaaatgaggtcatggggaggggggaggcgggaggcaggttgacaggagcccccgttacatagtatcgaagctctctgagggactcagacggcatcttgcgccaggacagtatctcccagctcccctgagccccaccccactagcaggtcaagttcttgagcaaactcatgcttgtaaggacgtgtgtgggcctgcaagtgtgaacgtgtgcatatccacagctgttatcaggggcctcccaggtgcaccttgagggtgacggtggctgcacagccatttctcccacctgcccccacttctcagagcctgccattcagtcagcactagctttgtgcctcccagacctgaggaggggctggttctgattcccccatcccccagctagcctccccaggaggcagcatctatgacaggggatctggaaggaccatgagcggtgtgccaggccctcgggagagaacattcacacagagggtaccgcgtaaggagtgggccaagaggctgaagctgcacttcctgtctgaggagccatgagtggtttgccttggcaggagaggccagggctgggggaggtgggtctagggatgtcatcagggtctaatgagtggggcctaagagtcagactggagcctgggctttgcctcagcattgagcagctatggcaggggagtcccaggccatagtactgccaactcccatcccagcatcctagagatgggcctggggtcctgcctgccacggaagaagggagtacacagggcagatctgggggatggggctcacattttcagtctcgatgcccccacccgcagtgcatccggttgggggtggtggtaggagttggcgctggtttgtgccgggagggagcaatatgttctgacaactggtgctgggctgcgtttacccaacagccagcctgcctggggagacaatatttgaaaaacacagtattgaaacttggacctgctggggctatgggggattctgaaggtggcaatgccgctggcccagatccagccccaggcccactggccatcctagcttcccttctttgccctctagaggcggagctggaagttttccctggcaggaagtccttctgcctgtctgacctgggtctctcctgctttgattttagtacaagtggactctgccattctctgcctttccttttctgactggtgctccctctcttccatcttgggctgtctgcatgtgtctcattcccccactctctcctgtgcctcccctctaccgtaataatcaggtccaggtttctctgtactgggagaagacctgtggctggagcaggcagggatgcaccctatctgttccccattcctccaggtgggagggagaaggagtaacccactttattggccacagatgcaggggagaaaggagaaagcatgctgggagctggaaagagccctaagatcacctggttggtctgggccctgtgaatggaattcagcatgccatgaggggtagggtttgagtctccagcagcccccatcagttctggtgaccccaggctggggcctattggtactatctccccagacaaaggcaggccaaagaacgcacatgaggtgtgcacacaggggcattcatggccccaggctgggggtggaagcgtggaggtacccatcaacctctttgttcaccttgggtagaaattgaactcccccatctgcctcacacattccaatcttggttccccttcccaggtttctagagagtggagcctgcttcctgggccctaggcccctcccacaatgcttgtcgccggtcttcttctctgggcttccctactgaccggggcctggccatccttccccacccaggaccacctcccggccacgccccgggtccggctctcattcaaaggtaagaagctgttttgttcttccccagaaatcatcctctctttacaatagcgctcggctcctctgcacacgagagaaagggtgggtcaggacaaaaccaggacaaattgtacagccacataggttgtgggggagaagggagaccggggaggtggtggcttgctgggaaaggctggagaactgacccatttagacacttagcaaaagagtccagagtctgggcatcttccagagtcagactgtgggttcctgggctgggtggcctgaggtctgtagggcatgtctttctgtatgataattggagaggtggcaatgtcactccttccaaacttatgtctgctgcggcccctccttgccactgctatgcatctggtcctgccctgagcagcccctggggtggaaggtcaggcagttgggcagacactggaacctctggacactggaagagcaggacctgctctcttggggtgtgggtgctcgaggagccttcctatggtctccaagtgggaagggttcctagaatccaggaggggactgttggctgtgactggcagggaggccgccggtgggttcaggcagagcacgtgctgctgtgagggcctgagctcctgagctccagtgagcactttgatgagaagtcactgggaggtttcagtgatgggctggggtctgcagagtgagaggctggtcgcccgctccatcaccattgcacttaacccactggacaggtgcacgcacacggtacacacatgggtgtacaaatggctcactcgagagccacttcctcaagggtgtgtgtggtctgaagagtctcccctgggcccagggtgaggggcagtggccatgctggggcctgggggacctggggtcattgggagttctcagccttggccctcctctggccagaggtaacttcatccagccgcctgccctgggtggggtcgactcagccctggctggccagatttccgggcagccatactggggtgaaaggctggggtgacctttccttcctcgggcttggcggaggcccagccctcacctcaccatgtcccccagcagggcccctcccctggcctcgtcccaccctgccccttgatgggaggagtaggggagtaagctgcttatcatcactcttcccagtcacccggctcctggaatttctgaggctgtgcctggaaggagtcccctgcagggcctgagaaatgggctgagaagagttaatttgtttgggctggaaagcaccccccttccccgggccccaggaaggtgagatatttattctgctgatacctccacccttccctggtggaattcttcagagcagattaataaatcttgaaggggccagttcccccaaacccctccccagcccagggtctggcagcgagagtagagtgtctcctcccccgatagtggaagggaggggtggcttggtctccacacccctgggaccttgcgtccgctctgggtgttgtttttgtcatcatgcatgcaagtaagcaggaggggcaaaacagagaggggtcttccgtgtgctccttctaagcctccctggacctccaggggcaaagagttttgttcctgttttccagagagagaaactgaggctcaggcaagggcagggtcaaggtcaggcaagaggcagaggcaaagccagaaatagaaccctggtgtcctggccttgccggcgcccacatcgcgtcaggtcgattccctctcaattagctctgaagccgacacccgcagtgactaaaagctgagctcactggcagccagcctgggtgttgccggttgtggcggcctggggtggggctgcagcgcacctggggccacccatcccagggctcctgtgcctttgcacaggcaggttcccctgccctgaatgaccttccctgttccgacctggtctcgtgtcctaattttgtgcttagacttcacttactactgtatgacaggccccgtgctgagtgctggggactctgtggtgaacaagatagggtgctcacagtcaagctggtggaaaaagcaatggatatccagttggtcagggccatctgggagcccagcacctgctgtgtaccaggccctgtgtatccccctacactgggtggtctcagcctggttatgcacacatgaagtggccctcagtgaggagcaggcgcccaccaagtgtgtgtggagtgagaatggagaccaacacttcaagaaactgggctcccaccatcttcctcccagagtacacgtgggtggcacagagaaggttactctcagaagcactgctggtcactgtggctccatgtcatagttttttcatctgtgccttggatggacacagcagttgacaccccaggcctcaggggctcaggctgggcactccctgccctgccctgccctgggtcctgctgtagtggggaggtgccggttcctgcctgggtagggctggaccctccaagctagaggtgctggcataaggggccacactgcccagggtagataaaggaacaaaggcaggaactgggccaggcttgggtttgctgcccgcccatccgcctgggcaccccagccaggtctagagccagaagggtgtgagggtcaagcagcccagggttccctcagattaggggggctcctatggcccagcttctgggcttcagcagcacagccaaaatcaggcagaagtgagggtcaaatggagatttccaggagcaggtgaggtgtttgttcattccttgctcttgagagagtggagcctgggctggaagcctggacagaccctccttccttcacccatccatgcctgggcctggagtcccctacactgcagaatcactgccaaatctcagagaaaaagctcttccttcccccaccttgagatgacccaggctctggggcaccacctccctccgtggcagcagcagggaggtgtgagggccctgccaggccctttgttcagcctggggagtgtttactttttcccaggaagctaccccacgacacactgctgctgcctgggctgggtttggccagggattggggccaagagatgtttggtggggtagaaggaccctgtgatgacatgagacagttgtgctgctagggaagctgaggcagaagtagggagagggagcagaaggtcaccctgccaggggaggtcaggaaagatgaacataatcgaaatagtagtaggagcccatgaggataaccaagcaatggtccctccaagacctaaagagggtctgcctaggtttcctgtgaggaaggaggcttacgggggctgagcggcttcccaggtcactcaggagcaggactgagatggagcctgcatccgcctgatgcctgaggctgtcccaggactgagagtggagggcagggatggtggtggtgctggaggcacagacccttcacatgagctaggaacaaggaagattccagcattctgcagtgctggtttaggcttcctagcctcgtttcccaaagaaagggctggggtcgcactgggcaggctccccatgccctctgtctgccgaagcaacggaattggggtttgcttatttccaggctataaatccggccctccatcactctggcccttccactgagcagggtccctaggaaggcctctcatgtcagagatgggaacatcagggcctaagagaggaaagggctcctgttccagagcagcctggagtttgagccctccaggccaatagcccagaacagtgccaccgctcacatcatttgcatgtggcatcagaggaccaaggttgccaggtttggagatgatgaggttagaggttaggaagggtcacagcccgttgacttcccctcaggagttgatgtgagttgaggtgcctctagcaagccttgatggggccttagccctcaggcctggtgcaggagtaggggtggggctggagagctagaggacatgctcttgccccccaggggctccttggccagccagagcaaggcatggggctttggtgggggaggagggggaggaggcccaggagctttgaggccagtgtggcaccagggagctgggcaagggtcaggtggctctggcagctacagtgggggttggagctcacaagccagggagggtaggtgttccaggatacgccaggatgagggaggaaggaagacccaaagcatgaacttgagcccagatcccttgaggccagatctggagtttcagttttctggaaatgggagctgccttactcctgagagacttggaagtggccgctttggagttgggaggtcctggaagctgcacatcccccaactggctaggaattggtctttggagagaatggagacagggtccttgtgcttgctggagaacctgcctgacgcccagcctgggtcagccaggccaggggctggggctttcagctgtggccttccaggtcaagtggagcttcagatgggacctccactgtctgggcctccgcagcacaggccttgtctctggttccctggcatgatgcccgcccctccttccctggctccagcttcccttggcactaagtgaggagctggtgcatgctcaaggagtaaatcatgttccttggcagcccccactgcttcgtaatcgtaaagaatttaaagagaaaccgccaagataaaaatctcaccagcccataaaggcatctttcaccctgcagcttgggagacagtgagcctcagagtgggctcttggctgtctgcacctgtgtgtatgcacctccggccccttgactcctccagaggtggtaatagctcagaaggtggctttagggccatgggtacctggtccttgactcctgggagacctccatctcctcactcaggagagtggggtgcttaaatttggtgtaatgcagaagtggtgatggtggtggctgagctagctggtcccaaaggcaaaacccagttctaccagtgttagctgtgtgagttcagccaagtggcttagcctctctgagccctggtttctcctgtgtaaggtgggaatggcagtggccctgtggaagcagcatcatgagggctcagactgtcttgcttgcatcctggccatgggtggatcttgcttggtgaacatcattctgtgttcccactgccttttctggaaaatgggagtaagaacaatactggcctcgttgtgttgtcaggaggattaactgtgtgagtatggtcactgtggaagaaatctcagtcaccaggagcgatcctgaggctggtgtgcaggtgagggcaggtccaggggcatgccccaaggagtcccagactgcctcaccccttcctccagaattctaacttttggtaagggagatggtatttggaaaggactccaggaaggaccctgagtcctgtggggtgggtggagtagggtcaggaggaggaaaattcctaccatgggtatctgggcaggcttcatggaggaggctgcatcttgagcaggggaggggaggttgtaggggagggaagagctggagcacagggagggtgcatgtggtgcagcacctggggaagaggacagatgctagatgcagtcttgcttttgggacaaggatgtagagttctactttctgtttctggtttttaagctctttttcctcatggcagaggtactaaatatgtattatggaaaaattccagtgatacggatgcatttggcgggagtgatgccttggaagtagctccctagagactggctccaaggcctggttgggacgcacagttggctgcaataactccttctgtgaatgctgctccagctcctgccgtgtgtcctaggggtgaccagacctgggctgctcactcaggcatctgcagggctgggcagaaagcatgtttgcctggcttggcctggtgctatcctgggaatctgagccccgcctcaagaagccctgggagctttggagaagcagagaggattcctgctgcatttttcttagaaatagcaagagggcctttgccagaggcctggatgccagaaggctatggtctgaatccaaagcctagctcacgtgggtgccagagcttggcaggcctacagccccccacccagcctgctgggcagccccagggagagggtggaggcctcctgggctccagtccctgaccactggtcctgacccagcaacgaatggggtctgggcagtggctgctggcctaggattggggggctagcctgttggggagggagtggggctcatcgggctgacgggctgggctgacttctggcactctcactgggccgaggggagcactggctatctggtgcatctctgcagggcaaagacagacccaaagcaaccggcccctccagggatcaggaagcctcagctccggatcccccttcccccactcttcttccttccttcctccccctactcccccttgcctccacccctccctttgccacccctcttggcttcctacccggacatgctctttcctcggacgtctctgtacccagccaagagccttgttccttcccacttggggctcggtgctgatgccctcatttcccccggccagagtccactgcctcgtgtgtctgctgttcagccagcacggttgccttctaagggtcatacactacaattggcagagcggctagaatttgggagccctttgggctcctacagctccaaggctgagtggctagcactccagggggcctctcccagggctgcctgtattgccatttttatcagcgccttcctggctgggcctggggcctgtgcggagtgctcactgcctgcccttgactggctacctgctgagtcctgctgaggtcctaacccagcctcactgcatcctccaaggctgaccccaagcatgcacctgtctgccctgtgcctcggtttctccatcagaatgttggggaggggctaagactgtctggaacatcccgggaatctctgggtgggtgttgtgaaggggctgcagggaccgcaggaatccgaggaaggccgcagagatgggggctgggcccaggggagggggagggttttgacacccaccagcctgttggtcccatcttggcctgtctgtctgggtgatttatcagagtaaatgagccatggagagtttgttgtcttttgcagtcatggggaggaggaggtggtggaggaaggagtgaggggtttccgggccaggtctggaatgtgggaggaggaggtgggtcccccgggggcctctgaaactggaggcactcactgaatggccttttcactctccccacctgagaaatgaatcagtgcagccctccccttcagaacaatcccctctttccatccccttcatacttcttggggcacattcctgtgtgatctgcttgtctggtcatcttctcccaccccctgctcaggaccaggtctcttgaccacagtgtccttccaaagctgagccggagccctgacttgcccagctggtgaatgcccaaatgtgttctcacaggcaaccatgcacactgttaagttccaagtgggacgtctaggcctctggaactaccagcccaggcctaggatggtcaggtgcatggaccatggggaaggcaggggtcagtggaggtgccgaggccggagagaccccatctgctgggacagaaggtccgaagtcattgggtgtccttcggggatgaggcatggatcccctggttcccggctggcgagtcagggagtgatcctgctgctccgtcacttctggcttttcctggtttgaggctgagctgtgccctcagcctatcctgtcctgggcggagtaggtgagcactggggcggaacgggcgtgggaacagcatgcctggacctgctggccccagccccctgccccctgcccccagcctttagtcactgaaatgggagggaagtgtacagtggcgttttggcccagctgggctctttacccctgtacggtgtttactgaacagctgggatgtttacagtagcccttgcaaaggggcccctcgttgcaggggatttcccatcttgagggtcccactggggctcttctgacctcaccaattccctgcacccctgggatagatgtgtcagggatacagagaccataaccatctccaccttaccagagccagtggtgcctgtccccttggcctctggccttcggttcctctgctctggaggagccaacatttcccaccacatttcctagagtggcagctctaggtggtgaaatacggtaactgggtccccagttcagacatttaaattaaattcaatcagagcggttattgaataaaaacacgcggagtcatttacatgttaattatgttgaatggactactagaccataattagttgctaattgggtgagagtggctgtaattggttttgttggcaccaacctggctcacctacctggggggaagcgggggttggtgtggatggctcctagggaggccctctgggtctccaatctggaaggcctggctagagatgctatgcgggggcagatctccaggggcttagggtcagaggaacctggaacctctccccagggagggtgcagctggggtctggcttctagggttcccatccagagcatagggggaaaagggggaactggaggagctaccccagatcagcagtgatagtctcccctgcccagccccatgtgggacctgggcttgaacaaatggtaagtgcccaagagtgggtctgtgggagcccaaggcaggcgtcactcaggtgtgtctctgcacatactgggccctgggttggcctgatcagggtggcgttggggtgtaagtgggtgtgccaagcaggaggaaggtacgtacaaaggcatctgggcctccctgcccccccgcttagcttggctggggttcccggggttgtaggtctgtggccatgggctgaggccttccggctggccgctcattaaaagaggattaggctgagagccagggggccagcccagtccccaggccttcctctggggctcctcacagctttgggggagtgataaaagggccggggccaccccttcctggatcctgtgggggtatccggtagggaccacctgggccctgccatgcctcttgccgccactgctactatagccttggctacctcagtttccctcctcagaaggtcaggaggtctgtctttccggtgggtgaaacactgacaaagacccaggctggtgcctccccttgtcccccagtcccatctctcttcagctcagggattagggctgcactggctcactagaggtcagaggtctgagctaggctgcagggatctgtctatcatccccagtccccatcactgctgggggaggtgacgctgtcagtcagggcctgctgctttgtggggctataaccaagggggcgggctgcccacctctgctccaagactcctctttttgcggcagcccacacctcactgcacgcagacctgatgtcctggagaccagcagcaaggggtaggggctgcccacttggggtcttcgggtgagggctgtggacacgcctcctcagtgcctgtcctcacctgcccgcacctttaaagtaaggtatcaccagctgcttcccagatatgagggaccgggggcccccaggacccagccccgtgtgccttgagaaggtcctgcctctggacctgtgccaggccgctttgggctgggaccccaagtgcttgatggccatgagagagtcctggaggccaggaatggctgcggaaatgaggtgtctgatgccagaaaaggctcttccttcccgatgatgggaaaatccttcccggatgtcacccctcccaacctgtgcccagcctgggtgagagtatgggggtggggagcccttcccaggagacagcacccaggcacaccacccttcctccccctaaggtcaaagcttatctgggctggagtcctgatccccacagaacccttgattgtgcccagcccctccctcaacattgccatggcattcgaggaggcatggcgctcctgctgccagagccgggcgtgggacaagtggagcagatgtggggattggccttaggacatgaccaggctgggtctgcatcagccctggcccccactgatgccacctcaggtcccaggttcctttgttccttctgtcccaagtccctgtcccttaagggagctggggcctggtaggatctggcacctgctgatggcaggttttggaggaggatacccagggctacttgcccaccccctgctctgactcaggctgcttggaggagtgaaggctcccagttcctttgcctcatggtggagtggggagcaggggacaggacaccctgtgacctgggttgagtaccactctcctttgggcctcagtcttcctgtctgcagctgggggtgcagggctgtcacagggctccttgtttcccttttcacctacagtctggcatgagtggggtcagaagtccagctgtgggttgagaaggctggaaccttacaccttctttgctctgggacccggggaagttcccacccctctccaccttggttcccctctggtaggctgggtttggatgaatggtttgggatttagctctattcctgtgggttggggatggggtaaggacacactggagttgggaaggctggagctgagtccacaggttgcctcttcctgccttatagccctctctgctccccaatctagcactaggaaatggagtagctggggtgggaatggggatggatgccctacaagagatagcgacacgtggaagcctgcttccttggggaaggacttgggacctcattccactctcctttccctgaaaggcagagacacccatgaaggatgggttgggggaagacctgaggaatgccaggccgtgagcctctctctgagatcagaacggggtcactgatcctcagggtcactttgaatatcagtaccaggagggcctgagagatggtctagactagagaatgaggctcagagagcgagagtgcccccaactcaggtcatgaagctcacccagaaactcaagccatagccaaggatccctgatcctgggtcccaccccttccccaccatgcgcgacctcctggggctccccctccccccacactgtttccacagtgaccaaagcgtcacgtcctgtgacaccagagccattgacgccatatcccgtggccactgggaggggtcccgcaggtcctgagtcatgtgccctgtccacggggagcgagtcaccttccggccctggccctcctggcaggcagtctctaccaccaggactggcttcccctgggcctccccctccttcagccatggacctaggtgggaatcccacccccatgcactctggcatgtcacatcccttccctgtgccctgtgcccttggtattgtgagcacagggctttgtgcacagcgggtgttcgataactgagcaaggggctccctccacccccacctccacccaggggcagactgggggcagcaggcagagagggtcgaggccaatcctctgcccctaagctgggactcagtttcctcatcctctgagtgttctctacggcctttctcacagagggagctggagtttgggagtgctggggctttgcaagagggtaggggactcggacttgggcctcgggctctgggagtcttggtgcagggttgatattatagaggcccaaggctgcgcagggttggagcttggggattatggctgattgggttcctgggggcttaatggctgaagcttccccttacccggagtgcccgtgtctgaaggcgcccacttaagcctctagcccctccccctgccattgcccccaaagtgccccctagcccaggggatgggtaagggcatgaccgagccatgcccccagccagggtataaataacccctggcgggctgtcccagcctgggggggctccactggcagccccacttcctctctggccacttcccagccctgggggtgggggaatgtttactttcctgttgtcactgtgggtgagcagccaggcgggtgagcggccaggcgggggactccgagtggcccaacaacaggtgcgggacaggtgcctgggccgccctgcccaggacttcagaggcgccgctggacaggcgggtgaggccatcgccaggcaggatcggccctttgatccctcggcgtccctgcgtcccagcggttggccaaggtcatcacctgcattcccttgtcaccgcatagtcagggccaggcagggcaagacctttccttacccactagtttctcagagtgaggtcctgggaccagacatgggctctgggtcagctggtggaaccccctgaccccagcccacctctgccccaccttcaggctgtgtctagggcctcggatcccagctgttctccccctccaggtgccttggggcctggcccaggcctctcccttgactgccccacctgtgaaatgggttaccagctggggaggggagatgagacatgtgtgacccccttggtgagtgcctcatgtgtggtaggacatgtgtgcgccatgtgcatgcctgtgccacgtgtatacatgcatgcactcttctgtgtgctgctatcttaagccccctgtgtgtgtgaatattcatcatcctcattacagtgttccctcttttgctgagctaaagatagctgggggtgggtggagagggggcttgccaaggggacccctcggctctccctccccttggaggcaggttcccaagcttctaggagtcctttgtctgtcattgtctgagccccctcctgtccttcatccttaggaaggacttttccccagcatcctggagttggaggggccaaggctgctggactcatgcaaaagggaaactagaggacccagttgaaccctgcctttagccccagggttgtagctccagggagagagcctctttcccagaaatgactgtcctggctcattcaaggtggcctgagagttccaccattagcagccttatagggtctgggggaagctggggtccgtagggcagtgtgtccagcagggctttctggtctcctggctaacctgcttcagaccaagtgaggaccttgctgtgcaccagctgtgccctctgcctggtgggcagccagggtaagaacagggcatccaggctccatgccagagtctgccggctgtcccagatatacccggtcacacccctatctgctcattaacccttttaagcccctgtgtgaagctggccccaccctgagcgtgggagcattaacccccacctgagcaaaaactctttgatgctgttgcgtaccctggcccgcacctaccgccctttcattgggacccagagactagctagggctgtctatgaatcaggggtttagctttgggtgtggcgccttccctggcctgcctacctgtgccactttgtcctctcagtctgtcagggactggagagggagctgagaaggatccaggaaggggagctggaggtttaagaccactgtgtgggctgggcacagtggctcatgcctgtaatcccagcactttgggaggctgagacaggtggatcacgaggtcaggagttcgagaccagcctgaccaacatggagaaaccccatctctactaaaaatacaaaaattagctaggcgtggtggcgggcgcctgtgatcccaactactcaggaggctggggcagcagaatcgcttgaacccgggaggcgaaggttgcagtgagccaagatcgcgccattgcactccagcctgggtgacagagtgagactccatctcaaaaaacaaacaaacaaaaaataagctgggtgtggtggctgacgcctgtaatcccagctagtcaggaggctgagacaggagaatcgcttgaacccagcagatggaggttgcagtgagccgcaatctcgctactgtactgcagcctgggcaacagagtgagacttgatctcgtaaaaagaaaaaaagaaagaaagaaaaaagaccactctgtggtgggggtcctgaggggaacctcagggcctcagtctcccctttatcagagggggtatggctggatggtttcctgaaggtcctaattggtgccctgccctccacccacagagctgaaggccacaggcaccgcccacttcttcaacttcctgctcaacacaaccgactaccgaatcttgctcaaggacgaggaccacgaccgcatgtacgtgggcagcaaggactacgtgctgtccctggacctgcacgacatcaaccgcgagcccctcattgtaagggctggccctgatgtgggacgtggggtgggcacggagccccagggctcagggcatgtccagaaggctgcaccttctgacccccctctctgcagatacactgggcagcctccccacagcgcatcgaggaatgcgtgctctcaggcaaggatgtcaacgtgagtttggtgggatccacaggtgggaagggggaatccacaggtgggaaggtactgcccccagtgagggggcaggcctggccagggcacctatgcagccttccctgtggccccagggcgagtgtgggaacttcgtcaggctcatccagccctggaaccgaacacacctgtatgtgtgcgggacaggtgcctacaaccccatgtgcacctatgtgaaccgcggacgccgcgcccaggtaagccccagccaccctggccctgtgctgcccccgctggtggctgcatcccagggtcctgatgggaggaggggcttcagccccagccctgccacttccgagccttttgaccttgggtgagtgacttctttcacctcgctgagcctcagtttcttcacttgaaaatggggctaaccgctgcctttctcacaggtcggtgtgaggaggaggcagtgagctaaagctcccaaagctcctagcactgtgcctggcacatagtaagcacttgctccatatgtggcaacagctctcttggctatgcctgtggaccgtgccccgacggccgagccagagggcctggtgggggccttgcaataggaggctggacccctgggtcagcttctaccatgtggcctgggggagagctgccttccacccccagggccagggttgtggggagctgccccttccccagctctgccccttcctgcctgcttccacccttttccatttccatgtgggcatgtgtgtgagctggcgtgaacttgtagggcatgtgtgagaatgactggatctgaggggcacctgtgtgtgcaggtgtgtgccaagcctgtgtgtatgtatgtacacacgcatagacgtgctctggggggcccacgtgttcacgtgtgttcctggcctgtgtggtgttagaggctggcagcccgagcccgctcccccagcccctgccacccccagctctaacccctgttcctcgtcttctcaggccacaccatggacccagactcaggcggtcagaggccgcggcagcagagccacggatggtgccctccgcccgatgcccacagccccacgccaggtgggcctcatccctccaggcctttgccaggcagcactgcctctgagcggaactcaccctgggcctgcacctgaggccagcctccccagggcctcccctctacctctgtgcccacaccctgtccccaccccttcccctgaagagccctcaggctcagaaggcatgcccagctggactcatgtcagcctcagtgtgacccctgcaggcaagaaataatgaagccgccaggtggggaagacaggagccctggggacagccatgccttagccctcagaaagcatgtgtgtagacacacaagagcacacaccggtgtggatgtgggccttcctcactcagcacccagagtggaaagtggcacatgagtgcagtctgacaccttactcccaggtgttcgtgccccatgcctcccatgagtcatctgtggacacaggtgtcctgcacactcatgtgcttggggcgctcttctcccgtgtggtatctgtccactagtgatgacctgggtctgggctgggagagctggggctgggcaggggcgggcaggggggcaggggctgccggtgaatgacagagcatgtttgtggtggggagtgcagaaatgcaggatcgtgtggattctgtgtgtgtgtgtccatggtgtgagcaggcggttccgtgtgctggcggtgatatgttcagagctgtgtgtgcacccttgtgtgtgcaggaagtcacgtgtgcagtgtgtagctggaagtaggcctgtgtgcaccttcccatcgccatcctgccacctgctgccacctcctcctgcctctgttcctctctccttgcccctttccttccctctgcctggctttctcttgtggcctctgtgctcacccctgtcccagtgccttttccagccttcctagcatcttgcaggctgggctgggaggcacagggggctttgtgaattccatgtggtctgggctggactccttgactcctggctccctggggagatgtggagcctgggggctgtgctgagggacaggagaaaggtcatggcccattggtccatcctgaggaccacaggtaggacacaaagcctgaggatacagtaaccttagagctctctggcctggctagacctgatggcaaaggacaggaccccaggcccttaaccagtcactcctgccctggccaggtctgcagcgctttcttgacccaagacaggcagccacagcaaagagctgtgcctctgtagcccagggggccttggccagtgtctttatgagccagttggcatggaggggcttcagcccctacaagcccactccatgtccatctcatagcccacaaggcagggccccttgagacttggtccccaggtcttccctaagacctgggactaggaagcaccccccttggagcccacagcatggccctgccctgggagacctggctggatggagtttaaggccaaggaatgctggggagtgtagggggtgggctcggggtatgcctgggggctcattctcaccctgggagcctggtgacccttacacttcctggctgggggactggcctggacgatgctgagccccgctctgccttacaggattacatcttctacctggagcctgagcgactcgagtcagggaagggcaagtgtccgtacgatcccaagctggacacagcatcggccctcatcagtgagtgccccccaaccccgctctacagtctcaatgtgtggcctctgcccctggagatggggcatggcaccaacacttacccaagggcagagaccatgactaggctgtccctgaactccccaaaaggccccacctggcaagggggagagggtgcaggccagaccccactgtgagctgaggtcagagactgggtggtagaagcctccgcctggcccctttggatgggggaccaaggaagccaggtcctaccctgaaacacacaatgtggtccatgcaaagtccagaaccctcctgaccataggcttcctagaagagaagataagccgagtgcgtatcggggctggtctgaggggcagtcccatagcatgttcttggtgtgtctgagaggctgggagagccctgtagcgaaggaccaatggagagttccggccctgtgaccagacggggagagcatgttcctggtctgggtaggtgtctgggagggttgggggctgttctctgagtaggggtcctgccggggtctcaggagcagctgctgcccctaactgcaggttgggtgaacccatcactgaccctggctcatgcacgctgcctgttttctgattgttcaacacagtctgcctctcagagcagctgttgggcactgtgccacctccaagcctgggaaaggccctggggtcaaggggcagacattatcctccccctcttggcaagtgagaaggtcccagcctgatggcacagcccaaatcactctgatgaggaaagacagggcctgccctgggggagcctcagatgtggtatgttagaggcaagtacattattaaattttcaggaattttttgagccagttgttaaagacaactattattaaaagttaaggccaggctcagtggctcacacctataatcccagcactttgggaggctgaggggagtgtatcatttgaggtcaggagtttgagaccagcctggacaacatggtgaaaccctgtctctactaaaaaataaaaaataaaaaacattttttaaattatataagtttacgattaaacattaaaacaaaggtaacaacaataaaaagtaacaaacactcaaaactagccgggtgcggtggctcacacctataattccagcactttgggagacggaggcgggcggatcacctgagatcaggagctcgagaccaccctggccaacatggtgaaaccttgtctctactaaaaatacaaaaattagccaggcgtggtggcaggtgcctgtaatcccagctactagggaggctgaggcaggagaatcacttgaacctgggaggtggaggttgcagtgagctgagatcgtgccactgcactccagcctgggcaacagagtgagactccatttcaaaaaaaaagaaaagacttgaaaattgaaattgatctatgggctgcagaatggatgttgtgttagcaggcatgaaaacaacatttgtctccttgcacacctccatcagagctctgatggagaccaagaccaataagcagtaatattttgaaaggaatctttttttctgagcagtgggtttaaaatattcagaaaaccggccaggcacagtggctcatgcctgtaatcctaggactttgggaggctgaggcgggtggatcacttgaggtcaggagttcgagaccaggctggccaacatgggtgaaactctgtctctactaaaaatacaaaaattagccaggtgtggtggtgtgcacctgtaatcccagctacttgggaggctaaggcagaagaatagcttgaacctgggaggtggaagttgcagtgagctgagatcgcaccactgcactccagcctgggcaactgagcgagactctggctcaaaaaaaaaaaaaatcggtaaaccatgctgtaagcagatgtgctgtcattcaggctttgttgttatttatagagctcaggcagagtagattttgcaaaattctttttcttttttttttttttttttttgagatggagtctcgctctgtcgcccaggctggagtgcagtggtgtgatttcagctcactgcaagttccgcctcccgggttcacgccactctcctgcctcagcctcctgagtagctgggactacaggcacccgccaccatacccagctaatttttagtagagaccggggtttcaccgtgttagccaggatggtctcgatctcctgacctcgtgatccacctgtcttggcctcccaaagtgctgggattacaggcgtgagccaccacgcccacccctatttcacataattcttaagggccctagggttcttggaatggtaaatgagcactggcttcaacttaaagtaaccagctgcattagcccctaataagagagtctgactgtcgttcgaagctttgaagccaggaattgatttctccttgatagccgtgaaaatcctagatggcatgttcttccacgagaaggctgtttctttctttctttttttttttttttgagatggagtcttgccgtatttcccaggctggagtgcagtggcaccatcttggcttaccacaacccctgcctcctgggttcaagcgattctcctgcctcagcctcccaagtagctgggattacaggcgcatgccaccatgcccggctaatttttgtattattagtagagaaagcgtctcgccatgttgaccaggctggtcttgaactcctgacctaaagtgttcctcccacctccgcctcccaaaatgctgggataagaggtgtaagccactggccctggccagaaggctgttttatctgcattgaaaatcgtgtttagtgtagctcccttcatccatgatcttatctaaatcttctggaaaacttgctgcagcttctccatcagcacttgctacttcaccttgcatgtttatgttttggagatggctgctttccttaaacctcatgaaccagcctccgctggtttcaaacctttcttctccagcttcctctcttctctcagccttcatagaattgaagacagttagggctttgctctggattagactttggcttaaaggaatgttgtggctggtttgatcttccacgtaaaccagtaaaactttcaccatatcagtgataaggctgtttcactttcttatcatttgtgtgtttactggaatagcccttctaatttccttcaagaacttttcctttgcattcacaacttggctaactagtgctagcagcctagtttgggacctatctcagctttcaacatgctttccgtactaagcttaatcatttctagcttttttgtttttttttatttgtttgtttattttttgacagagttacactctgtcccccaggctagagtgaagtggcatgatcttggctcactgcaacctccaccccccgactccctgctccccggttcaagtgattttcctgccgcagcctcccaagtagctgggatcataggcgcccaccaccacctctggctaatttttatatttttagtagaagtgggttatgccatgttggccaggctggtctcctgacctcaagtgatcccctgcctcagcctcccaaagtgctaggattacaggcatgagccactgcacctggcccatttctagcttttgacttaaagtgagagataatatgactcttcctttcacttgaacacttagaggccattgtgggattattaattgatctaattttaatattgctgtgtcccagagaatggagaggcccaagaagagggagagagatgggagaatggccagtaagtggagcagtcagaacacacacagcatttatcgattaagttcactgttttatatgggtgaggttcacggtgccccgaaataattgcaatagtaacatcaaagatcactgatcacagatcaccataacagacagtttgaaatattgcaagaatcaccaaaatgtaggcaaggcgcggtggctcatgcctgtaatcccagccctttgggaggccgaggcaggtggatcacctgaggtcaggagttcgagaccagcctggccaacatggtgaaaccccgtctctactaaaaatacaaaaattagccagatgtagtggtgggcacctgtagtcccagctacttgggaggctgaggcaagagagttgcttgagcctgggaggtggaggttgtagtgagctgagatggtgccactgcactctagcctgggtgacagagcaagactccatctcaaaaaaaaaaaaaaagaagaattaccaaactgtgacacagacacagagacacaaagtaagcatatgctgttgaaaaaatggtgctaacagacttgcttgacacagggttgccacaaaccttccttctgtaaaaaatgcagtatttgcagtgcacaaagcccagtaaactgaggtgtgcatatgcttcctaattctttcactacactttattgttagctatgctctttttttgtttttttgtgttttttttttttatttttgttcctgctttttgagacggttgtctcactgtgtcaccaggctggagtgcagtggtgcgatctcggctcactacaacttccgcctcccaggtttaagggatcttcctgcctcagcctcctgagtagctgggactacatgcgtgcaccaccacgctcagctaatttttttgtatttttagtagaaacagggtttcaccacattggccaggatggtctcgatctcttgacctcatgatctgccagccttggcctcccaaagtgctgggattacaggaggcataagccaccatgcccggcctctttttttttttttaagatggagccttgctctgttgcccaggctggagtgcagtggcatgatctcgctcactgcaacctccgcctccctggttcaagcaattctcctgcctcagcctcccgtgtagctgggattacaggcacctgccaccatgcccagaaaatttctgtattttagtataggtagggtttcaccatcttggccaggctggcttccagctcctgccctcaaatgatccacccacctgggcctcccaaagtgctgggattataggcatgagccactgcagctggtctattagctatgctcttgaggtgatttacatttgttgtgtctgtggggtagaaatactgtacagtggtgttggcagctcttcctgattttgctttcagtgacctcaggttggtagcttgaaattagttgtggcaggagtattcacaccacagaaatgggctattgctactaatcagagctgatagttactaatcccaaccctcccagagccagtggtgaaacactgaccagcactccactggagataggatcatgccccagggagcctgagcggggagataaggccctgccctggaagtcatctgagctgtgccctggccctagcaaacagcagccccccaactgacccactggcctacccacagatgaggagctctatgctggtgtgtacatcgattttatgggcactgatgcagccatcttccgcacacttggaaagcagacagccatgcgcacggatcagtacaactcccggtggctgaacggtaagcgcagccccaggagcccttccgtggccatgtgtctgggatgcggcaaggaggtcgtaaagaagcacatgtgggggaagtggggacatgtttagcctatgactacctggggcaggggtagtttcttatctggagaggagttgggggtgttcttgcacctggctggggattctgttggagaacatcaggggcaccatcagagtaggggctcacccagctgacccctgccacctgcagacccgtcgttcatccatgctgagctcattcctgacagtgcggagcgcaatgatgataagctttacttcttcttccgtgagcggtcggcagaggcgccgcagagccccgcggtgtacgcccgcatcgggcgcatttgcctggtatgcattggcagagccaccaggctgccccttccaccagttctggcttcatcagccctgctccagccagggcttggggtcaagagctgatctgacccggcctcttgccccaccccccagaacgatgacggtggtcactgttgcctggtcaacaagtggagcacattcctgaaggcgcggctcgtctgctctgtcccgggcgaggatggcattgagactcactttgatgagctccgtgagtgcccagcaggcaggcagggtgctctggctacagcaagagggatagaggcgggatgggcgatcagggtgcctttggtgggccccctcccctgtgcaggagtgggtggggcccaggggctcccgcccatggcaccctccaacaccttctccctctgtccccagaggacgtgtttgtccagcagacccaggacgtgaggaaccctgtcatttacgctgtctttacctcctctgggtgaggctggggtcagggccagcagtggcagggagtggccccgttgggggattgtaactcgtggagaaccccagcccggtggcgagctgtggggagggggcagtttggggaggggccctaggtggagggtctgtcctgctcagcagcgcctgccatgcccacagctccgtgttccgaggctctgccgtgtgtgtctactccatggctgatattcgcatggtcttcaacgggccctttgcccacaaagaggggcccaactaccagtggatgcccttctcagggaagatgccctacccacggccgggcacggtaaggaccccactcatcctgcctctcccctttctcttcttctaagaggcctctgggtcaggctctttgcaacatgggccccaccatcatggccctcccagccagcggaggcggtgagctgtaatgcacacacagacgggccttcacacacagtgtcaagctgtggaggagcccagatgggattctgggacaaagatggtgggttgggcgtggtcggctgctcctcagagggtcctctgtggggctgtttgggagctgaaggttggggggaagcgtcttccctgcaggtgctggaggcaggctggaggttggctcagctgaggaacaggaggcaaagagctggggaggggcagggccaggcctcaggcagggtctcagaggtcacagaggcatgtcactttatcttgatgtgacaccggctgatgtgggagcctaagcaggagagcagcggatctggtccaatgcagttctgactccatgtagtcaggactgggctggagaagctggtctcagtgggggacaggggaagcttccctccagaggtaacctggagtcagaaggatgggccagaggtaagctggccatgacggggggcaggctgagcccaggttcaggggacagcttcaggaaggaggagagtgagcctggtgtgtgacaaggacgtcggggcctgcagtccagctgtgcaggagggagacgggtgagaccctaggaacaaccagagaggaaggagatgacaggggtggggagggggacatggaagggagtggtccgcttggccaaatgctgccacgaggtcatggcacctgaggccagggaggtggctgtggcatttggccacctgggaccttggccagagcaggacctgtagaggtcaggtgcagggcagaaacttggagagcgggtttggggagaggagcaggttgaggtagtggggacagacagtgcagcggcctcttctgaagctaatggctccagcctgccctgcccaggcagcctgggactgacactcgccacctgtccacagtgccctggtggaaccttcacgccatctatgaagtccaccaaggattatcctgatgaggtgatcaacttcatgcgcagccacccactcatgtaccaggccgtgtaccctctgcagcggcggcccctggtagtccgcacaggtgctccctaccgccttaccactattgccgtggaccaggtggatgcagccgacgggcgctatgaggtgcttttcctgggcacaggtacccactgctgctcccggcctctcccacgctgggcccaccgggtgcggggtgcagatccttggggctggggcttgccctgctagggcttgctgcaagctcatcagagtcacttcttcatcctcatcctttggtgccttctccctattgatgggataacagaggctaggggtgagaaaaccccattcccacttccatccccaggggcccaggagaacagggacactgggcatctggggacttatgtatgtatggcaggaaaggggtggagacagatggtaggcacctccaggatacagaggccatacacatgctcgtgtgtgcacacacatgccacagtgcaccccctacagttccagcagcccaaacacaggagaatgcatgccccagtgtcctgttctcagcagggcccaaaatcagggtctgggttggtgggggcagaccatggccatgaccccctatgtcctgggccagtcccctttgacctggggaaactcttccaccttggcacaaagctccagctccaatgccctaggggggtttgggccctggtgggggaaggggctgaggctggtaccccttccccagcatccccagccccactgaggccctgcccggcccgttccagaccgcgggacagtgcagaaggtcattgtgctgcccaaggatgaccaggagttggaggagctcatgctggaggaggtggaggtcttcaaggtgggtgtgacaccacccagtcctgacctccccacctttaccctccccccagtcccagcctctgacctgagacctctaggtcagggcagggagggggtccctggcatcccaagctgatctttatctttttctaggatccagcacccgtcaagaccatgaccatctcttctaagagggtaagcctttggcgaggtgagccaaggttggggacagggcctgcatcccctcagggtcatgcccttggcacagggatgggtaaactgaggcatggaacaggggagaggagcccagcctagctggctgttggtggggctggctatgggacaggaactgacaaggccctaccctttgccccagcaacaactctacgtggcgtcagccgtgggtgtcacacacctgagcctgcaccgctgccaggcgtatggggctgcctgtgctgactgctgccttgcccgggacccttactgtgcctgggatggccaggcctgctcccgctatacagcatcctccaagaggtgtggacccctagacacctagaattttagcaaccagtcccagggccctatcctaggggattgggggtgcatgtgatattacccggggtgcatgtgatattaccctaggggagtcttatgggtaagacatcactgccctggggaaaaagggccctgccctggagtcagggagatacagggacctgggggggcaagcttcctgggagcactccttcaggggctatcctcatccaggcggagccgccggcaggacgtccggcacggaaaccccatcaggcagtgccgtgggttcaactccaatggtgagtatgctgggcctcactgtggggtgctgctcacactgcagaagtccacgcagcccacgaagctgctcacagggcccccactgtaagggtgctctgatggctaatggagggtgggggctaatggagatgggatgtccctagttgccccatcaacacagagcactacattggtgagtgggtgcccctcggtgcctgccccgaagcagtcagcaggctgcccggaggtgatgctgcttttgctcaacccctctcactctaaagccaacaagaatgccgtggagtctgtgcagtatggcgtggccggcagcgcagccttccttgagtgccagccccgctcgccccaagccactgttaagtggctgttccagcgagatcctggtgaccggcgccgagaggtgagttcctgcgcccggtgctgcaccgtggatgtgagtccttgcacagtggtgaaatgtagtagaggagtgatctggagcaactctcatgctgtgaaaccccttccaagctcccttccctacatgcaaatcctttgagtgaaaacagttacatggaaactccctgggattggcctcattctatggaaagtgtttctgggtatgcctgttcacatgaaaattccatatgcataccacattgggggtgtaccttctacaaaaacatcatgtgagtgagctccagtatgtggaaattctatggggccctcattttatgaaaatgccctacaggtgtccctgtttatgtggaaattctatgtggttatcccaattggatattctcgttaaatggaaattctggctggacgtggtggctcacacctgtaaccccaacactttgggaagccaagacaggcaaattgcttgaggtcaggggttcgagaccagcctgggcaacatggtgaaaccctctctctaccaaaaatacaaaaattagctgggcatagtcatgcatgtggtcccagctacttgggaggctaaggtgggaggatggcttgagcctgggaggcagaggttgcagtaaaccgagatcattcaactgcattctagcctaggcgacagagccagaccttgtctcaaaaaaaaaaaaaaaaaaaaaaaaggaattctgtgtgtgcttcaaattttcctcattgtacagaacctccttatggtcatcactcctgaaatggaaatctgtacagatgccttattcaaatatctctcattatgtagaaacttcatgtggtttttctggcatatggaaatcccacatgggtgcctctacacggaatggccacaaaggtggtctgatctggttgctggctagggccatagggtggtcacagagcctctgaaccccctctccttgcccctgcagattcgtgcagaggaccgcttcctgcgcacagagcagggcttgttgctccgtgcactgcagctcagcgatcgtggcctctactcctgcacagccactgagaacaactttaagcacgtcgtcacacgagtgcagctgcatgtactgggccgggacgccgtccatgctgccctcttcccaccactgtccatgagcgccccgccacccccaggcgcaggccccccaacgcctccttaccaggagttagcccagctgctggcccagccagaagtgggcctcatccaccagtactgccagggttactggcgccatgtgccccccagccccagggaggctccaggggcaccccggtctcctgagccccaggaccagaaaaagccccggaaccgccggcaccaccctccggacacatgaggccagctgcctgtgcctgccatgggccagcctagcccttgtcccttttaatataaaagatatatatatatatatatatatataaaatatctatattctatacacaccctgcccctgcaaagacagtatttattggtgggttgaatatagcctgcctcagtggcagcatcctccaaaacttagacccatgctggtcagagacggcagaaaacagagcctgcctaaccaggcccagccagttggtggggccaggccaggaccacacagtccccagactcagctggaagtctacctgctggacagcctccgccaagatctacaggacaaagggagggagcaagccctactcggatggggcacggactgtccaccttttctgatgtgtgttgtcagcctgtgctgtggcatagacatggatgcgaggaccactttggagactggggtggcctcaagagcacacagagaagggaagaaggggccatcacaggatgccagcccctgcctgggttgggggcactcagccacgaccagccccttcctgggtatttattctctatttattggggataggagaagaggcatcctgcctgggtgggacagcctcttcagccccttctcccctccccgcctggccagggcagggccaccccactctacctccttagctttccctgtgccactttgactcagaggctgggagcatagcagaggggccaggcccaggcagagctgacgggaggccccagctctgaggggagggggtccgtggtagaggcctggggccggtagaggctccccagggctcccttatgtccaccacttcaggggatgggtgtggatgtaattagctctggggggcagttgggtagatgggtgggggctcctggtggccttctgctgcccaggccacagccgcctttgggttccatcttgctaataaacactggctctgggactaga

SEQ ID NO: 1255 - DNA, 15304 bp, Homo sapiens
tgacagcagcccggagccgcggagcctcagcttccgcctggacccagcctcgtgggagccccgcgggtcctgcccaggtgagtggagccccagggcagatccagaaccaggattattgggatggggagtcctctctttccaggtggggtcaccggctcgcagggaggatctggggtagaagaggtcgcctcgcgaatgagagggtcgctgtgcgttacgcgtgtcggtgtgctcgggctcacctgggcgtgcctctctaagtgtatttcctgtgcagcacagaaagccattgtttccatttttgcctgagtgatcctcttaaacggcgaatcagatcgggcccctccttcacttaaaacccttgggtcatagagattaaaattcaaagtccactagtttttgcctagtctctcctcctgatctctccaacctcattgccctcctatctactccttcctcatcgtattccggctacaccagccgccttgatgatgtaaaatgtaaaaagcaagtccatctcagctccaggcctttacccttactgtacccctcacccaggcgactcctccaaatctttgcctaactgcctccttctgtactgaggtctcagttccaatgtcactttataggagaggctgtcctgtccagcctcctctatcacatctccctggcttatcactttcattgataactcttagaaatggtctgtcttctccattcatcttgtgctcgtttgcagtctgtcttgcgcagccgactgcaagctctggagggcagggtggtgccgagctttaatctccttagtcactgtatctctaggtcctagaacagagcctggtgcacagcaagtgctccagcaatggtcgtccaacgtcaaaagcgagtcctgcctacatctgtgtttgtgttgcctgtgctggtggttcccaccctccacgtcctccccacacgtggacacatgtttatgatccaactggaacatgaataatcccctctctcctctctctatgcttggtctgattcctgattctgcccgtttcttctcttccgtgcccgaataaatgatcccaaaggactcagaggcaggagatggcttagttggcctttggctgacctatggccaccctgtgtcctcaaactaaccagaaccttgccattgactcaacttcactctcactaagggagacacaagacaggaacttggggttgggaaactctgcgaccgaggctagccctggtccaggtgacaaacaggaagtgcgcaggcattgcaaagacacacctggcttcaggtatgcggcactggcagctggctccctgcccagcgctcctcccctaaagccacctagggctggtctgggaacttcctgctgactcaggaggcaggaatttctctgcagaccccaccagaagactttgcagggctgcagggagagcttgcaggagagtaagaagcagattatcttcttctggaccatccagagaaatctcccccaccagacacctgagacacactggccctgaggcctgtgagattatcgggaaactaccaaaatgtctgagatccaaattcaatcatcatgataaccacatgtatgggctccgaaatagaaggatctgcaaaggcaacattgctgtttgctgacattgctacaaaatgtgaccttttaaaaatcttaaccctggggttacattcttttttttttttttttttttgagacggagtcttgctctgtcacccaggctggagtgcagtggtgtgatctcggttcactgcagggtctgcctcctggattcaagcgattctctctcctcagcctcctgagtagctgggactacaggcacacgccaccatgcctggctaatttttgtatttttagtagagacggggtttcactgtgttgaccaggctggtctcaaactcctgacctcagatgatccacccacctctgcctcccaaagtgctaggattacaagagtgagccaccgcgcctggcccccagcgttgcattctaaagcaaagaataggggttagatctgcacctatcctgagaacctctgagtgtgcgcataggttgccgagaagccatggatgtttgtaagttaaattccccctgactgggatgttttttcacccagagtcacctggcacactccccagaattccttccagactttactcaatgagacctttcctggtcacatgatcaaaaatgttcacccagcctgggcaacgtggcaagacccaatctctacatatatatttaaaaattagccaggcacagccagacgcagtggctcatgctggtaatcccagtgctttgggaggctgaggagggtggatcacctgaggtcaggagttcgagaccagcctggccaacatggagaaaccccatctctattaaaaatattttaaaaattagccaggcatggtggcacacacctgtagtcccagctactgaggaggccgatgcacgagaattgcttgaaaccagcaggcggaagttgcaatgaactgagatcatgccactgcactccagcctgggcaacagagtgagacttgatctcaaaaaaaaaaaaaaaaaaaaaaattagccaggtacagtggcccacgctcatagtcccagctactcagaaggatgaggtgggagaatcacttgagcccaggaggtcaaggccgcaatgagctgtgattgcaccactgcagtccagcctgggcaataaagcaagactctgtctcaaaaaaaaaagagtgttcaccctagcacctgtactttcattatatcccatccatggtttagtttttttgtctagcactcactcatgtatgccatcatctagttcttttctgaggtgctgctccccagtagaatgtcagctcccaaggacagagatttccatctgttttgttcaatgctatgtctctagggcctagaacagagcctgggaccccataaggtgctgaataaataggggttcagtgaattcattaattacatttctgcaagatggggtggcatgttgtcatcttcagccattttttttttcttcgattgcattatatttggaacaggcacgatggtgacatctgtaatcccaactacttgggaggctgaggctagaggattccttgagcccaggaattcaaggctaaagtgtgctatgatcacacctgtgaatagcactgcactccagcctgggcaacacataagacctctctctttaaatgtaaaaaaaaaagtctgcgtgcagtggcttatgcctgtaatcccagcactttgggaggctgaggcaggtggatcacctgaggtcaggagttcaagaccagcctggcgaacacagtgaaaccctgtctctactacaaatataaaaaaagaaaaaacattagctgggtgtggtggtgcatgcctgtaatcccagctacttgggaggctgaggcaggagaatcgcttgaatctgggaggcagaggttgcagtgagccaagatcgcaccattgcactccagcctgggtgatagaatgagactctgtctcaaaaaaaaaaaaaaaaaaaaaaaaagatttgatggagctgtctccaaaattaagaagaggatgaaaggagctgacccagacactcaagcagggctaattattccccttttacagatgtggaagactgaggcctgttgaaagtgcagagctcagccctggcaccctctgttcccaagagctccatgcaggtgccacaggatggagaagaccttgctggccaaccttggtaccacggcctcctgtcccgccaggtaccacccacagcaggacctcagcaccatctggtggggagcctctcccacccttgctgaggattcctgggtccctggatgagggacttagtgccaaggtctattgggacaggtggcagagggctggggactgtcttgaaggttggctggctggggactgtcactatatttaaattatcactttctttgggatgatgagattggtgatggagcttaaggagagtcctaatgcccccaaactactcttggctctggccgtctctccctctgaactccatctacctcctggtatttccctctaaatgtgaggctcccaagccaggcatggtggctcacgcctgtaatcccaacagtttgaaaggccgaggtgggcggatcacttgaagtcaggagttcaagaccagcctggccaacattgtgaaaccccatctctaataaaaatacaaaaattagccagacatggtggtatgcgcctgtagtctcagctacttgggaggctgaggcaggagaatctcttgaacccaggaggcagaggttgtagtgagccacaattgtgccactgcactccagactgggtaacagagcgagactctgtcaaaaacataaataaataaacaaacaaataaatctgaggctcccacctccatctgaaactcagttgtcacccccaaaaattctgggaccctgagcatctcatgaaatcatgagaggcagtagaacttaatagttaaaatcccataattgagacccagacaccctaggttcaaatccaaaccctacaatttatattgtatgtgaccttgggcaggacatttgacctctctgggcctcagtctcccgatctttaacatagggatagcaggccaggcatgttggctcatgcctgtaatcccagcactttgggaggctgaggcaggaggatcacttgaggtcaggagttccaaaccagtctgggcaacatagcagaactctgtctctacacaaaaaaaaaaaaaaaagcgaaaattatccaggcatgggtggcatgtacctgttgtcccaactactcaggaggctgagatgggaggattgcttaagcccaggaggtcaaggctgtgagtgagccatgagtgctccactgcactcagcctgggcaatcgagagagaccttgactcaaaaaaaaaaaaaaaaaaaaaaggccggaagaaaaaaatgggccgggcatggtgactcatgcctgtaatcctagcactttgggaggccgaggtgggtagatcacctgaagtcaggagttcgagaccagcctgacctatatgatgaaaccccctctctactaaaaatacaaaaaagtagccaggcatggtggcatgcacctgtaatcccagctactcgggaggctgagacagcagaatcgcttgaacccaggaggcagaggttgcagtgagccgagattgtgccattgcactccagcctgagcaacaagagtgaaactccgtcccaaagaacaacaacaaaaaaaggtataataatacctaccacccttgttacaggaattacaagagttaacaccctttacatttaaagcagtgcttgacatatagtaagggctacacacgtgtgtctgctacatctattatttagtccccagaccccatgttcagctctactttgcctctctctggggtcctggcccttctacctgcctccccaagccttttttttgtttttttttttgttttttttttgtttttgagacatgatctcactctgtcacccatgctggagtgcaatggctccatctcggctcactgcaacctctgcctcctgggttcaagcgattctcccacctcagcctcctgagtagctggaatgacaggtgcacaccaccacgctcagctaatttttatattttttggtagagacagggttttgccatgttgcccaggctggtctcaaactcctgatctcaagtgatctgcctacctcagcctcccaaagtgctgggattacaggtgtgagccactgtgccccacccttcctaccctattttgacaccagccaccacagctggcataagactgcttgcaaatgtttataaaagagggggccccaatctggaagcatccagctaatggcttctcttgaagccacatttgcataacaagcacagtgcatttaccaaattagatgttgcattggtcagcatcagctagtggctgtaacaaacattcccaagatatcaccagctaaacacagtcaacatgttaatgtcatagtccaaggtggttgagaagcagagatgcaaagctccataaatcagttgggagccaagtgcatcttgtagctctgtcatccctctgggctttgggggatatcagctgacagacaggggacacaacctataagattgtgcagcagggttttatgcgccaggtctggatatttcccatagcccttctaccccacatcccattggccagttctcatcacatgacaaccctagccgcaagggaacctgggaaatgtagtctacgtaggtgccaggagaaagggggacagaacttggtgtgaaagttccccgtctttgcctgccacagaagtttcactggggtagcttttcttgggtggtgggggcaatggtggggggagctaccattaaccactgccctggactcattcctaattcccctgccccctgaacttcatccacagaaggctgaagctcttcttcagcaaaatggcgacttcctggttcgcgcctctgggtcccgtgggggcaaccccgtgatctcctgccgctggcggggctcagccctccattttgaggtgttccgtgtggccctgcgtccccggccaggccgacccacagccctctttcaactggaggatgagcaattccccagcataccggctctggttcacagttatatgacaggcaggcgcccactgtcccaggccacaggggctgtggtctccaggcctgtgacttggcaggggcctctgcgacgcagctttagcgaggacaccctgatggatggcccagctcggatagagcctctcaggtactcacagtctccctgcctccttgagaacacccaacactcgcagggttttccaactcaatggttgactttttttttttttgactgagtctcactctgttgcccaggctggagtgcagtggcatgatttcagctcactgcaacctccacctctcaggttcaagcgattctcctgcctcagcctccagagtagctgggattacaggagtgcaccaccacgcccagctaatttttttacttttttattttttatttttctctggagtcgaagtctcactctgttgcccaggctggagtgcaatggcacgatctcagcccactgcaacctccgcctcccgggttcaagcaattctcctgtctcagcttcccgagtagctgggattacaggcgtgcaccaccatgcctggctaattttttgtatttttagtagagacggggtttcaccatgttggccaggctggtctcaaactcctgacctcaagtgatccacccgcctcggcctcccaaagtgctgggattacaggcatgagccaccacgcctggctaattttttgtatttttagtagagacagggtttcaccatgttggcctggctggtcttgaacttttgacctcacgtgaccgcccgcctcagcctcccatagtgctgggattacaggtgtgagccaccgcacccggccttggttgacttttgaggcccgaacattcttagttgtgggggaggaggtggagatgtcctgtgcatcatagggtgctgagcagcattcctgagctccatccaactagatgctactagttgtgacaactaaagatgtctccacacgttgctaagagtcccctggacgtaggtcaccttgattggttgagactcactggtacagagtaactggacacagggttttgcagatattggtgggggacactgcttaggtggggactacaggtttctcccacttctgtcccccagggcaaggaagtggagcaacagtcagcctgcagatttggcacatatggggcggtcaagagaagaccccgctgggatgggtaagtgtctgctagaatggcctgtggctcagggattggctctgccactcaccacctaagagatcttggtcaggtgcaggcacctcttcgagcctcaatttcttgctttagaaaatgatgacaatcacgatgacttaaaacatgcagggactttgtgggtgcttaaaatgtgtgtttacaaggctgagcgcggtggctcatgcctgtaatcccagcactttgggaggccgaggccggtggatcacttgaggtcaggaattcgagaccagccttgccaacatggtgaaaccccatctccactaaaaacacaaaattagccgagcgtggtggcacgcacctgtaatcccagctactctggaggctgcggcaggagaatcgcttgaacctgggaggtggaggttgcagtgagccgagatggcgctaccgcactccagactgggtgacagaacaaaactccatctcaaaaaaaaaaaaaagtgtttacaattattccaaggagctgtacctgttctgaccacagcttaccttgctaacaacttctgctacgtaccctcctcatgctggtcacacagccctccttgcagttgttcgaaccctcaggcttttattcccgcctcggggcctttgcattttacatttccaccagtgacgggaacattctcattcccctaattttttcctgagtggctcctctccatccagggtaagttcctcaaagcagttgagtctgacggtcttacctaaaggaggactcacctgaatgccccctcatgccccttttttcccatccttctcccaaccccattcaacatgagccgtccctgcatcccaggccctgcacggagtgctaggatacatcaacaaaccagaaagagacaaagatccctgcccgatgggagccaacagtccacgagaggacaacaaaccatgaaccacaaaaataaggcaattttgtttgcttcaagatgaaaattaaaacacaggaagggaaggccaggcacagtggctcaggcctgtaatcccagcactttggaaggccaaggcgggcggatcacctaaagtcaggagttcgagaccagcctggccaacatggcgaaaccccgtctctactaaaactacaaaaattagccgggcgtggtggtacacacctgtaatcccagctactcgggagactcgggaggctgaggcacgagaattgcttgaacccgggaggcagaggttgccgtgagccaagattgcaccactgcactccagcctggacaacagagtgagactctgtctcaaaaaacaaacaaacaaacaaaaaacagtaagggaagggtgaggtggctcaggtctgtaatcctagcactttgggaggccaaggtgggcggatcacttgaggtcaggagttcgagaccagcctggccaacatggtgaaaacccatctctactaaaaaaaaataaaataaaataaaatacaaaaattagccaggtgtagtggcatatgcctgtaatccaagctacttgggacagagtgagactgtctcaaaaaaaccgaaaaaacaaaaacaaaacaaaacaaaaaaaacagagtaagggagatagagactataaagatggagatgtatattgcaattttattttatttctatttatttatttatttttgagatagagttttgctcttgttgcccaggatggagtgcaatggcgtgataccggctcactgcaacctccacctcctgggttcaagtgattctcctgcctcagcctcccgagtagctgggattacaggcatgtgcaccacgccctgctaattttgtatttttagtggagatggggtttccccatgttggtcaggctggtctcgaactcctgacctcaggtgatccacccacctcaacctcccaaagtgctgggattacaggcgtgagccattgtacccaagcaagcaattttaagtggtagtcaggaaaggccccattgcagaaaaaaataaaattgaaggaaatgagggagggaacaggtggataactgggggataagcaggcaggaggaagaggcagtgcaaaggctcttgggtcagaacaagaatttaagctgttcattcaaccaaaaaatgagtgggtagctgggtgtggtgttgcacgcctgtggtcctagccacttgggaggttgaagcaggaggactccttgaacccagaaagtcaaggctgcagtgagccgtgatcgcaccattgcactccagcctgggccacagagtgagaccctgactcaaatttaaaaaaaaaaaaaaaaagaagaagaaaagaaagggctgggtgcaatggctcaatttcttcttaaaaaaaaaaaaaaaaagatacacgtgcagaatgtgcaggttgagcctattcaaaggcatggtaaatacagtctcccaaaagtcttagtacagttttaagtactaatagtccagaaattacaagcctgtaatcccagcactttgggaggccaaagcgggcggatcacgaggtcaagagatcaagaccatcctggccaacatggtgaaaccccgtgtctactaaaaatacaaaaattagctgggtgtggtggcgcctgtggtcccagctactcgggaggctgaagcaggagaatcacttgaacccgggaggcagaggttgcaataagccgagatggcgccactgcactgtagcctggtgacagagtgagactccgtcaagaaagaaaagaaaggaaggaaggaaggaacgaagggagggagggaaggagggacacacgagtgtagctgaagcagagggaatgaggggagagtcagagagagagaccctggggctcagattgtgaggatttttcagctactgtgagcactttggaccttaactcagagtgagccaggcactgttggatgatttcaagttcctagaaaagagcctattcaaaggcatggtaaatacagtctcccaaaagtcttagtacagttttaagtactaatagtccaggagatcaacatgccaccaacttacaaaggacgtcatttgaaagtttacgatgaggggagggaacttagaggaggggtcagtaggtgcagcaaaccaccatggcacacagatactgaacctgcacattctgcacatgtatctttttttttaagaagaaataaaaaagaaaaaaaagaaaagaaagtttaataagcttggtttctttgacacttatctgagtgtcataccatacgcagctttgtgaattttttatactttgtctctctatagatatctatattaattgtatatattttatatagatatgtctatggagagatatattatcacaaaaaaagtaaaatatctatcatatataaatgtaattatatgtagtatatagggcaacattatacatttaataatgttaattttatttaacatatacttaatttaaatatatattatatatttatataatatatatctatctctatagatatgatatagagagatatatcacttaattgtagatagatagatatcttttttttttttttgagacagggtcttactctgtcatccaagctggagtgcagtggtgcagtcatacctcactgcagcctctggctcaagtgatcctcccacctctgcctcccaagtagctgggaccacaggtgcatgccaccatgcccagctaattttctaactttttgtagaaacaagatcttgttatgttgcccaggctggtctggaatccctagcctcaagcaatcctctcaccttggcctcccaaaatgctgagattacaggcgtcggccaccacgctcatcctttttttaaaaaaatttttaatttcgttgggtcactgcttaccatctttcagtcagaggggcaaaaacaaagaattcaaatttaaaatgtagtattcagaattcatagggtcaggcaaggtggctcatgcctgtgatcccagcagtttgggaggccgaggagggaggattgcttgagactaggaattccagaccagcctgggcaacacagtgagatcccatctctataaaataaaataaaattaaaaaaaaataatttacagaactatagagatgctaaagttttctaaccatgtgtaagcatgtagcatttctaccgtcgaggtggttgaaattcaaaactgcacccggataggttgttataccccattattggaatgagtggatggatcaggtgggtggtagccgatgaagctctcacccccgcccattcagcaatcttccctgtgtattcccattgacccctcttgtatgacctctagaagcctccaccatgcccatatctgccttgccccgaacgagcagtgacccggtgttgctgaaggcccctgctcccctgggaactgttgccgacagtctcagggcctccgatgggcagcttcaagccaaggcaccaacgaagcccccccggacaccctccttcgaactgcctgatgcctctgaacgtcccccgacgtactgcgagctggtgccccgagtgcccagtgtccagggaacatccccgagccaaagctgcccagagccagaggccccatggtgggaggccgaggaggatgaggaggaagagaatagatgttttacaagaccacaggctgagatctctttctgcccccatgatgccccctcctgcctgctgggcccccagaatcggcccctggaaccccaagtcctgcataccctccgtggcctgttcctggagcaccatcctgggagcaccgcccttcacctgctattggtagactgccaggtgggtcacctcctgggatgctcctccccaggcccagggcaagacccaaccatgcctacataatcacgcttcacctgacttccccattcccttctgcaggccacaggcctcctgggagtgaccagagatcagcggggcaacatgggagtctcatctggcctggagctgctcactcttccccatggacaccacttgaggttggaactgctggagaggtgagccagcagcttgtaatcttggttgggggaggccaattccccccacttcccaagatctccaaacagctccccactcatggttccccagggaagaagggagatggggcaatgccacctcctgtcccccctcacccctgcattacaaacctccccacttcccccagacccttgccctccacctctgcaggcatcagacactggcgctggccggggcgctggcggtgctgggctgctcggggccgctggaggagcgcgcagccgcactgaggggactggtagagctggcgctggcgctgcggccaggggcggcgggggacctgcccgggctggctgcagtcatgggcgccctgctcatgccccaggttcgtggggagcagggactggaggaagctggagtgcgggtgactgggaagactggagaggaggcgtgctcagatctcttctcccaggtgtcccggttggagcacacgtggcgccagctccgaaggagccacacggaggctgcgctggcctttgagcaggagctgaagccgctgatgcgggctctggatgagggcgctggtaagtgaaggtctggggcttagcatcccctgggggcccagaccaaatttaacaggactcaatctagtcctatgcccagtccctgcatctgttctaggcccggtcccttcaccataggccccgccctccacatgagggttggtcctggccctttccctaggccccgccctccacacgagacttgttcctaggccacgcccccaccagccttggtcccagcccctttccctaggctacgccccttcgccataggccccgccctccatacggggcgtgtggtcctggcccctctccacagaccccgctgtcgctcagtcctaagccccgcccctgcatttgtcctaggttccacctctgccctatgccccatctacagccccaaaccctgatcagaccctccccctccgcaggaccctgcgaccccggcgaggtggcgctgccgcacgtggcacccatggttcgcctactggagggcgaggaagtcgcggggccgctggacgagagctgtgagcggctgttgcgcaccctgcacggggcgcgtcacatggtccgggacgcacccaaattccgcaaggtggcagcccagcgcctgcgaggtgagcgttccctctgcgctggactgcagacttcagagcaccctgcaggttctaaccggatcccccaaacccagcctgtcccaggaggggagcctctcgccacgcctcccggagccccacccaaactgggacggctccactccaggaaggttctcaccccaagcaaacgctgcatccagcggtattgataggaacagggccgtccacctcaaaacgggctgtcctgcccccagagccacctccgcgggtccccactcccccttcccacctaagacgatcccgtcccccagggatctcgatccccaagaacgccctgctccctccaaaacgactcctccgtcctatcctagggcagcccacccggcaagatccccccaccttccccgacaacctgggatcccgtcctcggggcagccccacgtccaggcacagcccctaaggcgggacctccaggatctggcacctggaacaggccaccccattgcactgcggtagagcccctcaggcaccccacccccattcctgcagagagctggaagccccctcccctctgaccccgcctagtcatcccgcaggtggggcaggtccctcccgggcccctgttgggtcaaagtcctctggggaaaggaaggtgccgggaggttgggaggggcgaggcgggcgcctgggccccgcccccagcccacctgaccttgcttccaggattccggcctaacccggagctgagggaggccctgaccaccggcttcgtgcggaggctgctctggggtagccggggcgcgggagctccgcgcgctgaacgctttgagaagttccagcgcgtcctcggcgtcctgtcgcagcgcctggagcctgaccgctgagagcgcagacacccttcttcacacccgggacccccaggtttttgcgaaccccagaagagaccaaaggagtcgtcccaggctcctcgcgcctcaggtggaatcctgccctgtgcctcacagaagaggtggggaccgcagtcagggtcacctggaccatggtgaacatgtgacctgcagatctggcatcagaggccagagttcaaatgtgactccacctcttaaaagccgtgatttctagcagttgacttcacctctgtgtcggcctttaacaaaatcatagccatacagcagctcaggcctgtaatctcagcactttgggaggccgaggcggaaggaaggcttgaggccaggagttcaagaccagccagggcaacatggtgagacctcatctctacaaaaactgaaaaataaaaaacttttaaaaaatgtaaaa

SEQ ID NO: 1256 - DNA, 255036 bp, Homo sapiens
ggaggtttcactgcacaacaagatggcggcggcggcggcgagcggagctggcggggctgccggggccgggactgggggagccgggcccgcgggccgcctgctgcctccgcccgcgccggggtccccagccgcccccgctgccgtgtcccctgcggccggccagccgcgtcccccagccccggcctcccgcggacccatgcccgcccgtatcggctactacgagatcgaccgcaccatcggcaagggcaacttcgcggtggtcaagcgggccacgcacctcgtcaccaaggccaaggtaccggcgcaggggccaggcggcagtcggagcgtggcggggccgggagaggtccgcgccccccagccggggggtcggggcggcgagcgcggcgcgtggtgggagcgttgggggccgggaggcgggagggagccagccgcggcggggcgggcgcggagctagggacacctgggactcgagacggcggaactccaagcagggggccgagggcacagagcaccggcgcccaggagccgggcgcggggaggggtcctcggggctgagggcaggcgggtaaaggggatgattggaaagaaggggtcggaactccccgagggccgggagactgtaagcccagaagactctggaaccagcagctagggaatcataagggaatgagggcaggggcatatgaaatgtggacccggaggatggggaaaaacaagggtgaagtggcagacccgggcttgtaaggggacccaggacggctggggcacggactgggaatgtgcacgtctgcagggcgctgggaggtcccaggatcctggtgccttaagacagagacaggaatccgcatttgatcatctaagactgatagatggtgcgaaggggatcccgaggagacacgattagtggaggaggcaatgaggaaaatggggaaataagggggaaattgctttgcttgtccacaggaaggggcccagggaatgggggagtgaggtgggggtgggggctgtcccaggtttatgatggcactaggtagtcaggggttaaacaatttgggagagctgattgctggttatttttagttgttggagggtcgggaattgtgggctttgtagaacccagggtgggcttttactggttggggggaagcttgtgattgaagaacccagacaccgggagattacactcatcgagcccttagttctcaaagggatttgaggcgctataggagtgaaattggccaaggtcaattaggaagctatatatgtatgcatgtaaaattctttgaggaaatatggtagcactttcatgtagccttcgttgggaggactggaatctaagacatcaggaggaatcttttggttttggtggaacccgcaaagcccatttttactctaaaattttctttgctcaatatcttacttgaatgaatacttttaatgtagtcattcattatgtttagaactgcagcttgtgttttccctcagcctgaggaatgaagaacccttacagctgctgccgcctcctaccaaagccacatcaattcccctcacctcctcagcctagcctctggttgtcatgacctaccttgtttttgcttttttggcagtggcttgttttctgaagccagtgacttatctaggccttctctcctgatcacttgcaacctgaagttccttccccaccatctttctgcctgaggctacaaggggcccttcttaccagggtgtcagggtgggtggctgtggcgaattgattggtcagtttcacttcctctggagggccctcttcagcctttttgtccgtttttatcacagggcctccagtctgcaggtcagagctgaatgagataccaaagtccagggctccctcagaccctgaggggaagtcaggggaagtcgattgagccaagactttggtgtgctcctcacttgccaccccagcccctcaccgtgtttccagtctagttgactattagccaaggcaaacttacatttacaaacaatatgccttgttccttgttttgctatttctttcctttttttctgcctattttctgtgtaatcactttgtgctcctgtggttattttgctctgacctctgggggatagtctccatgaacttaattggttgcctggtttatggtttcatgatttaaagaattttgaatcttccagcccttggatacaccaaaatattgataaaatctgttacagacagggttgaatgttttcgtaaatgtaattgcaaacagttgattcttggctttaatataaaagagacatttctatcttcagtagtcagcaaagccagtgcctaattatggctggtctgcccgctttctaattttcatgtgtgtgtatatgtgcgtgcgtgtgtttttcatagtttttctctgagaccttggtatcctttaggactgcagcattttaaacactggcttgtttacaaacgggtgtcactgtttatgttggtttttatctttgatcatttgtggtatgcagttgtgcaattcctatgtatggaaatattcaaagtcttgaatgagactgaaatggcttggacaatgagttgcatgtgtgaaggagccacaccagcattcatttgtgtttctgtagcagtgtgcaatttcctagttacagttacaagtgctatatcttttgctgcttaaattactctgactacatgagtgaagcttaattcacaaggagttgtcacgtgctctgggtgaactaggagcatattttggcctgctccatgcttctctgaatccactttggaaggggttctcaaatgcggacagcttagatgtgcctaacagctgtcgacatacagtacgatggcctattaaggttatggtttggttatataacaatggtgaaggtgcataggtactagaagttgccgaagctgctgcttcagttaactcaggttgattttttttctccccatgcactgcagcctttatcttacttctgcagaggggtcatttggaaacagagagttatttttttcccccatctgtctccagaatgtgtcatttgttgttttgtcttttagaggtgtgtgatttttttttccccttgtaggaaatggtctgggttttcttataaccatatataacagtcagacagaggtaattcagatgatacttgtgttggctgaaggaggttaggtaataggtattttctgaacattagaaataattatgatccccctcctttttttttttttttttttttttaaacacacatgacccattccaagaactaagagactaaagtaaacctcatttattgagtaggatactgcactccatccaatactgcgtggttaagctggccctttcccaaattctgttaactctcaaaccgtctagagtgggatcctgggatgaataaaatcagtagagaaaagtgaagcttttcctatttggttgttggttacttttgcagcacggcattcatgagctcagacttcatattggcagcactgcagtgcttagagcggcactgcagaacagttaccaggagagaatgttcagctgtgacatactttggttagtagctcaccctggctgtctttgtcctacctgctttgatttccttttctttggaagagccttacttagcctgaggttctctggctctgtttttttttttggtaggaaactataaagtattacagatatttttaaaaaagaatgttttctgctctcaaattgcaggtagtctgttgcctgtgcctaattataccttcactagttggatgattgggaacaaagagtagatagattttgtatgcattttttttccttttttaaaatattggggcagggtcttactctgtcacccaggctagagtgcagtgacactgccagagttcactgtaacctccaactcccaggctcaagagatcctcctgcctcagcttcctaagtagctgggactacaggcttataccaccacaccaggttaatttttaaattttttttgtagagatgggggtctcattatgttgcccaggctggtcttgaacttctggactcaagtgatcctcctgcttcagcctcccaaagtgctgggattacaggcatgagtctgtaacccaaatgcttggcccatatgcattttttaaagtatgcatgactataaaagcctttggccaaatacgtttaaactatatttcaacaaatatatatcacttgcctgttattggtttgtggtaagagttccagctttggataaagcaacctgagtttgaatcttttgctgcttaatagttggatatttttaggctgtgagaagttatttaacttctgtgtgcttgggtttcctcatctgtaaagtgggatgacagtagtacttacctcacaagtttaggtgttatgaagattaaagaagatagtgtatgtaaagctcttagagcagcatggtgccctaatagcatgacgtaaatattaccatcatcatcatcgttatcagatgttttagtaacataataatattatggacataataatagtcctcctttttttgcttctcaccccttgggcacgattcatgaatgtatatgccattagttttgtgtaggtagatgccatcctgacgatagactttcctggtaaaaaaaaagtttgctactattgcaggtgccactttgagatagttggatttaatttgtatagggtacaggctggctaatctcatgaaatcagcattttaaaacataaattttcattagttaaacttttttttttttttttaaatagcaatgtgacttatctaatgaaaactgtgaccaacactggcttttgctttgggctgccttgaattttcagtgtgttttgtgtaactaatttttgttatgttgatgatggaacagagttgagtgcagtcttttctccagaggtccacttaaattaggtttaagtgaaatatttaagaaatgtttctgcaagcttaaggacacatttgcccttgcgtgcacaagcaaaggccttagacggccaaggtcagaattcttaactttaaatattacacagagaagacattttgccctatgacccctttccaaatattgactagccagacacatcggtgtggtttagtgcaaactcatttccatgaggagaacaagtcaaagtgggctaaaagcattattttcacctctaaagaagagtttaacgaagcacatgagatgatgctttcacccattagaaaactgaaaacaagattcatttggtaagtaggagagaattatgtcaaaaagaaattgaaagcagaatttacattagatacatttgaggaagatagccccatccctagacaatctagaagtgactattgaaagatgattatgttcagtttgatacagtggtgatggggttgctaaacgtttttgaaattttgtaaagagctaagactgattgagactagtctctccagagtcaaaataccagtattccattttctacatcaaagatgtttattttaacattttgactttggtgccagctccctagaaagtcatagatctcgctcaagccagaggtgcccagactagttatttctgtgccagaagtgctgttttcatttttcaggcttcagtctggctaatgttttctagttcatcgcgtaaaagagaacaaaatggatgctttgaaaagaaaaagaaatgctttctactcaccagagccactgtaactgtaaaacaacacctaagacatctgcatagagatggaacctttcccttaatcatttattcattcaacacatttattgaatgaaaattttttgtcaggttccattctagggtctggagtgcaccaatgaacaagggagacaaaaagcatctgcctttctggagctttctagtagaaggagacagacaagggacatgtaaaaaaattaaaaatttcatataggaatgaataccaggaagaaaataaacggactagagaatccctggggggggctgctgcctcagatagagtggtcagggaagacctttctttccaagatgatgatatttgagctgagacctgagtgatgagaaaaagccaacctgggaagatttggaagacagaagattccttacagaaggaatggcatgtgcaaaggccatggggcagaagtgagtttggtttggtcaaagattagacacaaggtcatgatgccatggtaccttagcaaacaagtggaaggatgggaaaagatgaggccagacatgtaggaggggccagatcatctgggtcttatggccattttatggaattgggtgtgacacgggggtgacatcagagagtatcaagcagaacactaatatcacctaatttatgtttttaaaacgtggctggatgtggtggctcatgcctgtaattccagtgctttgggggggcatgaggcaggaggatcacttgaggccaggagttcaagaccagcctgggcaacatagtgagatcccatctctacaaacaatttaaaaattagctgggtgtggtggtgcgcacctgtagcctcagctacttgggaggtggaggcgggaggatcacttgatcctgggagtctgaggctgtggtgaactatggacacaccattgtatcccagcctgggtgacagagtgaaaccctgtctcaggaaaacaaaccaaaagaaaaacagcaactcatgctggttattttatggttaagagcaagaatccttttctgatgcatttcttggcacaagggaggagttcagttttaacaacttatattctttctcactgtagaggaatattgacataaattgcacataaattaagcatgatcaactaacaagtatttgttgatttattgggcatgaaaaagaccttagagaggttctattctagttctgtcttctccacagtctggaaagacagacttaacagaatttataatctcaggttttgcctggcatggtggctcacgcctgtaattccagcactttgggaggctgaggcaggtggatcacctgaggtcaggagttcgagaccagcctggctaacatggcgaaaccctgtttttactaaaaatacaaaaaattagccaggcgtggtggtacatgcctgtaatcccagctacttgggaggctgaggcaggagaattgcttgaacccaggaggcagaggttgcagtgagccgagatcgtgccgtcgcactccagcctgggcaacaagagtgaaactccgtctcaaaaaaaaaaaaaaaaaaaaagaaaaaaaaaacctcaggattttacggacttttaaagtcatttagaccaattatccattagattcatggctcatctctctcctcactcccattttcccggagtcttataggtagttagtgggggagctggagttagaatccagttatcactactcctacttaattctaccctgacttctctaatcacagaaaacagtgcccttgccttctgagcacttgcttttttactggggaagcgagatacacctataccaattaaagtctaagatatttatcctttctataagacaaaccaaaagcgagatgtcatgatgagaggaaacatttccgagtagagaggaagagtaaatattccaaccctgtatttcacctgtcctttggcattataccactctgtcacctttgccactaacttttagtaccctatgggtccactgctttgcctttaaatctgctagtcagatgccccttggcatgactgagatatgaagaaaatgaaaagggaaagaagtaaacacagcatgcaatgaccgtaaaagtagtctgccttacgtagttttctcatgtcattatatctagctaactcctagggaatattggtaattatacatttgttctgctgggctggtctgatctacctttgagggtatgtttcttagatgggctcctcacttactaaatgactaacactttccagggatggtgacatcttataactcattaagagaactggtcatctagatatataccttgatgacacaggtgagggtcaagagaaccatttatatcaagggttcctcttttttttttttttcattatcctaagtaaacacaagaaggaattcttcttaatatagttctagtttctggtctgtgggctatggctgttctccagatgaatgatctcacctatcaggtaggtgagtccctggttcctcctaatagcgagtagcttggtccctttctgggataataatgtagtcatacagtcccgtggatgactgataacatcaagagggtgaaaattatatacattcaaatgggcttttatcctaatctaataaaatattgctaaataaatggcgtaggcaatgtccttgagaagtctcaacagtcttgaatgaattagcttgaaagacttcttttggatctgttcagaatagaattgcggaagcgagtacggaactgttggatgagccatcagtaagttatgttaggaacatatttgtgtttagcaggtgtgtgatccgtggtagacaaggagcctctggacactgatggtattttatctcagacttaggcttttcaaagaggtaggaatcagattgtgaatacttagccacatttcccagaagttgaaacggaaagagaagcagactcattgcctgttgaagcttgtctgtgtgggctgagctcactcagttggatactttcggccagttattttaaactaaatttaggttttgatgaagttctgaaaaattatcaaatttctgtctagtttcagctccagcgcatgtttaccagcagtatactttacttttcatagctccccccagaattgaatgtgaaaatgtaggttagttgcccacatttcttgagacggaattttttggagaagaaattttttattccatccatccatccaataaacgtgcaaaattatcagaaatagaaatggatgatatatggcccaaaattcaaaaggtacaaaggagcattcagtgaaatgaagtcttcttgccaccccaatacctgagtcacacagtttcttagtcttttttttttttttttgagacggagtctcactctgttgcccaggctggagtgcagtggcgcgatcttggctcactgcaagctccacctctcgggttcacgccgttctcctgtctcagcctccagagtagttgggactacaggcgcctgccgccacgcccagctaattttttgtatttttagtagagacggcgtttcaccatgtgttagccaggctggtctcgatttcctgacctcgtgatctgcccgcctcagcctcccaaagtgctgggattacaggcgtgagccaccgcgcccggccagcttcttactcttataaacatttattaagggcatctctggattagtccaagtgctagatgccgtttattttctgacagtgctttgacatacttgaaatttccaagcataattttacttaaaagtaaaaaaagaaaatacctggccagatgcagtggttcacgcctgtaatcccagcactttgggaggctgaggcaggaggatcacttgagccccagagttggagaccagcctgggcaacatagtgagaccttatctctgcaaataataataataaaaataaccaggggtgtggtggtgcatgcctgtggtcccagctactcaggaggctgaggtgggaggatcgcttgagcccaggaggtcaaggtttctgtgagctatgatcgcaccactgaactccagcctgggcaacagagccagagcacttctcaaataaaaaaggaccaaagaaaaatacctaacctaacttatactgctcattaggatggcacagtgtgataatctaatgtaagccctgtgggggccggaattttaatctgttattcactgctgtattccttatgtttcgtgcaatgtctgcagatattcattgagtacatgaatataaggattaaaaataagagctgagtttgtttttatacccttaatacatcttttgacttttactattggaatttcctatctatagttaagatgttaaagaaaagtaattttctacctttttctcacaaatctccgagtaaggagatttcacagcttttctgggctagtaattgatttttggcatatctcaaacttttactattaggaagatcagtgtatctaaagtaagtcttgcaatttgaattcaaatcccttagttttttgttttttgtttttatatttttgagatagggtttcgctttgtcacctaaggctggagtgcagtgatgtgatcatggctctctgcagcctccacctcctaggttcaagtcatccttctacttcagcctcctgagtacctgggactacaggtgcatgccaccatgcccagctaattttaaaaaattttatttttagtagagatgggggtcttgctatgttgctaggctggtcttgaactcctgggctcaaatgatcctccctctttggcttcccgaagtgttgggattacgggtgtgagccatcacgcctggccaacatcagttttactttaccataacattgctgttattttttgaatcttttttataattttatttctagtttttcactttacaaattttctgtgataaccattgttgtgcacaagtctttgatgtacttctgattttttgctccggatatattgttgaaagggaaattaccgtgccaaagggaacacatgcttgtacggcacctaatatgtatattgccacattgctttccagaaaggctgcactagaattaacctcctgagcagtgtatgagcaggcttggctcactgcaagccacactggctctctttatcttatctgtctccccatctgcctttgttggcttgggggtgtagggcttttaagtctctactacacctctaaacctagtcccatagatatagtacaagtcaggagaaggttatagcagctgtgtaatccatctttccctgtaccaaacctggaagaggaatgacaagaattcaagtgtaaatctaacctttttttgaggcagagtcttgctctgtcacccaggctggagtgcaatggtgcgatctcggctcactgcaacctccgcctcctgggttcaagcgattctcttgcctcagcttccctagtagctgggattacaggtgcccatagccacgcctggctaatttttgtatttttagtagagatgggtttcaccatgttggccaggctggtcttgaactcctgacctcaagtaatccaccccccgcccccagcctctcagagtggtggtattacaggcatgagccaccgcacccggccaagtctcaccttttacttgctttttataaatcatcattctctcctgatctttgataaagggacaaaaacccaaactggagaaattgctgaagggaagaagaaaggttaatgagaaacagactcttgatcacccaaaccattgattttttttttttttttttttgagatggagtctcgctctgttgtccaggctggagtacaatggcgtgatcttggctcactgcaacctctgcctctccggttcaagtgattcccctgcctcagcctcctcagtagctaggattacaggcacgtgccaccacacctggctaatttttgtatttttagtagagacggggtttcaccgtgttagtcaggctgctctccaactcctgactttgtgatccacctgcctcgacctcccaaagtgctgggattacaggagtgagccattgcaccttgcctctccactgactttttttttttttgagacggagtctcactctgtcacccaggctggagtgcagtggcgcagtctctgctcactgcaacctctgcctcctgggttcaagagattctcctgcctcagcctcccaggtagctgggactacgggcgcccaccaccacacccggctaatttttttgtatttttagtagagacggggtttcaccatgctggccagggtggtcttgaactcctacctcgtgatccactcgcctcggcctcccagagtgctgggattataggcgtgagccactgcacccagcctaccattgatttttaaataactattttttggtaaaccagcgtgagaatttcagagattaataaaagttgtaaattgctcctccctcgttttaatggtgaaaagatagtcaaggagattgtgaaggagaaagttatatgaataaatatggtaatgcagcagtcctatcatgtttaaatttgctgtgtgcattgtactttatgggttaagagattttcaagggtaattgggccatataggatattgtgcttagtatgttgtggggttatgactgtggaattatctgtgttttggacatttggtggtaactgcttttcttttatctccaatagaagccctcctatacagtaagttttggttatgatgtgcttagttaattgaggggaaaaactgataaagcaggaaaatcagaaatatatattcatgcattaatctttttttggtttttcttttttatgtagacggagtcttgctctgtcgcccaggctggaagtgcagtggcatgatctcggctcactgcaacctctgcctcctgagtagctgggactataggcacatgccaccatgcccggccaatttttgtattttttgtagagatggggtttcgccatgttggccaggatggtctcgaattcctgagctcaggcagttcgcctgcttcggtctcctaaagtgctaggcttacaggcatgagccaccatgcctggctcatgcattactcttttaaaaagtatgtattgtggaaaatttcaaacataaatgaaagtagagggaataatataatgaacccctatgtgcctgtcgcctagtttaaacagttgtcatcttgtgaccaatcttgcatttatacctttcccacttccccgcttttttcctggattttgaagcatatcccagaatcctttcatttcatcggtagatattttggcatgtatctctaaatagatgaagattctttaaacaaacaaacaaaaccaaaccccagggctgggtatggtggttcatgcctgccatcccagcactttgggaggtctaggtaggtggatcgcttgaggctagctagttcaaaaccagcctgagcagcacggtagtagtgaggccccatctctaccaaaaaataaaaataagtgagcggtggatggtggtaagtggctgtagttctagctacttgggaggttgagctgggaggattgcttgagcccaggagttccagattacagtgcagtaaactatggttgcgccactgcattccagcctgtgtgacagagaccctgtctctaaaaaggaaagaaagaaaagagagagaaaagaaagaaagaaagattgattagcacataggttaatatcaaaatatcttaacctatgttaacaaacattaatgttttttgttaatattaaatattaatgtttgttaacataggttaatattttgttaacctgttgatgcagggccaaggctttttctttgtgtgccctagttggagttccttaattttgtttccattaaatacacccataattcattatctataatttccagttttgtttgctttttaaagcagaacatgaatttaatggcatttgtgaagcaatattagtacagcatccctcttgatttttatgactccttcccagtcttttatactcatctcattcacgtctaatttactatgtctttttaagcatttgatgaagttttcatagaaacgtatctccttaatttttcatcagtttacattctatttaattaaattacataactgtaataatgagcaactggtataaataggtttgggaaaaaaacagttaattattggtaagaatataacttaataacgggaggctgggcccggcgcggtggctcatgcctgtaattgcagcactttgggaggcccaggcaggcggatcacctgaggtcaggagttccagaccagcctggccaacctggtgaaaccctgtctctactaaaaatacaaaaattagctgggtgtgttggtgcatgcctgtaatcctagctactcgagaggtctgaggcaggagaattgcttgaacctgggaggcagaggttgcagtgagccaagatcctgccactgtactgcagcctgggccacagagcgagactccatctcaaacaaaccaaccacaaaaaaaccaaaaaacttaataatgggagcagcagaagcttataagagtaagagacagctgttattagttggggccagtttgcatgttgggggcattggttgctttactgagacaaggagaagcattgattattttggcaggttggttgagtgaaggtgggctaagagagcttctgcgttaatttaaaatgataaagaagtcaaagctgttagaaatttgaggacaagttattttatagaatcttttattatttatagtgtgtacttcgaggtggtatttttgtccacttatgttagaatttgtgtgaactgagctgaatttggtaatgagtcagtggtattaaaaacttggtgaagaaactggccaaactctttagtttaagaggtttatatctgttcactgctagtgtagtgttctgtggaacaagttgacattttcttgtagtaagttgttttctgtttctggcggaagcaatcttggttcatatgctgcaagaaacagaactgtttttattgtggaagacaggagcagagctgtgtgtttcttattaggatgagttggacacctgcaggatttcttctctctttctgcttcttgcctcctgttgtcttttccttctgttagaatgttctaatattgcataagcagcattccgacaatagttgaatttttttggtacttcatttttttaaactctcaaaataatgtttttagtgattgtatgttcttggcttactttccatttctacatcaacagggatattgttattctagtcaaatggggtagttgtattctggcaatgatctttgggtccaagtcagctgcagaaacaacactttcatatattatacctaaatatcttacatgtgtatggtaattctgggaggtaattaaatgttgggatggtactttaggatctctttaaaggatttcacagttctcaggaataaaataacttgtttgaagcatgttactcattggcctttgaccatgcaaaagggtagccagtgattttagcctactgcctcttccgatctcattttcctcctttcttttgaggcagcagctgcatccagtgccctgctctaattgagctcttagtaaaaggggtattgttataccaagtcacaacctcgtatagcagtgaggttacatcaatggttgttagatttttaggccacgcatccattttggagtcacattaaattttgaaaaccaaaatttagttgcattacctaaatttctcttccttttcttatcctgataccaggataagaataggttttctgtttttccagctctttgtggaacctttttggcccatcagagttgcttgcgacaatctgtagttaaagaactgagactggtgcgggaatcgggatgtttctggttccagtttttactagccagcagtttgactttgggcaaattacttaacctcagggggcttccagtttctctttaatttataattttttcaactgctttattgaggtacatttcacagaccatacagttcacccaattttttttaagtgtattcatggagctgtgcgaccatcactataatacattttagaacattttcattatccttaaaagaagcatggtacccattagcagtcactgcttatttcttcaacctctcttctcagccctaagcaaccacaaattaatttttatcgatttacgtcatctggacacttcatataaatagaattatgcagtgggtgtcctgttgtattttacttctttcacttggtgtaatgccttcaaggttcatgcatgttcttacatatgttggaatctcattatttttttatggctgaataatattatgttgtatggatacgccacatttttaaaatcaattcatgaattggtgggcattgtttctacttattggcgattatgaataatatggtcttgaacatttgtgtacaaatttctgtgtgatcatgttttcatttttttcttgggcatatacctaggagtggaatcgcttggtcatgtggtgactccttgtttaaggttttgagcaacttccaaactgttttccacagtagctgccccattttatattcttacctgcaatgtatgagggtttctgttctgtctacatccaaaacttattttcttttttttgattttagccatcctagtggatgtgaagaagtattgcattgtggttttgatctacatttccctaatgaacaatggtagtgagcatcatttcatgtgccagttgatcatttgtatatttcctttggagaaatgtctattaacatcctttgcccatttttgaattggattatttgtctttttattgctgagttgtaagagttctttatgtttgggatacaagtcccttatcggatacatgatttacaaatattttctgccattctgtgggttgtcttttcagtttcttggtagtgttgtttgcagcacaagtgtctttaattttgattctctagtttcttaatttatatagttgtttaaactctgaaactatatgttttattgagattattttcctctgtgctcattctgtactttctcccatgttcatatagctctctctttcccgggacgttttctagcctcaaagactttatttttttgattaatttatttattttgagacggagtctcgctctgtcgcccacgctggagtgcagtggcgccatctcggctcactgcaagctccgcctcccaggttcatgccattctcctgcctcagcctcctgagtagctgggactacaggtacctgccatcacgcccggctaatcttttgtaatttttagtagagacggggtttcaccgtgttagccaggatggtcttgatctcctgaccttgtgatccgcctgcctcggccttccaaagtgctgtgattacaggtgtgagccactgcgcccggcctctagcctcaaagactttaaaaacatctgtctatgtatttgcctctctaatacatgtgtcttacaaaataatcaaaccttacaaaatgtataacaaagaaagtgaaagttcctcatctctccagagaaaacattaactatttataaccagattttttccccattcacatggtaaaaattttttttaattaaaaaagggaacataccacaatctagtttgccacttgttttttcatttaatagtatatctccaacattattccatgtcagtacactttgtccttgtctcaatcattttaatggctgcagagtattctattttatggatatactatactttacatagtagcctattgatagattttagggttgtttctagatattgttttatttttttgagacagagtttctctgtcacccatgctggagtgcaatggcatgatcttggctcactgcaacttctgcctcccagattcgagtgattctcccacctcagcctcccaagtagctgggattacaggtgcgcgccaccacacccagctaatttttgtatttttagtagagacggggtttcaccatgttggcttggctggtcacgaactcctggccttgagtgatccccctgcctcagcctcccaaagtgctgggattacaggtgtgagtcagcgtgcccagcccagattttattgttttaattacaaattttacgtaagttgtttctgcacatttatatttgcacacttgtgctagtggtttttttttctattccatttatttgctattgcagtatttactattcaaaacacgtagacttattttaaaaaataaaagaattttatttagtgtgacctagagtcaacgtctcaaaagttatgtattcttttccatcatgatatatacaatgttctgatcttcttttaaagccagagtcttcattttcttggtaattgtatagaataatttactagaagtggaatgcttggatcaaagtatgagtgcttaaaatcatgtaagatgttgccacatcaccctccaagtaaggccatgccaattcactcagcttgagagtgtatgacagtgatttttctgttctttttaaccctggcaaatagcctttttagggaattaatctgacaggtgaaaaaatgtcattttattatttgtagttacttattagtacattcgagcatcatttaatttgtctgttggttgtctttctgctttgtctacttttctgttgggcttttggctttttcttattcatcagttgtcatagctttattattattattaatgttttaaaaaaattgagttggagtctcactctgtcacccaggctggagtacagtggtgcaatcttggctctctgaaacctctgcctcccaaattcaaatggttctcatgtctcagcctcccaaaatgctgggattacaggcatgagctgctgtgcctggcctgtaatagctttttaatattagggaaattagttaccttataaaatatattactgatatttttctttgtcttttgactttgtgtgtgtgtctaatataaaatgaaaatgcttttatttttatagtcagatttttctgtttttttttctctttatggcttgctttttaaaattctaattatataaaaatatttacccatttttttcaactacttttatggttttgtttttaaatgtaaatctttgcttcatgtgaaatgcattttgatataaaccaaatgagataggggatgagttgtagaatttattagagttgtaaatttacatttatttttgtgattattaatggcttattcctacttgactgtaagtctcatgagggcaatgtattgtgttgttttgtttttcccttgctcttattttcagtgtctagcacaatgcttgccttgtaatacaccctccatttattgaataaatgagtctaggtttttctccaggtctctagcttctcctgacacaattaattgcataattgctcttttccttcttgatttaaaaagcaacactatcatttacaaaactccaatagatacttaggtacatttctgaattctaatccattgagtgtgctgtcttttcttgctttgatactgtacagctttaattatgatagctttatacaacttaaagtatatttgggaggccagctttaagcactcttaaatatattataccacagtttgggaagctctataatctcctttattaaactttttgctatacctttggaaacattcatttaacttaacaattaaacacttaatccattctgaaagtcagcctgcaaagcagaaatgatttttggggtgttatttggtgtaaagagtttttttttttttaggatatcatacttaattctggcatgacctctttagtgtcttttaaaaaactctcattttataactttgggcatttctagaaaagcaacatttttctcacagttttctaatgcaaaatacacagaggggtaggtggcagaaaaggtatcgagatgattgtgttggcaccccactgatgtcgaagcagatagtggaaaagacattacttaaaagtgttttgcagatttcgggttaaattaaaaatatgacaattttaatttaatttaattaaaaatatgacaattctcaggccgggtgtggtggctcacgcctataatcccagcactttgggaggccaaggcgggcggattgcctgaggtcaggagtttgagaccagtctggccaacatggtgaaaccccatctctactaaaaatacaaaaaaattagctgggcctgtaatcccagctacttgggaggctgaggcaggagacttgcttaaccagggaggtggaggttgcagtgagccaagatcatgccactgcactacagctgggtgacaaagcaagactccgtctcaaaaaaaaaaaaaaaaaaaaggtgttatgcagatttcagtttagccaccttgatcctcccaccttgtgcatgacacgttaccttcctgtggcatgcagtatttgactgattcattggatgtgacttgcattaagttcagataacattgctgaataatcactttcttattctttagtgtagcctcctttctctgtagaacatcagaaattcttaaactctgaaatacagcattctcttgggattttctgtaatgtctttctcatgtaggaaccaacttcagggtcttgtgagcatcagagaagtttaaggtctagggaactgagctaatggaacaaggcatgcctaatgtgataaaatccttgctttctttgcaattgaaattgtttattctaaataactgctaatttacaaatgtattttcacatgattacccattctgttctcaaagagcataataggggttttgtgactttcagactttcctgaaaaagcctaaccgtggattttagaattattaagctagaaaaatacacacatacacacacaggtttgtttgggacccttagtctccaccctggaattaagtgacactgaaaataactctggaataaaaggtttttatgtagcagaatagttgacttacaggggttcttccctttgcacattttctctgggtagaaaatgagcttgtttttcttttagttgtattacaattttttttttcctcaatgctagtcttaactgagagatttttaggcagttaactctcccagcacagcaataagcagcttattagtagatattatctcttgttgatttgttacccttgagatttactgtgcttgcaaaacacctgtctgtatttgagctttgctaggtagttggcttttgtgtttgactgaagattttttccaaagaaagcaaatagctattaggaaaagaaagagtcagcaaatttctgtatgctttcatggaagagatttcccaattagaaagcttttgtaggcttaaccttttgccctaaagtaacccaacatttcattatgtattccattgaggttttggagctcggcaccagaaagcgaggaccaaggttgaatgtgaaaggaatattcagaggatgaagctcatagtcaacaaagtgctgcttcataggctaggtccaaaaataacctgcttgccatagggagcaagaatggaggtagcattagctgctgttttgagcagtgtttcatgtcctgtcatgtcattccagaatggttttttggttttgtttagagacagggtcttgctctgttgaccaggccagagtgcagtgtggtgtgattgtagctcacagtcacctcaaactcctgggctcaagtgatcctcccatctcagtttcctgaatagctaggactacagacacacaccattgcacttggctagtggttttatttttagtatagacagtgtctcggtttgttgcctaggctggtctcaaactcctggcctgaagcagttatcctaccttggccttccaaagcactggaattataggcatgagcagccacacctggtctcattccagaataattaaaattatgtttaaggcagccgggtgcagtggctcatgcctgtaatctcagtactttgggaggccgaggcgggtggatcatgaggtcaggagttcaagaccagcctggccaatatggtgaaaccccgtctctactaaaaatacaaaataaaaatacaaaaattagccgggtatggtaattagcgggtgcctgtaatcccagctacttgggagtctgaggcagagaattgcttgaacccgggaggtggaggttgcagtgagccaagatcgcgccactgcactgcagcctgggtgacagagtgagactccatctcgaaaaaaaaaaaattgtgtttaaggcaatatcatttaaaattttattttgggagaatgttgccttggtaaattggtaaataacagttgttctgaaaggtttcggaagaatgcctttctgctaaattgaagaaattaacataatttactcttctgtaaatagggggatggtctgcattgtgctcatttaatcattggagttcaaattaatgatttgctggggtcctgtggtgaatcttgagtgattaagagggagaactcagtccttggttcagaaaagttagcattggaatggatcctcaacaggccctgaaggtaggaagtgttctgatttagagagctcttccaaggcttgtgatggaaccctgcaacggtaagttttacgagtatcagtaactggccgggtgcagtggctcacacctgtaatcccagcactttgggaggctgtggtgggtggatcacctaagatcaggagttggagaccagcctggccaacatggtgaaaccccgtctctactaaatatgcaaaaattagccagccatggtggcaggcgcctgtaatcccagctactagagaggctgaggcaggagaattgcttgaacccaggaggtggaggttgcagtgagccgagatcgtgcattgcactccagcctgggcaacaagagcaaaaaactgtctcaaaaaaaaaaaaaaaaaaaaaaaaaagccaggcttggtggctcacgcctataatcccagcactttgggagccaatgtgggcagatcataaggtcaggagatcgagaccatcttggctaacactgtgaaaccccatctctactaaaaataaaaaaaaaattagccaggtgtggtggcgggcacctgtagtcccagctccttgggaggctgaagcaggagaatggcgtgaacctgggaggcggagcttgcagtgagccgagatcgtgccactgcactccagcctgggcagcagagctgagattcctcaaaaaaaaaaaaaaagaaaaaaaaataatcaataacatagaatgtggatatacatagcacatagatacgtatagcaagtcaggaagtttgcctagaaggaataaattaactcttgttacttggtgagatcatggaagggaatgtaatttgttttaggtggtggtaattgtgagtttgaggctggcccaggaaatgagttgtcagatatgctgtcatcctcattaatggttcagcttatttctcaggtttatagttgtatgaggagatgctatgcctaccccatttagggaactattaggttcaaaatcataaaagctaaagaagagtgaaatacagtgaaaagtatcctgttcacacataccccatgatcatccagatttcccttcccaggggcagttgatattatctgtgtcttatatgtcttgagatagtttatgtgtatagaagtaaatgtaaatatctactacttatttcctcttttaacacaaattatagtaaataatatacaatagtctgcatcttacttttttcactctcgtatctaatgttaaaaaagctacgtggtattccaatgaaaggatgtattatatatattttttagatatttcatttgagttgttttttttttttgttttgagacggagtctctctctgtcacccaggctggagtgcaatggcgcgatcttgactcactgcaacctccacctccctggttcaagcaatttccctgcctcagtcccctcagtagctgggattacaggctcatgccaccacacctggctaatttttttttgtatttttagtagagacagggtttcaccatgttggctagactggtcccaaactcctgacctcagggaatcctcctgcctgggcctcccaaagtgctgggattacaggcgtgagccaccacgcctggccttgagttgtttctaagctgttgctaataaaacaatgctagaggatttaaaaaaatatgttagggttttatattgacaagtaaatattgtcataatagaaacttgctatacttataataataatacatctatagaacatgttcataaatgtctatttgagccttcctgtaaggtaagtacaacattttatcacttcataactagtaaagtggcagaagtagaggtagaaccaaggtcttctgactcctatttgagtatctgtctactttacccaaaatacatatactgttgtggggctgtagggaagtgggggtgggaaaataagaggaagtagacctaggtggggcaagcttgagatagggatgtatctgtcattctagaaattgggatcctgtttgctaggagtaagtggaactggacatcagcctgttacagggacataaaggcacttaggcactggcagagcactatggtttgattgccatcttggagtacagtagtatggtaagccaaagagtggtagttctggagaagctggggactgtcagagctccctagaatagactgagagtgaaacagcattcacgatttgctaaggaggctgggctactaggaaggataaggtaggagcccaggagttcagggctgcagtgaattatgattgtgccactgcattctagccttggcaacagagcaagaccctgtctcttaaaaatattggtcaagaccataaaacaagaacataggccatagtgaaaacataaaattttcttagcagctgtggtagcaaacatgttaatggtaaggagataactgtaatgttagtcaattttggcttaagactgaggactgagaaacagccttcttcctccggaggagcagttaagtcatcttacaactgggagtagagagacaaggacgtgtgaagctgattcatgctttcattatatagttaatactatttggaaacctgtgtgtaggtctggtcaatagacttccatcttaattgctgtatgctaagtgcctcctatgttctgtatacttcatataattcttgctagccttcaacagctttttacaaagtaactattgttttacctaatttctattgagaaaaatgagcttcacttaggtaacttgtccaaagttctttaccttgtaagtggtagagctgagatttataagtaggtctatatgactccagggctcttgttctttccacgataccaggtattaggcatcaaaattggacagtagaattctaatcacagctgtacataaccagaaagtatgagtatggatgagtgttagcatgtaaccagacaacttgtctgttatggatgatttgggctgaaagagtagaaggaatgctaaggaaaatgagcattggagatgttgagagctcgcaaactcatgatgaatgtgtatataatttaagtaatgcacttgctgtgcatatgtagagccttaagataaaatttccaatgctcccttccctcattaggtttttctttctaaagtccttctatattgagattatatagctgccactaaagactgtagctggtagtagccaggacctggaactttttggcaagagggtgttatctggaggatccaagtatactgagatcaacataatcatgaattcttctcccactgtaaagtttgaggaggtaagaatctccttgacttagcaaatttgggcttataaatgctaggtccaactagactttactggcctcaatcccttagcattatcctgcaaaatactgatgtatactttttggataatacctttgatctactttcagccaccattgtagggaattgttagtatgagaggttgacattttggttaaataatcacttggaaactgtgactcagcattagtcactggctttctgctgggttacattctcttgtctcttgccttaattgtggtaagcctcagccatttgattacacaactaccaaagaggatgaccttagtgataacccattcacattttcagatagtaaaaatattagggacaaaatctttcatatgtattagcgagtggtatgggttcgcctctggagaaatgttagcacattttccaggtttgcccgatgatattaaaagatgaatagctatcttagtgaaaatagctgtttacacttttagttagtagtttttaaaagtggaaatgtaacaatatgctttttggacacagtcatgttattttatttttatttttatttttattttttttgagacggagttttgctcttgtgcaggctggagtgccgtggcatgatctgggctcactgcaatttctgcctccctggttcaagcgattctcctacctcagcctcgctggtagctgggattacaggcacatgccaccaggcctggctaatttttgtattttttgtggagatggggttttgccatgttggccaggctggtctcgaactcctgacctctggtgatctgcccaccttggcctcccaaagtgctgggattacaggtgtgagccaccacgcctggctgtggatatagtcattttagtatttgagattaaatattaaacctcatttggcgaactttaaaaccatcagtgatttgagttaattctacctgttttaccttatttttcaccagtgtgtgtttcctcactgcctcattatattgccacatttaatctttcattaaaacaaacaaacaaacacaactcttggctgggtgtggtggctcacacctgtaatcccggtactttggaaggctgaggtgggaggattccttgagttctagaccagcctggtcaacatagggagattctctctctcctgaaaaaaaaaaaaaaaaaaaaaaattaaccaagcatggtggcacacatctgtagtcccagctactcaataggcaaagtgagaggattgcttgagcctgggaggttgaggctgcagtgaacatgatcaaaccactgcattccagcctggaggacagagcgagaccctgtcttacaaaacaaaacaacaactcttggaatttctcttttcccctcccttcttcttccccttcttccttctatttatccttctgtttcatctacaaatatttgagtgtcactgtgttctaggcactgtgccagacattgggattcgttggtaagcaagagagagaggcatggcctctgtccttatgagcttgcagtttatcctagtgttacttatctagtctgccctgccttcaaggttcagtggaagcccgatcttcatgtagtcctttgacttctttggcccttgcaaacctatccctttgacctatgctactttaaatctgattcatacaatttagcatttattgatataatttcttatactgtgggctaattgtttaaatatcttgttttactggctagagtatagttccttaaggacagagactgtcatgttattttttttttttttgcaatactgagcccaaaggttttgatttcagtctgccctgctgaatgttgaagttactagtagctcttgggacttagaagtagtgatgagataatgccttgctttttagtttattttctattttgttttattttatgtttcttttttgaaatggtattgggctggccgcagtggctcacgcttgtaatctcagcactttgggaggccgacgtgggtggatcacctggccaacatggtgaaaccccgtctctactaaaaagacaaaaagttagccaggtgtggtggcgggggcctgtaatcccagctactagggaggctgagacaggagaattgctcgaacccgggaggcggaggttgtggtgagctgagatcgcaccattgtactccagtgtgggcaacacgagtgaaacttcgtcacaaaaaaaaaaaaaaaaagaaaaagggccgggcgcagtggctcacacctgtaaccccagcactttggaaggcagaggcgggtggatcacctgaggtcaggagttcgagaccagcctggccaacatggcgaaaccctgtctctactaaaaatacaaaaattagctcgtgtgatggcgggcgcctgtcatcccaactactgaggaggctgaggcaggagaatctcttgaacccaggagatggaggttgcagtgagccgagatcgtgccattgcactccagcctgggcgacaagagtgaaactctgtctcaaaaaagaaaaaaaaaaaaaggtattgttcagtcatccaggctggagtaaagtggcacaatcatggctcactgcagccttgaattactgggctcaagtgatcttcttatcttagcttcctgagtagctgggattacaggcagtagcgaccatgcctggtagattatccctttaaaaaaattccttctagttgtttgcctaatatttgttatctgcttctgttaatctgtgctaaaaatgagtggaaatgaccttactgattcactatttgcatttatattgttttctagtgaaggggttgtatttgaggttaccattgcatagcttctcatctagttctccttgtgacattataatgagggatgcatttcatgactaaggaatagagctaagctaatgttgatctcttagtagcatgttgtaatcttttgggcttaaatgccctatcactatgccttagttcatgaagtgttaaaagtaactcacctaaaatgggaagcggagaatgtaataacttaaagatcaaaatcgaatttctcataaagatttttagaaatagaaaataatcttttaatgggccaacattatttacattttatgatgttagagatcaaaactcttcctgagtagtaaatgaatgtggcgacttaaatgtgaaggagggaggctgtgtgattgacttaaatgtttttctgaatgtgctaaaagctctgaggtaatggcaaacttcaatattggaaatagaagggatatattctttattaagaaggagaatagagggtactgggggaaggaaatgctcttttgcctacacttaaaaattaagaaggtaagtatatgaaattgaaggggtaaaagaccacagagcaggagacaaggaaaccgttatttccctctgaaataattctagatggtgatttgaacaaaccagttgctaaaaaacttatatgataattggggcagtttgaacattgactgggtatctgatgttaaggaattattctcttcagatggggcagtagtatggtggtcatattgcagacaaaaagtacttaccttttagaaatatatactgaaatacatatggatgacggaatgtgtctgagatttgctgggggaaaggaagaagtggtcagcagtatagataaaatggccatgtatttatttataactgtctaagctggctgatgggtacaagaggcacattgtattatttctttctacttatatatatgtttgaaaatttccataaaataacaacaacaaacccccccccccccaaaaaaaaatcttaacaactaccagaactggcagaattgtcaagcctacccctttatcttctttctctctaattttagatgggcaagtaaagccatagattcatgctgatgtttccaaatgggaatgcagtttagatttccatccccttaagtttcaatctatctgtagtgcagcatcactgagagaacaagccctgctattttcccagcagtgtggtaagttacaacagggtaggagtcatactacccatctttaaggctcttcctccttataggtgaagaaataagatttaaaaagcaaaacataattagagaataggaaaatgtggtttaaaattatatgtcatattttatagttctggccaaacataagaaattctagagaaaggaaagaacattttgggttaggaataaccaaaggcttttcttttgaaacagggtctcactctgtcacccagtttggagtgcagtggtgcatttatggctcactgtggcctcaaccgcttgggctcgctgcagcctcagcctcctgggctcagctgcctgagtagctgggactacaggcatgcgccacctgtccagctaatttttgtattactttagagatagggtctcgctatattgcccaggctggtttcaaactcctgggctcaagtgaccctcctactttggcctcgcaaagtgctaggtttacaggcatgagccatcatgccagaccacaaagacattttttattaggccagtggatgttcggatcatctttaaacaacattgaaagttgaattgctgacagtaatatggggatagcattccagggagagaaaatactatgtttggtggagaatagatgaatttggattggggaacagaagatatttttgatgggtaggatggggtcatttcataaaggacatgaatttttagttgagacatttgggcttgatcttatagaccttaaggagccatttttggggtgtggggaaccatttttgacccttaagctacctaagtatttattaatttggtttgatgataatattgtgtattcttagttgcaggcttttgcatagagagtataacttgactttgtagcctttacattctttttaacataaatttgttatttccacagtgttccaaaagttattcagggaccagaattaatatttattttttacaaattatttatttatttatttttgagacagggtcttgttctgttgcccaggctggagtgcagtggcgcgatctcggctcactgcagcctccgcctcccgggttgaagcgattctgcctcaacctccccagtagcttggactacaggtgcctgtcaccatgcccagctaatttttgtatttttagtagagatggggtttcaccatgttggcctggctggtttcgaactcctgacctcaagtgatcctcccgccttggcctctcaaagtgctgggattacaggcatgagccaccgtgcctggccacattttgatatttttaatcaactttattgaggcataatttacattcaataagattgaaccattttaagtttacaatttgaattttgacaaatatacacacccatttaataaccatacaatcaagatacagaacaattcagtctcgcagaaagttacagtagcactgtttgcattcattctcatcctcctccacttccagaaaaccactgatttgctgtcaccataggttagttttgctttttctggaatttcatataaatggcctcatctaggatgtactcttctttcatcagcattctttaagattcatttattgttgtttgtatcagagtttgttgttttttattgctgagtggtaatctgagtagtgttacattgtatggatgtaacaagatttgtttattcattcacctattgatgaacatttggattgtgtctggttttcttgcttttatgaataaggctgttatgaacttcatgtacagctttgcgtagatgtatgttttcatttctcttaggtaaataccttacagtggaatggctgggtcatatggttggtaggtttatgtttaacttttaaagaaactgccaaattgtcttccaaagttgccgtaccattttatattctctttagcaatatatgagataggagagttctagttgctttaaatccttaccattgctaaaatgatatatcttaaattttagttgttccaatagttgtgtcatggtatcttgtggttttaatttacatttccctaatgactaatgatattgagtatctttttatgtacttattttcatgctgtgtatcttctttggtgaagcatttgttcagatcttttgctcattaaaagaaatgggctgaccgggcacagtggctcatgcatgcctgtaatcccagcactttgggaggccaaagtgggaggaccacttgaagccaggagttcgagaccaccctgggcaacaagcgacactctgtctctacaaaaaacttaagaattagctgggtgcttggcatgtgcctttagtcccagctattcaggagtttaaggtggggggatcacttgagcctagctgtttaaggctgcagtgagctgtgatggtgccattgcactccaacttgagtgacagagcaagaccctgtctttccaaaaaaaaaaaaaaaaggattgtttctttatagttgaatattgagaattctttatatatcctggatacaagtcctgtgttatataaatgctttacgctttgcaaagattttttttttttccgattccatggcttattttttcattctttcagcagtgtcttttgaagagcaagagtttttagaggccaggtgcggtggctcacgcctgtaatcccagtactttgggaggccgagttgggtggatcacttaaggtcaggagtttgagaccagcctgaccaacatggtgaaacctcatctctatgaaaatacaaaaattagccagacatggtggcgtgtgcctgtaatcccagctactcaggaggctgaggcaggagaatcacttgaatccggaggcggaggttgcagtgagctgaggtcacaccactgcactccagcctgggtgacagagcaaaactccatctcaaaaaaaaaaaaaagaagaaaagaaaagaaaaataaagtattctagtgaagaccggattccttggcataagacaccaggaattttagattgataggagtaaaaataaataaagaaatattggctcagggaataaacttcattaaaatcaatttatgggccaggtttggcggctcacacctgtaattgtgcagcactttgggagactgaggtgggcagatcacttggggccaggagttcgagaccagcctggccaacagagtgaagccctgtctctactgaaaatacaaaaattagccaggtgtggtggtgcatgcctgtaataccagctactagggtggctgaggcagatgaattgcttgaatcctggaggtagtggttgcagtgagctgagatcgtgccactacactccaacagtgtgagactctgtgtcaaaaaaaaaaaaaaatcaatttatgaaagttatttttaaatttgaagatattgaagatactaaatttgtgtttaaaaagcatttattttgatcaactccgctgtatagaatattttgtcttaagtcactgtaaagtttccatgccctcaaatgaaatacagtgccaggtttaacattcgttttcatggattgttttcaaaagttattgagttgtctgatttgctgtaaaaaaaatgaaaaattcatttcttttattaacatgatgtatttactgtgattattctaatagactaatggacttttaattttactgtttaaaatagtttataattaaaatttaatatccagtcttcacttgttctttcattttttaaaataataaagtagtttggggtttatcagaacaagggaagaaaccaagctacgtctcattttatgttgggtaagaatcactagagacgaaattattattattattattgttattattattattattattatttttgagatggagtctccctgtgtcacccaggctggagtgcagtggtgcaatctcagctcgctgcaacctctgcctgctgggttcaagcagttcttctgcctcagcctcccgagtagctgggactacaggcgtgtgccaccttgcccagctaattttttgtatttttagtggagatggggtttcaccatgctgaccgggctggttttgaactcctgacctcgtgatctgcccacctcggcttcccaaagtgctgggattacaggcgtgagccaccgcctggccgacaaagttactttctatgggatcaattcctgagttttatctaacacgagaattttagcaattaaaagtcaagtgcagttcagatatattagtttaggtaatatttttagtgtttgaagagagctcaatttgtaagccatttagctactaattaccctgcctttgctgtagaaagaacttaaatgaaagacctgttttaagatgcctttttaaaaagcagccgttgtaggtataagagttgaaaaatcaagatctaggcagcagtggagaattatgaagtctgataagataatatgctaaaattgtattgttaattctgatttgtgacagtgcttatcagtagaaaagaaatgtgatctgtggttaaagactgaactgccactaaatgtaaaatgttttttagatgagttggaagaatgctgaaccagtctttattgcccaagatggctttgagtcagcaatctcaaagaataaagaaaaaggagttaagagtgagaggcaataagtaatatgctgttttcatttaagatgtcttgaagagataattaaaaagttgtaggggtataggaattgtgatgtttctctggtgttaatgaagtctactataaattagataatacaggcactctaaattattgtttttccttttttaaattcttggcagttactgacaaattatactcaggatcaagtttaagtctcagtacatgaatgaccctgacattgaaaaccctgaaggatgttgaccttagttttgacctggctttatcctgagcagcctctgtgaattcttaatgctgtgctctttaacaggggtactttttccagatgtttttgatactgtattcattaacatataataaagttatcagtgtccctgaaggctaattttttttttctgactgaatatgagatatggagcgtgcaatttgtacttattggtattaacattaccaacaaggtttgtctttttcttataagatggggaatcttaagaaacttcaggccaggcgtggtggctcatgcctgtaatcctagctttgggaagctgaagtggggcgaatcacttgagatcaggagttcgagaacagcctggccaaggtgaaaccccgtctctactaaaaatacaaaaaattagccaggcgtagtggtggatgcctgtaattccagctacttgggaggctgaggcccgggagacagaggttgcagtgagccgagatcatgccattacactccagcctgggcaacagggtgagattccatctaaaaaaaaaaaaaaaaaagaaacttcattaagaagttaaagcctgggtatgctctccttgataatttctttttactcacatctttattggtaaatcaggccagaaggattatttaccttttcagaaagggaaactaggttctacggtttggttacagatagcctggcagctgactttacattgggcagaggagactgccgtacttagtggttctgagaaaccaagagagtattgcctgctacagctatgagaaaaggtattgaatcttccccctcctttgtgggggaattccaatctcactaatttatggtttcagtgtagttatggtcatagcttctgagacgtgggtactcattgaagctaacagttttagagaaaggggagggtgtttaattccaataactggtagtttatatcactttaataatttagacccaatgatatgaagattagttagtataaggcagatatacatgtaatacattcttttaaatattgtacaaggagtaagaaacccctttaagtagtcatgtaattcattatagcagctgaacatttctaagtgcaacattataggaaaccagtaaagctgatttctgatttatctgcagcaaaagaatttaatattccaacttcagcaaaaggcaattaaaaacaaacttaaatcacattgtgtgcttttaatacgtatgtttttttccatgctgtctgatgtattttagttcttagtcatttacttccattagtttccaaattggttgagggaattaaattggtagccaagttacctatacaagattttcctactgtgtatgtgaaccactctttctgggaaaatcctcccgttggcacttttcttgaaggcatgcactttttccacacttagtgatttggggactgaagcctgcatttagcctgtatttagtcagaggtgacaaatggctaaattttttttttccagtttagagattgagaaatgattcagaattgaaactaaagtgaatttggacttactgtatttctttgcaattacttttaaacaattgctgtctgttactattaggcatattttggacctatgggttccattttgggccgatatttggtgttatgttgttaaatttcttgcctggcttagatggttcattgttgaaactaaactggaactaggtttgatcagagggccaatggaaatgcacgttgtggcccatttggggaggacaaaatttgacatatttttactttaagaattcttaggaaaatttggataacgtgagaatatatttccaaagggttaagtaattttcgagggaaaatcagaaagcttgtaattcctactgaaaatattagcctgctgaaatattagcctatttcctactgaaaatataacattagcaggccgggcacagtggagttcacgcctggctaatttttgtatttttagtagagatggggtttcaccatgttggccaggctggtcttgaactcctgacctcaaatgatctgcctacctacgcctcccaaagtgctgggattacaggcgtgaaccactgtgcctggcttgacttttttatttaaaaaaaaaaaatctatacccaattgccctatcagtttatcatttactcacttatttgaaacggtcatattaacatacactctttatttatttatgtgcctatactttgttttaattactgtatctttagaatatgtttcaaaatttcattaactattataattgattctctttttttgtaacgtatcatcagcaaataataatttggactcttctaatatttctgcttatttattgacattttcaaagaatagcttatgattgataataatcataccagcgaatacagtgcttttcaacttaaatatgcacagcaattacctgaggatcttattaaaatgaagactcagtagggctggagtggcctgagagtctgcattttgacaagctcccaggtaatgttgacttatgggttcatagaccttatgttgagttacagggaactaagatttattgagtacttaatttgttctggtcagtgcttttacatctgtgaactcgtttaatctttaaaactccatgatgattattatccccaatttgccagtgaagaaactgacacttagagaagtttataacttacccaaagtgacgcaaccattaagtggaagagccagactgagcccaagcagagtttgcactctgaacctctcgaatatattgctttaccacatgcgtgttcgctcacacacacacacaacagacattatcttctcttgtgtgactcaaatggtaataccttaaaattttttttttaatgaataggctttattttatctattttttgagatggggtcttgctctgttgcccaggagtgcagtggtatgatcgcagcttaccacagccctgaacttctgggctcaagccatcttcctgcctcagcctcctgagtagctgggactaccggtgtgtgccaccatgcccaactaatttttaatttttgatagagacgaggtcttactgtgttagccctgcctggtctcaaactcctggcctcaagcgatcccttcacctcagcctccaaaagttctgatattacaggtgtgagccacagcatctggccaggctttatgttgagaagtttagagtttacagaaaagttgagcagaaagtacggagaaatcccacatatcccattatctctgcctgtcctcacgattttccctgatattaacatcttgcattagtgtggtacatttgctacaattgatgagcaatattggtacattaactaaaattcatagtttacattagaatccatagtttgtgttgcacatttgtaagagttttcacaaatttgtaatgttgcatatccattattacagtatcatacagaataatttcactaccctaagaattccctgtgctgtacctattcatcccttcctctcctcagtccctggcaatcactgatttttttttttttttttgagatggagttttgctcttgtcatccaggctggagtgcaatggcatgctctcggctcactgcaaactctgcctctcgggttcaagcgattctcctccctcagcctcccgagtagctgggattacaggcatgcgccaccacgcctggctaatttttatatttttagtagagatggggtttcaccatgttggccaggttggtctcgaactcctgatctcaggtgatccgcctgcctcggcctctcaaagtgctgggattacaggcatgagccacctcgcctggccaatcactgatctttttactgtctccatagttttgatgttaccagaatggcattattgcatgtagccttttcagattgactttttttcacttagtaaagtgcatttaggtttcctccaagttttttcatggtttgatagctcattgtttttagcactaatattccattgtctggatttccactgtttatttacccattcacctattaaggaacttgttggttgctttcaacttttttcaactatgaataaagctgctataaacatctgtctgcaggttttgtgtggatatatgttttcagctcatttggctaaataccaaagacagaactgcgtgatcatatagtaagagaatgtttagttttctagaaactgccaaactgtcttacaaagtggctgtactattttgctttcccaccagcagtaaatgagagttcctgttgttctatatccttaccagcatttgatgttgtcactgctttgaattttagccattctaataggtatgtggtgtctcgttgttgttttaatttgcagtagcctagtaacatatgatgtttagcatcttttcatacactatttgccatctgtatatatcggtgaggtatctgatcatatcttttgcccattttaaaattgggatgtttgttttcttattgttgagttttaagagttctttgtatattttggataccagtgcttcaccagataggtattttgcaaagattttcttctagcctgtggcttgtttatgcctttagttttttaccattaaatatgttgcttgctgtctggttgtgacaaataatcatcaagttaagaaagcttctttctttgtctctctaagagcttttgtcaggaatggctattcagggaagtccttgaaaattatttggctaaacaaatagattaagctttgtttttagcaagacatcctgttttattccatataattaaaaacacattctttatagtgtgatattaagactgtaactgagactttaattcctattccttctaaatcattttctcttactctgtgattttgtatgcctttaatgtccatgttgattacttgtccagcatcttaatctcatctgacttggtctttcttctcccagctatctgttcttccacttctctgtagcaatttatttctgtggccaaacgtccacttctggaattacaaatctgtaaatttttctctttgaacacaatttcctgtcttttcagttcttccatttgctgagtttattttctcatttcactgaggccgccagccccttaaatctccattgtctcccaatttgtgacattcttcctggcatcactttatcccatatggatgccataattggtcactttcaatgagtcatcagtatccgcagttctcctgcatctttgttcttctttcccacatgccatgcagatctccagctgtggattaacagtactgccctttttctgtgttcccgctctagggcctgaagaaatgatttcatcatattaatttgttcttttgctaatccatgggttttagcctcatctgtgcttattattctctttagtagttttctcacttgtttggagttgatttcatttctccttcaccagaatgacagttctttctaaatctttccacattttcctttggttcgtgtcaccttcctccattgcagctgattctacacttcagcagagtgacctttaaaaagagagaaaacaacaaatctattatgttatttcctgtacaatactgttcattataaagatggaggtaatttttttttttttttttgagatggagtctcgctctgttgcccgggctggagtgcagtggtgtgatctcggctcactgcagcttccgcctcctgggttcaagcgattctcctgcctcagcctcctgagtagctgggattacaggtgcatgccaccatgcctcgctactttctgtatttttagcagagatggggtttcaccatgttggtcaggctggtcttgaactcctgacctcatgatctgcctgcctcagcctgccaaagtgctgggattacaggtgtgagccactgcacctggccagaggtaaaattcttaagtttaacaggatctttctggttttctagcctcatctctgtcctcttagcgccttagcttcactggccctttttcagatccttcacatgccaagctcattcttagcacagggctttgtatatgctcttttctctgctggacaccttttttcttggcatgtttaatttgtatttatcttaaggacttagcttatgtgttcctttctcaagaaagttttccctgaccttccatttgcctaaaggtagattagattccctctgaaattattaatagtaatgatggtaacaacaataatagcagcaacctttgagtgtttatgagttgcagagactgttcttagcacttacacataggaagttttttggttttcatagcaaccctatgagttgtataggtgggtaaataagtaggacctagaattatctgcatcttatagatgaggaaactgaagtgaggaatgttaagtcacttgtccaaagtcacacagccatttggtagcagagttggaatttgaacccgggcagaccccagtgcccacgttctaaactgctgtgctctactgtaatggtgagtataactgtgtaatgttttttgttaatgcctacctttgttggtaggctctaagctcctcgaggtcagaaatcatacctgtctggttaatttccatggcctaggacggagcctggcatggagtagtctgtgaccgagtacttgttcctattgaatgaatcacagcttgccagtctactaaattgaggaaatagagggtttcagtgtgatccttttcacttttcctccccactgcttccaaatattaaactcccttggttaaaagaataggtgcctgtacttatttcaaaatctaacccctctacctgtttgccttgtatattctaggagtaatttatgtacttcgtaagaaaaattagtgcagatgtacataaagtaaaggtatacgtcttccattttttcctcctttaacgttttatacttccaggtgtcaactgctagtagttaaatcttcttctgtacatgtacacattttgtggacacttaaaatacacaagggtaatgtatgtagtattatctaagttttttaaaaatttaattttgatattgaacgatagtttcacaagatgtctccattgagggaaacaaggtaaagggtacaggagatctctgttgtttcttacaactgcctgtgactctacaattatctctaaagaaatggttaattaaaaaataaactatagaaatattttcatgtcagcgtattgacctgtttcttttaaatggctatgtaaaatgttattatatagatgtgtattactttatttcacgtttcccctattgatggacttttaagttccttccatttttcattttcaccaatattgccaaaggtggaccatccttgaatttgtaggtatatccttggttggtatatatgcacagccaagttttagaagaggagatcaaaagatgggcatatttgaaatgttggtaagagttggccagaccatcctccagacaagtttatactttcgttagcaggtgagatagaagctctgtgtgttcacctgcactgtcctgatcccattctgccacttcttcttggggactttatatctatatctatatctatatctatatctatatctatatctatatctatatctatatctatctatatatttttattatactttaagttctagggcacatgtgcacaatgtgcaggtttgttacatatgtatacatgtgccatgttggtgtgctgcactcattaactcatcatttacataaggtatatctcctaatgctatccctccccactccctccacctcacaacaggccccagtgtgtgatgttccccttcctgtgtccgagtgttctcattgttcagttcccacctatgagtgagaacatgcggtgtttgattttttgtccctgcgatagtttgctgagaatgatggtttccagtttcatccatgtccctacaaaggacatgaactcatccttttttatggctaaatagtattccatggtgtatatgtgccacattttcttaatccagggactttgttttattaactaatccttttccatttaatatatctacttccctgttggttctcttctgtctcctcatcctgtagcacatcctccaaactgatagagctttggttgctgtcagttcttttgtgctgctataggagaatacctgacactgggtaatttataaataacagaattttattttctcatagttctggaggctgggagggcactggcaggttcattgatggggatttggtctctgcttcttagacgatgccttgaatgctgtgtcctcacatggcagaaggcagaagggcaaaaagggagtaactccctccatcaagcccatttttaagggcacctaattgcattcatgaacggaggaaccctcatgacttaatgatgtcttaaaggcccgacttcttaataccatcacgttggcaacatctgacttttagaggcggagacattcaaactgtggccctagccaagtcctttgtgtgcttttacttatctttacaaccatcctatgagatagtgcctgtttctctgcctacttgttaagcgattatattcttctggattttgtccttggctcctctatccaacccacctgtagccccaccttctcttctgttccctcatccaaaccagagagaccaggatttgaatctggctccattattttctccctaagagacacggaatgatttactttgtctctatgtttctgtttctttctctgtaagtaagagtggggagactagagctacctatctcaggattgtgtggagtaaatgaataatgtgtgtaaaacatttaaaatagtgtctcatgtacactaagtgcttaataaatgctaataataggaatagtaacaacagtatagttacattgttattataaatctgtatctgtggtactcttagcttaagttcgtacaaaaatattgagctgcctgttagaaatctacatttggatgcctccccagatatcttaaactcagtttatctaaagtcagagtctttctgtggcttcagtgcttagtgactgtgtccgtgaataaactacttattttctttaagcctccatttctccatttatgaaagggtgataatgaacttattttatcaatattaaatgagataattcttgtaaaagtatttagcatagtgctggtatatactaatatcttaataaatattagttgctattattattattccttttaaatgctgatcccctttttgtcctgttctgcccagaaaaagagcctcaggatagctttgcctgtctgcctgtcttccttatccttcatatgcaaccagtcagcaagtactgttattttgtattttcattttaaacatcttaatttttatttattttaaaattatttatagagatggggtctcactatgttgtctaagctggtcttgaattcttgggctccagtgatcctcccacctctgccaaagtgctgggattacaggtgtgaaccaccacacctggcctatcaagtactgttgattgtgcttccgaaacatgtgcttgcatccaaccactccttatcatttcttgacacaattattgtggtaatctcctaattgctctcctggcctcttggccatcttgtacctttcatcctgagttatctttatagtaggtagatctgctcatatcactcagcagaaaggcctctgatgggtctctcttacctgaaatataaagcctccaaggcccactacaccacagtcatctttagagcctcccctcttgttctgggacccatgggtcctacagtatatgcagactactgactgttctgtgactgcaccctgtactctaaatctcatacctttgtccctgacctgctgttgctgtacctgccttctttttgcttagagggttgtcccctcaagcactccctgctaataagcactcagccttccaccccaaacatctagtctgtctggtgaattcctggtgattcttcagtggtctgtctcaaatatatcttctacgctcttttctctttagtcttaactgccatccaaggcaacattagttagtccctcattataagaggcaatataagctggtgagaggtatatacccacagtcctagctacttgggagtctgaagcaggaggattgcttgaggccagcctgggcagcatagcaagaccttgtctctttgaaaaaaatagaaagaaaatgctgggtgtggtggctcacatctgtaatcccagcactttggaaggccaagtagggaggattgcttgagctcaggagttcgagaccagcctgggcaatacagcaagaccccatctctacaaaaactaaaaaaattagctgggcatggtggcacatgcctgtggtttcagctactctggatgctgagggagaaggatcacttgagcccaggagtttgaggctgcagtgagccatgattgtgctccagcctgggtgacagagtaagaccttgtctcagtggagggggtagggtgggaggggggaaagaggcaatatagtggtaagttaaaatccctgagtttggagccagactgcctttgttattaaggtagttgtatataactgggatgaaactgtttaacttttttgtgtctcagttttctcatttataacaaatgagtaatattagtcttgctgtgagggttaagtgaattaatgtagggaaaatgcattgaaagggcttgcatattactaagtacttcataaatatagctattattattattctcaaagcatttcttacatacttacctataatagcatttgccactttactttttttttttttttccaagacagagtcttgctctgttgcccaggctggagtgtagtggcatgatctaggctcactgtgacctccgcctcctgggttcaagcaattctcctgcttcagcctcctgagtagctgggattataggtgtatgccactatgcccagctaatttttgtatttttagtagagacagggttttaccgtgttggccaggctggtcttgaactcctgaccttgtgatccacccacctcggcctcccaaagtgctggggttacaggcatgagccaccgcgcccggcctgcagttacttttttgtgtatatttcccaatagactgtggcttttttgaaggtgggctattttaatcatctttgtgtcatcagtatgtagtacacagtgggacccagtaaacaatcagatgtgctgtttgtgtagcccagaataaagtgccaggtcctcctgcattgcagcagtcagcagcatgcatctggaaagtattgctttctgaaactacggcattagagccacaaagctgtttgggattggaccttagcaagctcttcaaccagaaatttgctattacaatgaagcttcctatctgcaataggtagattgtaactgacagcatgtagtcattggaaggaggttaatcccagagcataagaggacttctgatttatttttgcttaaagggatacaatccaaggccacaaaggctgctataagacttttgttttgttggggataataaagagagctgtttctgccttttccactttcttcttataaacctgctgaagattgaaatgttaaaatgtgattcagagaagagatttctttattgtaaacatgatagagagctcagaatgaatgccggagatagactctttatagaggatttcagggtattaaactcttaagccccttatggtcaggttttactgccaacccttaacaccccaccatgcctgggctactgcaatagtaactggtctttctacctttaggttcgctgcagtctctcctgcctactgctatgatattaatatttataaagccttactttgacttttctcatgcattataaaaaatcctcgcaaaataccccatcatatacaaggaaagttccaagttttagcttgtcattctggacttgtattaggattctccagagagagagagagagatttctttcctttctttttttctctttttttttcccagggtttcactcttgttgcccagtcgagtccagtggcactatcttgcaaactgcaacttccgccttccggtttcaagcaattctcctgcctcagcctcctgagtagctgggattacaggcgcctgccaccacgaccggctaatttttgcatttttattagagacgggatttcaccatgttggccaggctgatctcaaactcctgacctcgtgatccacctgcctcagccttccaaagtgctgggattacaggcatgagccaccacgcccggcctggatagatggatttctgtaataaacctctataggccaggcgttgtagctcatgcctgtaatcccagcgttttgggaggctgaggcgggcagatcacctgaggtcaggagtttgagaccaggtcggccaacatgttgaaaccccatctctattaaaaatacaaaaattagccgggcatggtggtgtgcacttgtaaatcccagctatttggaaggctgaggcagacaatcacttgaacccaggaggtggaggttgcagtgagctgagattgcgccattgcactccagcctgggtgactgagggagactcggtctcaaaaaacaaaaaacaaggaaaaaaaccccaaaaccttcataataagtttccatatctatatctatagatatagaagaggtttattttatatatataatagatacatagataggtataagaggaggtttattatggaagttggctcatgtgattcatgtgatcatggaggccgagaaatcctatgataggccatgtgcaacctggagaaccaggaaagctggtggtgtaattaagttggagtctgaggtcctgagaaccaggggaatcaaggctgaaggcctgggaattgggaaggggtggtgtgctggtgtaagtcctggagtccaaagacccaagaaccaggagctttgatgtccaagagtgggagaagatggatatcccagctcaagaagaaagagtgaatttgctcttcctctgccgtttgctctctctgggtggaaaagggtaaacagattatgacgcccaccctcattggtgagtgtgggtcttctttatttagtttactgattcaaatgctaatctcttgcagaaataccctcagagacccacctagaaatgttttatcagctgtctgggccattccttagcttagtcaacttggcacataaaattaaccatcacaggactcttctgcagtctgactctggttaccttttctaccttatcttccactatatcctagaatgagctgtgtagcttacctggcctagttgtgagtcctataatgtgaattgcattttatgtttgtatctacccagaacattttaccttttgaaattttgcctctcctttaagatccattaaaaaaaaactatttatttatttatctgtttatttatttatttaatttattttttttgagatgaagtctcactcttgttgcccaggctggagtgcagtggtgtgatctcggctcactgcaacctctgcctcccaggttcaagcgattctcctgcctcaagcctcctgagtagctgggattacaggcgtgtgccaccacgcctggctaatttttgtatttttagtggaaatggggtttcaccctgttggccaggctggtctcgaactcctgacctcaagtgatctgcccgcctctgcctcccaaagtactgggattacaggcatgagccaccacacccagcttattttgaaataattatagaatcataggaaattacaaaattagtacatcgagtcctgtatacccttcccccaactttcaccaatggtgatatctttttgtgtgtgtgtgtgtgtgtgatggagtcttgatcttgtcgcccaggctgttgtgcaatggcgcgatctcagctcactgcaacttccgtctcccaggttcaagcgattctcctgcctcagcctcttaagtagctgggattataggtgcctgctaccatgcccggcttatttttgtacttttgaagagacaaggttttgccatgttggccaggctggtctcaaaccctgacctcaggtgatccgcctgccttggcctcccagagcattgggattacaggcgtgagccactgtgcccggctgctatcttatataattatactataatataagatcctattttttttttaagagacaggttttcgctcagacgcccaggctggagtgcagtgctgtgatgctagctcactataaacttgaactctgggctcaagtgatcctcaggaggaggatcctagctcctgggtagctaggactacagtcacgtgccactatgcctggctaattttaaaatttgtatagagatgatatctcggtttgttgcccaggctggtctcaaactcctggcttcaagtgattcctccacttcagcttccaaaaatgttgggactaggtgtgagccattgcacctagactgatccattttaaaactctattttgaataaaattttcaggggtaaaaaaggtttttttcttttccttttcttccttgcttctttctttctttttttttgagatggagccttgctgtgtcacctaggctggtatgcagtggcgcgatctcggcttactgcaatctctgccttccaggttcaagccattctcatgcctcagcctcccaagtagctgggattataggcatgcaccatgatgcttgggtaatttttgtatttttagtagagatggtgtttcactgtgttggccaggctggtctcgaactcctgaccttaagtgatctcccggccttggcctcctaaagtgctgggattacagtcatgagccactgcgtccagatggaaagtatctttttaaactttatatccctccctagaatttatcccctaatatatggtgtttatggaggtggttggaatcaactactttttataaatatattattaaagagttgacaacccctaaaaatcttttagatgctagacaaaaaaactgagagaaatcatgaagtatttttttaaaaaattttttgagatggagtctcactccagtgacaacccaggttggagtgcagtggcacgatctcagctcactgcaacctctgcctcccaggttcaagcaattctcctgcctcagcctcctgagtagccgggattacaagcgtgcgccaccacgcccagctaatttttgtatttttagcagagacggggtttcaccatgttggtcagggtggtctcgaactcctgacctcatgatccacatgcctcagcttccctaagtgctgggattacaggtgtgagccaccatgcctggctagtcatgaagtattttaaaggacgtgggttctgacactcttaaattcaataggccaaagttcctggcatttttttcttggatatgtaccgcatagacctttcttagtagatactgggagaaagaagttggtttaataatgaattaatgggaaagttttttttttgagacggagtttcgctcttattgcccaggctggagtgcaatggcccgatctctgcttactgcaacctccgcctctagggttcaggtgattctcctgcctcggcctcccgagtagctgggattacaggcatgcaccgccaagcccggctaattttgtatttttagcagagatggggtttctccatgttggtcaggctggtctcgaactcccaaccgcaggtgatcggcccacctcggcttcccaaagtgctgggattacaggcgtgagccaccgcgtccagcctggaaagttttaattgaccttatgtctgtataattaaatgtatttcattaactttttaaaggtaaataaatctggggtttcatctaagtgtcaaaaatatgattttcaccaatggcctacttatttttgccattatttgcataaatagctttctggtttttctcaagttaacctgtatgcttgtgatgtgaaagtcatagtatgtataaaaaatagtaccaagatgaagtatagatggtcattctgaaccattattccttagcagagtgaactatatttaaggttttagaaataaatcgtatttccatgtctgaataagaccttagtcttatttaaataaatgtaggggagatggagagaaagaataagatttgcctaagaatactaatattaagatgaatggcaggtaggacacactgaggctgtcaggcattgttctcagtgttttacattcaccatcttgcttcatcctcacaacagactttatcatttgattagaaaaaaatcagtacgatctagatgttctcattgaataacattttttcataaacaatttaatttcatttaatttatattgttactattttttatataagtaaatatgaggtctcactatgttgcccaggctggtctcaaactcctgggctcaagcagtcctctcacctcggcctccgaagtgctgggattacaggcatgagccaccacatctggccctgaactattttaatgcaacaagtatttactgagttccgataaatgaaccaagtctggtgctttagaaccatgatctcaaactggaggacatgtctaagaatatctaggcttggactgttttaagagaataaatttccagattctctatattttatttatactctttcctgaaattgacttgtttgaaggcaacactgatataatgctagtccaccttccctaccctccctttagccctgtgccttcttatgattaacagaagacagccatacctttcacccatcttgaatctcaccattgtacctttctatgaggtataaaatcctccaggattctaacaaagggatagtcaaaacactagtgtcacgtgtgaaacttccttttatcaaggtatcttcctccatacatcttattaagagatgcatctccaaaaaaggaaattactttttatgtttagttctcaaaatttgtaacatttgcattgtcttcatcgattgtgttttactataatagtaaccataccacaatccaacataaataaacaataatatacatgttttcattaaggaaagtatgataaaagttatattaaatactgtggaagaagcagaatagaaatacagtttcagggagaccgataaatggcatagcattttatataggaaaaaaagattctgttacagttttaaaatataggatgggggatatcagattgcccaggtgtttagattttattggaattagtgatacagtagggttttttgtttgtttgtttgtttttaagacagggtcttgctctgttgcccaggctggagtgcagtggtgcgattttggctcactgcagcctctgcctcccaggctaaagcaatcctcccacctcagcctcctgagcagctgggactacaggcgagtaccaccgtgtgtgactaatttttgtatttttttgtagagacggggttttgccatgtggctcaggctggtcttgaactccttggcccaagtgatccacctccttccacctcccaaagtgctgggattatgggcgtgagccactttgcctcaccaatatagtaggtttaatagctttaaaattagcaatataatagtgtttttaggtgtcagttctaaatagacatagattgatatataaatgaaaatataacctttgcagtgattaaaacttgtaatgaaaattttagatgtcaacctaagaatattcaaggagacacctttttccccccattaaatttgttttagcaggtatgtgagcaaaacttttgaatagtgccgcaaaggatatagagatcaagaagaaataatttttgccctcaagatgcttgttagttaaatggtgaagcaggggcatagatacatggtttggcttaaataaagccttaattgtgtcatggtattttgctgtttgcttaacatgggcattgtgcctcagtgttgtgtcatgcttgttaaaatgacccttgagtggtagtttagctcatatgtgctgtgttaccacataggctattgtgcagaacagtgaggaattgtatattgtgaaagacagatggataggaacagtgcccactgcacttaccaccaatgaatggtagggctttctctcattgtctagttgatgtgatcataaaaaacattagactggaagtcaggacaccctaattctcatcctgagtctgccacagaacgtatgaccttggctaaatcatttaacgcatttgaactctagtttcctcatataaaaaaagtttaaactggatgattttctacctgtgaagtttagagttcatacatttttacacagtatatgcgttttagaagggataggtgcagcagattttaagaaacagatgccaaaataatggagtagattacttactgtaatatgcggagaagagtagcttactaattatttatctaagtgtgattaggacagtctgttatatggcttgtcgtaagtgttgtgggtctcaccactgccctttttatttaaaaagagaatttcctctacttttgagaattagaacaaatactacacaggattagtaagcgagaataccaatttcagcttcatgccagtgcctctagtgaaaaccacatttttgcagtgttctagcagaatattaaaatggcttatggattacagacagctcaggctttggtctttataggtcagaggtggaaaccaacggagcaattaccgttcactcttatgggcggggcttcttaggttccttatggagctaaagtgaaactctggaacagttccactagaatggctttcctgggagcttatgaggcttacattctgaaactgatactcttgtagtacaagaataactacaaactgatgtggaattaggaggccagagaggggagaagccacatgtagctctcattctcacaagtcctttggctggcgaacagaggtttttcccgtcactaagcagatatttggttatatattgacaaatcctctctaaacaattcttagaatagaagactgattctgtcttgtgctttggaggtgaaggggaagagcaatgttgaaatgagtgaaattagcttgtgatggtttaacatctgcaaatatcatctatctaaccagtctttatctcctatgtgtgttcttaaatatggtccccattgtttgaagccaagaaagataactgaggaaattctatggctgatttgccgatgttattaccaattatttattagccttagtatcggatagtttgactgatttgccatgttgttttttagaaatgggggtcttgctctgttgcccaggctggagtgcagtgacgcaatcctagctcactgcagcctcgaactcctgtgctcaagtgatcctcctgcctcacctgtgagtagctgggacaacaagcgtataccaccacttctggctaatttctttttttactttttataaagacggggtctccctatgttgcccaaaggctgatgatttgccttttttaggtagaaaacctggactgggccctcaagtttttaactttttttttttttcttggtgatacaaaatgtggggtgaagaggtctgttaaagtgaccaggcttggtgctatttaaagccgaggagggaaatactgtttcctggcaggctttattgtgtttttgtattattaaatctcttaagtcagcagtttactttttgtctagttgtatgtcttggcttgtctaaatgaatcataattaaaatttagtcactgggactcttaatcttgtctaagcaggaattatagtttagagatactataccttgctgtgtatagaataagaaaagtataagtctgctatgatcactgagatgggtttttataagtactaaacttttttagaagcatagttttctttatcacctgtcccccagaaagtttagaaagtgaaaattaaaaagtaagtaaaaataatggtattggagttataatttggaaatttgtttcattcacttgcattttaatatttattatgtaaacatgaaatgataaatttgtttcctttgaaaagattcaagaaatagaatagttttaaaagtagtcttttacattcctttgcttattgacaaaatcatcatcaggaacatcgattcagggaatgaggcttctgatccatctcaaaacgaacattactaatatttgctatggtcatttgacataagtttttattgagtcagaactatactggggcagtagccttcaagccagttaaacatgaattaagaacttgtgtgccaggtactgcactaaatgttaatggcataaaggtgaataaaacatcgtttatactgtgttttgtttcacacaggatttgagatggctgacagaaagtaactaaagtgagattgtaaaatgtaactgaggttcagaaccagggaaaagataaattagatttggaggcctagatatggttaaataattaattagacatgaaaccctatggctgaacagttcagttgaatgttgattttagtagtgatatgatacagaagctaagctttgttatagtcacgcaatgttgaggcatggttaatatatttagcaggattatgaagagttcaggcattttttggaaactcctatgaatatgtcatctagaattggttttgtaaaatggtagtgcttgtactgtttagttacatgtgttgaatatcagatggatttcagtatttttttaaaactttgcttaagcctcttaagcctcattgagtggggagactgcagtgtaagtatccaggctgaagactgaacttccaccttatttttatgtggtaatgagtttttgtttagatgatatatatgttttaatgttgagatggaaaaagtagaagtgaattgcagtgtagaaactactctgtttccttttttatctatttttatttcagtcattaagctttccccatctttagtctattgagttgtttcatggcacgttcggagggatggtgggaatgccctttgctgaatcaaaaactactgtttctccaacttcacaggttagagaagctcatcaagtcaataatttataattttaatatggaagctgttttgggaactcttgtgggcatatcttggttttaaaagaagaaaaaagatttactgatttaagaggtatataaacgcagcttgctgacagtagcttttgattttattggttcaacagatatcattgttgcacaatacataatctttcactgtggcagctaatgagatacaaaactgcataattgcaccaacagttattttccttatagaatttggcggctactaagtaaacaacttttaaaatttatcttaattggtttagttatgtgccatcattgaatgagtcttaacattttccttcacgctgttgcactccacattcttagttgaacagagaaagatattattttaagggagggcttgatcttttagcattttagccagttggcttttcttaattaggatgattactcatatttagatgaaatctaactgagaaaccacagcaaaatgcttactgaaaacattcgggtagtcagtgtggaggaaagactcctggaaaataaaatgtctcaaggttgttttgaagtttatcctcattgtttttatttatccttatgtgtgttaagtatacgaggattcctggttgtactggtattttggcaaagtcctgtactgttcctcaaatgcttctaatgcagacactgacttttaagaaccagacacatgtagatgtgcagcgagacaacactctggcctttaaccattgtgcctcctttcttacctgcgaattgcgtttactagcgtatttcacatttcagccaatagatctaaagaatacaaatgagaacatataggacctgtctgcaaataggttttaacttccagagattagaagtagctgttgagagcactgtgggtttagtgagaaagagtgctttggcagaatgggcagtgtctactgtaggctaaaaatgggggaactatagcatatcatgagccttctgtaaccctcgaagtcagttattagcagttgaacatgctctttggtcataatggcagtccccaggctccagataataatttgagcagggagctgggagaaataaggaggacatgagtacatgggacaaaagtgggccagtaaagggaaaattacatatgaatggaagaatagagaatggaaaatggtaaactggagagaaaaagatgaaaaagacatgaaaaaaaagagtagggataaacgggctctacctgtttccttttctgatcagtaaaggaaaatacttcttgaaatccttagggcatctttggacaaggaaatcagaagtaattcaaattgtattgttgtcagagtttagtcttaaaagttgtgttgccaggtagaaaacaaagcatgataatcatttatagaactcctttagttggtttacttgcctcttagggtaaaaacaaaattagacttccagagtagtctgtgatcttggaaaagtctttctgaaaaatgattatagaactgttaagacatctcccatctcatctcatatggcatcatacttttcccaattattttcagatattttagcatcaaagttttctagaatgagttttgtagaacactagtatccctcattgcttaaatatattaggaggaaaaggattttttttattaaataagtttgggaatatatagagtggacaaaattagttttaaaattacaggtcatttgagaggtcttgaagtaccagtgtcttgtggatccctgaagggctagatgagggtggggcatgtagcctttctcaaatttatgtgactaccatacagtttgaggaaagctggtctatataaatgcattacctgtgaaacctggctttcttccacatctcctctgacttgctttgctatttttttccccatctcttacagtacttcctgctatcccccaaattgggggaattctttcttttttcattttaaaatatgatattctggagatctgaattctctctttttacatttttatatgtgtattccactttgagcaatattaatactagcttacattttaaaatacgatattctggagatccaatgtataacatgagggctatagttaataatattgtattgcactgggattttttttgagagtagattttagttgcccttgctaaaaaaaaaaaaaaaaaaaggaggcaggtaactgtgaggtgatggataaattaatttgcttgactatagtaaccatttcactatatataagtatataaaaacattgtgttgtataccttaaatatatacaatgaaaaagaaaagaaaagaaaatatgatgatagtatttatatgtgaactctttatttggatctttaagtttctggataatctggtccctaatcttatctacattcccaggtttattcatcaccagtcttccatggtaagtcttcacttgagctcaatttactattccatgattatattctgtatgtggaatgttctcctctactttttgtattatggtctggctcaagtgcaccttttccatgagaccttccctgatatctttagctagaagtaatctcttccttggcacatctgtagcatttatgtactaatacctatagtgttatttacagatttatttgtggttatttatgcacatgtcttagatttcgagcttcagaagagagggaatagcatgccatatcacccagaagcttgtagcttagctattgcctagtaacattattaacagagtaataatgtcagctaacatttgttgtttactataataaatgacgagcacagttctaaatgctttagataattaatgtagtgaagaagtagagtaacttactcagtcacatgctcagttagtgatggcgccaggatttgaacctaagcattcttctgctctttatcactatacagtactgcttgctatgataggtgctcagtgagatttgaatgaacaaatgagcagacaaggctttgaaaaagagggcccatcatctgtggctcaagctcataaggcactttcttttccccttttcaaagctgacatttatcatttatctagccatgtaatgttttcagtgactaagaacaattagctagagttcaggtgggctgtgggagtggtagagatgagtgtgtggggaaatgtgtttagtcactgtgtttattttatttatacactagaacctgctgctatccttgttgaagaaatagtggtgagtccaggctttggagtcaggaaaacctggatgggagtttcagcttcttcatttattagcagtttgggcaagtttcttaacagttgtaaaccgtagttttcttctttgtaaaataatagtaactacttctttagtgtctatgtgaggattaaatcagatgatcatgtaaagcacttagctatagtacctactacatattaagtgcccaacaaatgttacttatgatacaataggttttacttaacataaaattaactcctaatttcttaaaaaaatatgtcttttgaatgtggacctttcgattttagtcagctaaagcattaagtctgttttcttccactccctcaacttcatagtaacatgtctgtttataatatgcagtgagaattgtagtgtacattgcaccatttatacactgcaaacatcatacattagtaacaagtctgtcatgaactgagttaattgtagggtttgttctgaacattttcttgccaggcatggtggcttacgcctgtgatcccagcactatgggaggctgaagtgggaggatcacttaagtgagttcaagaccagggcaacatagcgagacctcacctctacaaacaaacacaattaaaaaaatatattttttcattgttgagctttattttcggtgtttgtaatatgaagacaataggtatctttttatttatcaaataaggtttattaattatgctttttcttttaaatgacagccttgagtcaactttttctgtctttgtgctaagaattacagtagtctcaacgtagagccgaggtgattctgatctaaagatgctccgtgaatgtgcgatatttctttttcttttttttttgagatggagtctcactccgtcgcccaggctggaatgcagtggcacaatctcagctccctgcagcctccgcctcccaggttcaaacaattctcctgcctcagcctcccgagtagctgggattagaggcacacaccaccatgcctggctaatttttgtatttttagtagagatggggtttcaccattttggccaggatggtcttgatctcctgacctcagatgatatgcccgcctccgcctcccaaagtgctgggattacaggcatgagccactgcgcctggccgcatgtgggatatttcgaagaatcttagctttgatgcatctgtggggaagaaatgagtgattattaacaaaggtaaaaggagaggagagtcattgcaaataaagaatcttgtagcggccaggtgcggtggctcacacttgtaatcccaacactttgagaggccgaggaggatcacctgaggtcaggagttcgataccagcctggccaacatggtgaaacctcgtctctactgaaaatacaaaaattagccaggcgtggtggcgggtgcctgtaatcccagctactctggaggctgaggcaggagaatcgcttgaacctgggaggcagaggctgtggtgagccgagattgcaccactgcactccagcctgggagacagagcgagactctgtctcaaaaaaaaaaaaaaagtatcttgtagcagtttattctaggccagagccacagtttgtgttgatttggctagaaattattaaagttggtattctgtgaaattttgtttgagtggttctttgtttggttgagcgggttcagatgaggctgagaaaacaggaagattgtgcttggaagagggggagaaggcttccttaggccaaggcaggtcagtcattctataaggagagtctctatacaggatgtttctgcttttaaaaatatggtctgatatgcaaattcacttatctagtgcaaatgattctggcaaaggtttctactttcttgattcaggaataagacaaaagagttttccaccccatagtacacaacaaaaaagaggcattataaaacttttcagaactactaaagtggtatgattttatgatttcttgttgaattcagcatttgaaaacagaagaaatgtgaaaacagaggaaaggtgcttagcataggaattaacttgtttcttggcaaggaaaccagggtcaggtgtttgaatcacttggctttgtggtggttctgttggtttttgtgtgtgtgtttttcttcttctgctggattatcatctctttttttctgccttggaaactgttgctttatctagggcaatcaccccacttacacaggaggcaaattcaaagctggttgccttatgttgttaaaagctgtcagattcacatcctttgccatatccttcttcaggagtcaggacaatgaagacaggagtctaaacatggggccagagtgagctgccccgtcctcagtactaacacctattcctgacagcttaagttgcttctcagccttagtgaagctttctcagctattctggctcatgatgatcattccctcctttgaactgaaatagcctaattgtctctgagtcatgtggcaattagtcttgttttgctttctgatatctcttgtagttgacttttattgttaatgtatgctgcttgaaggcaagggctgttgtgaatttattatattgctatatattttacagagactcttgatttttccctggtttaccttgggaagttttcctgcctcttaaatggcgagaggatcctttagaagatttcctaactctcagaatcttttagatttttcatgtcatgctgtgtttgctatggccttgaaaaagcagtttttcccttttttgcagcagacacaaccaagattctggataaagaccaggcaacacaattttcctagagtaatacttaccttgagtagtttcttatggggaaaaaagcccccaatattcttaggcttaatttctatgatcaaatattttaaagatagaaacaaatgatatatagtagttaggtatgggggcaggcaaacaagcaaaatgttaagatcttgcatgactaattagtactgtataaaacacatttaaattttgttgtacccattcttacattagaaatgaattgattgattcatatggtattggttttcctttaagggatttatttcttaatgaatcagaggtttcacattgaaaaagaatctgcgtatttttatatactatcccaactttcatctgagttatttcatgtttttcattgccccattggaaaccgtattttgccgaagagtcatttaatatatttttcacactggctttgatttggtgacatgtagcagttctggaagaattaacgatatgttaacacaagttgactgtgatagaataattacaataaatatgcctattttcctttggggagaaaagtctaaaattctgctttatagaagctattctcagctctaaaagagcatatatgtagatcttcatttcttttcttctaacaattttaggggaaaatacaaaccttaagttatttcctgaaatatttcccaggatgattactaccttggattttaaggcttctttcttcacaagttctgactcttctataagcacaatcagaatggtcagaatgctgactctcctttaggtagtcagaatgggtcttccaaacctttgtatgagcccattagctgcctcagctttccctcaactttcaggaaaacacaggttacatattctttacgttactatgagaaactacctacattatttttttttaaattttatttttggctgggcacattggctcacacctgcaatcccaacattttgggaggctgagatgaaaggattgcttgaagccaggagttgcaagacaagcctaggtgacaaagtgagaccttgactataaaaaaaaaaaattaacctttccggcggtgatgacctacccacacgagaacatgcctcttgcaaagggtctccttcatccctctccagaaaaggagaagaggaaacacaagaagaaacgcctggtgcagagccccaattcctgcttcatggatgtgaaatgcccaggatgctataaaatcatcacggtctttagccatgcacaaacggtagttttgtgtgttggctgctccactgtcctctgccagcctacaggaggaaaagcaaggcttacagaaggatgttccttcaggaggaagcagcactaaaagcactctgaatcaagatgagtgggaaaccatctcaataaacacattttggattaaaaaaaaaaattaaaacaattagccgggcatggtggcatgcacctgtagtcccagctactctggaggctaaggtgggaggatcgcttgagcctaggagctcaaggttacagtgagctatgatcacatcactgcattccagcctgggtgacaatagccctataatgtaggtagttacttttatctgcattttacaaatgaaaagaactgacagacattgagttaaaataaccagtacaaaaatcacagatgggggatagccaaagctttaaaatggaatagcaggaagttttaatttgcaaatagaatcattaatgtttaatagaatcattaatagatttaatagaattaatgaattgatagaatcattaattcatacttagtttggagtgattgttgaacacatttctcagctaatttaggtcttcattatattttagaacatattatctgcatcattaaaaaattcctcatttcctcattgcctatctctgccttttattcactcagttttaaaataaacagattttgtttatactgcttcttttattaatatttatggtaagatattttatactgctgataaatggacattaatgatatatagcctattgtttgaaaaaagcattttggattatagcccagaactggaaacaaccaagagataaataaatggtggtatattcatacaataaaatattactcagataaaaaagttcagttcaaaactttcagttttatcattgcattatttgcagttgtaaaacatggtaacatcacaaccttatgttacaaagttattaaaaatattagcaaggtacactgattgctgtagccatgttacaattaagctaaaggaatttcttgttaaccaaaagcaaaaaataagtttggtttttttggatcttaattgactatttataatagaacttgcctttgggtagcgaacagattcacaaatgaaagaggagattctggaacttactgtataattccaggtaactctgtaaagtttgaaatgtaaagaccatgccttaatacaattgataattggaatcgtgctggcatcttcttaacatctcttgcttgtctgtggagcatggcatgattacttatacattactacatttaggaaacagcctttataagacccactttttctgaagtttttggtgttactcttttcttaaccaccagtactgatctcattatgttttggccgacttacttgagggcatgctaaaaagtgatctaaatacttaatttctcccttcaattgtgcatcgtgttttacaaataaaccgtatctttactttcatttacttgcatgtcactgagaaaatttgagatctttagcattcatgtccttgcctgaagtataaggatttcacataatttcagcttttatcattcaagtcttatagatgcttttctcttgtctctgttttcaaataatggtgctaattatatttaaggggcagtatgtttattcaatatagttatagtgttagcagtgtaggatttaacaagcttttcctctggaatgtatactagttcttcatgttctatgtgataacttatacagtgctatggtatttttgttgttagatttaagttttctttgaattttttttctgtccataatcttaggctttctttttgtgcttactgtttttttctcccccagaatgatacatggcagcgattataaatctgttttataaaacttaacttcattaaacatatgaagaacgtgggattatttttcttgtcataaaaggtgacctccagtgacaaatggctattacattatttatgtgagattccttcatttcatatactgttatcaatgtgtttgataatggttgaagaaccagttggtgttggtttctaatactaattaataatttgccttgagcctgatcaatcttcttatatccattatcagatttttttcttcaaatctgaaaatgttttcttttcttttccttttctttttttttcttttcttttctttcttttttttttttttttagacggagtctcgctctttccccccagactggagtgcagtggcgcaatctctgctcactgcaagctccgcctcctggcttcacaccattctcctgcctcagcctcctgagtagctgagactacaggcgcccaccacgacgcctggctaatttttttttgttttgtatttttagtagagacgaggtttcactgagttagccaggatggtcttgatctcttgacctcgtgatccacctgccttggcctcccaaagtgctggaattacaggtgtgagccactgcacccagctattttttctatatttttatgtagttcattgagggtaataattttatcctacaacaaacatgtaagttattgaagaatattggagttttatgataatgctgtcataaatataaaaggtagggtaagagggatccaaatagagctcacttatattgtcactgataggcagtcacgctgtgctgatagaatgtggcctgacacttgatggagtgcagcatatgtatacttgggcaatttgagcagatatatacggtcccgagtttaaagaagagaacaaacaccagtgcacagctatagtattcctaatataggatgcattttaaagaatttcacattctacaaatggagagagatggcaggagaagccttattttaagtcctgcactaaggcaggttaacctcatgggtgtaattacctggacctttttgtaaggacaaaatatttaatcattaaaaggccctctgtagggtttgaaatatctatattttatatatgaatgcttcttttattaatatttatggtaagatattttatactgctgataaacggacattaatgatatatagcctattgtttgaaaaaagcattttggattatagcccaaaactggaaataaccaacagataaataaatggtggtatattcatacaataaaatactactcagataaaaaagatgaacttaatctcataaacattatgggcaacatagtgagaacccatctcttttaaaaaaaaaaaaaaaagaaaaggtgggtgtggtgatgcgtgtcatagtcccagctactcgggaggctgagctaggaggattgcttgagcccgggagtttgaggttgtagtgagctatgatcatgccactggactctagccaggagcctgggcaacagagcaagaccttgtctctaaacaaggcaaaacaaaaacaaaaaaacaaaaatcaattgcatttttatatattagcagtgaacacatggaaatacatgcaataccatttataacagttcaatcaaaagaaatacttgagcatatatctaacaaaacgtatataggacttacttgtatactgaaaactgcaaaatgctgatgaaagaaatcaaagaccaaaatagtgagagatactgtgttcatgattggaagactcaacatagtaaagatgtcagttctcctcaaattaatctacaagtttaatgcaatttttatcaaaagcccaggaagattttttgtagatataggcaagattattatcaattgtgtgtagaaatacaaggaaactagaatagctaaactgaataaaaaaattggaggaatcactctacctgatttcaagacttattgtatagctccagtaatcaagattgtgtaatattggtagaaggatagaccaaagatcaatgaaacagaatagaaaagcaggaataacagaatagagacctatacagatatcctcagtaaatttttaaattgagatataacttacatacctgtaaaattcagtggttttttattatattcacaaagttgtataacattcaccatcatttaattccagaacatgatcatcacttaaaaaataaatgctggcctggtgcggtggctcacgcctgtaatcccagcactttgggaggcctagtgggtggatcacctgaggtcaggcattcgaaaccagcctgaccaacatggtgaaaccccgtctctactaaatatacaaaaaaaaaaaaaaaaaaaaaaaaaaattagccgggtgtggtggtacatgccagtaatcccagctacttgggagggtgaggcagagaatcccttgaacctgtgcagtggaggttgcagtgagccaagatcgcgccattgcactccagcctgggaaacaagagcaaaactctgtctcaaataaataaataaaataaaaataaaataaaataaaataaaatgctgtattcattggccattgcccaactgatttttgataaagatgcagaagcaattcagtgcaggaaggatagccttttaaataaatggtgctggagcaactggacagctataagacaaaaaaaaaaaaaggaaaaaaggaaaaatctgacctaaacttcacaccttataaaaaaattaactgagagtggatcatggacttaaatgtaaaacataaaactaaaaaaaattttagaaaataacaggagaaaatgtttaggatatagagctaggcaaagagttctgagacttgacaccaaaagtatgatctagaaaaggaaaaattggtaagttggacttcataagaactaaaacattttggtctgctaaagaccatgttaaaaggctgaaaaggcaaactacagactgggagaaaatatttttgaaccacatatccaataaagactactgtctagaatatataaataactccaaactcagtattaaaaaaccccaagtaatccaattagaaaacagcaaaagatgttaaggaacatttcactgaagaggatatacagatggcatgtaaccccatgaagagatgttcaacatcattagccgttagggaactgcaaattaaaaccacagtgagatatctcaaaatagagtttaatttttaaaaagcctgggtgcactggcacacacctgtaatcctagtactttgcgaggttgaggtgggaggatcacctgagcctggaaagtcgaggctgcagtgagctgtagtcctgccactgcacaccagcctgggcaacgggaatgagactgtgtcttaaaacaaattgttttaaaggaaaaaataatatcattaaattcagtaaatgcaggaaaaaaggctaaagcagaaaaaaaccacatgtgatctcaataactgtatataacttccagtaacattttgttgtattttatacatttttttgccctctgcatttttatattatatagttaactgaatatgcagttgtgtcttgcttttttcacaatactcaatatcatgagtatttttatcacttaaaattatccatgaatatagattttaaatggctcataatctttgttgtatggatgtacagtaatttatttaaccattcctttcatatgtttaaagtagttccattttgttgctattgcaaataatgctgtgagaaacatttttgtatgtaaacttctgtcaggatttctgattccttccttacaatacattcttagaggtagaattactgtgtcacgacgtgggcatcttagaggcctttgttaactatacattgccaaaatactttgcagaaatatagtttcgatttatgccccttttatattcttacatttctcctttctctaggaaaataaatgttcatgttactcaccttcactcaaggtttccaaacactttttcttggctctcctcctacaactctgttctcagctttccaaaattgtttctctttactccttagatatctgggtttccttaggttctgtgctctccctcttctctctatgtatattcttctttgagctaatcagaaccagccccttgccttcaactacagtttacatcataatgactcctaaatcccatatctctgctgagttttgggaaccagttctaacaccatactagatatttttaccttatgctacatagccatcacaaatgtaactcccttatccaaaactgaactcattatccaaccacactaacttcatctccactgatggcagtatgacccatccagtggtagaagccagaagtttgggagttagcctagatttctccttgaattttgtgtaccactggtcaatcattacattttaagattctgcttccaaaatagctctctaatttgttacctcccctttccactgccttaatttaggccctcatattttttgtactgctgcattggtgtcttaactgatacgcccatttctgacctagttccatccctcagtttcatccttcacattaaaaccattttgtcttttaatttttaattttatttttgagacagggtctggctctgttgctcaggctagagtgcagtggtgcaatcttggctcactgcagcctctgcctcctgggttcaattcatccttccacctcagcctcctaagtagctgggactataggtgcttgccaccatgcccagctaattttttgtagatccagggtttcaccatgttgcccaggctagtctcaaactcctgagctcaagtgatccacctgcatctgccttccaaagtgctgggataggctgggcacagtgggtcacacctgtaatcccagcactttgggagaccgaggttggcggatcacttgaggtcaagagttcgagaccagcctggccagcatggtgaaaccttgtctccactaaaaataccaaaattagccgggcgtagtggcgggtgcctgtaatttcagctactcgggaggctgaggcgggaaaatcacttgaacccaggaggtggaagttgcagagagccgagatcacaccactgtgacaaagcaagattcaatctcaaaaacaaaatatacaaaatgctgggattacaggtatgagccaccatgcctggcccagtttgtcattttaatgcatgcatgtcagcatgtttctcaccgtcactgtcttctgtctcctgtaaaataaagcctgttctctgtagcatggcacccatgagcctggtcttgatttccttcctccaggctactttcatgatttatccctggccatgcctgatatggctcccagtcatgctgagctagtttcctcaacatattagaattgtttttcaggcctttatgcttttgctcatgttttttttttccttgacatgcttctttcttctatccatttgccagatttctttcacatcctaagattcaggtaacatcataacctcctatggaaagcaagccctctataggaattgttaagggcttccttgtctgtgttcccactgtgccatgtacctacttctttctgccacctcctacattggtgtacttttgttgttgttgttaagctgtccctattatactagattgtaacacatgctttctaccgcctagagcaggaactgtgtactcttaattgtttcctgagggcttgagattagcatctggcatgtagtaggtgtttaataaatatttcttgagtagatgaagatatgagtgaatgaatgaagggtttcatgctgaaaaatgaaaaaagggtttaactttaagaaaaaagtcacagattttggagtcataggaattgagtttgagtcctaccgtcatttcttagtgttgatataattttaagcaggttgtttccctcctctgatctttagttcttttgcaaaagggaggtggtagtagtagtagtaatactattaacagtagtagtagtaataataaaagtgcttttaaaataaatattctgcaaattttagttaatattgttaacagtaataaaaagcatcttctatatgtaggctgcacatgcataatgcattgtcttgaacgaagtgagaggagaattacttaaaactttgggtagacgtactcatcaattacaagatcaatttacttggttttgctataatttggttgccattgttgacccattgctttattgtcccattgtctcatcacttgctcagacgctgaagatgggtcagggggagtcagttttagaaaacagccttccctgggccgggcacagtggctcacgtctgtaatcccagcacttttggaggctgaggcaggtggatcacctgaggtcaggagttcaggaccagcctggccaacatggtgaaaccccatctctactaaaaaaaaatacaaaagttagctgggcatggtggcgggcgcgtgtaatcccagctactcgggaggctgagacaggaggattgcttgaacctggaaggtggaggtggcagtgagccgagattgcaccattgcactccatccagcctgggcgacaagagtgaaattccatctcaaacaaacaaacaaacaaacaaacagatataaaaaaaagaaaaaaaaagaaaacagccttccctgaaagttgtttgtgatgcttatggtctaggatgtgaaatttacaggatgatgaaacatgcagatattaatagtgttccatattatttttgaatgtggtttgacttttctaacgatcagcagtgacaaacttgtgtactaccagtcaaccctgttttccatgttttctctacagagatgtatagttagagcagagatgactaatgtgttttcaagaaatgctactataacctttaagtctgatgggtagattgagcatttaaagctgttgctttttcatcgcatctggatgactgtatgttcctaccaaatgaatcactttatgaatatgcatgagcttataaacacaactttttagaaaaaattcttgtgttctgaaacaaaattacgttggtagtattttccaagttttccgtaagaagtagctttgcattagccctagaaattccttgaataatatgtttttacccccttacttgtattacatttaatgacatctctggctttattttctccattcttttttccatggagtttcttaatttcactgtttttgccttgccctttagacgggtgaaacaatgatgactcattttagattgatgaaagggacagcttagcagctggagagctggtagacactagagcactaaattgccagcaccagccttctcttcattgtccacgtaaggcttgtggcagaggtatgcccattcagtcatttattaatatgtaatttgtaggttagatgacttcatcaaattatatttacatctgacctggaggttcaaccatgttttgctttgggacatttttaattgttaaaaatcatagttgggttctgatcaatatgtacatgctgaagttcttatttagccacattatgggcttttttggttttcttcagcatgtcaatagtacacagcagctcagaatggtcaaaattgtttcattagtgccttaacaaccattcatgatatatcatattgtagaatgcaagtatagtcacgcactgcttagcgatggggatacattctgagaaatgcatcattaggtgattgtttccttgtgggaacatcataagagtgtacttacacagacctagatggtatagcctactacccacctagggctatgtggtatggtctgttgctcctaggctacaaacctatacagcattttcctaactcaatattgtaggcagttgtgacccaacggttaagtatttgtgtatctaaacacagctaaacaggaaaggtgcagtataaatacagcgttatcatcttacaggacctctgttggtatatggtgcacgactgtatatcctttatctacatttcccccttttggcttggatagaccatcaattccttgggtttacatttatttcatgtaatcttaaaggattttgttttatgcatggcaccattttttttcaatacaaatggttagtataaaacccaaatttgagaatttgataacaatggcttagtattgaacacaagtgttacataaagttgtggaaaaagccttagagaggtagtcaggggatttgagttccaggtctgactgtgcacttgactcaccacgtcatcttggttaataatcacctaacaataaaaataataaccttaatttatataatgctctgcagtctgcagagcacttttaaagaaagtataggctgggtgtggtggatcacatctgtaatcccagcattttgggaggctgagacaggtggatcacttgagtgattaggagttcaagaccagcctggacaacatggtgaaactctgtttctaccaaaaacacaaaaaagtagctgggtgtggtgaaacatgcctgtggtctcagctactccagaggcttgagcctgggaggcagaagttgcagtgagctgagattgtgccattgcactctagcctgggtgacagaacgagatcttgtctcaaaaaaaaaaaattgtattgggcatagatatgattattcacattttgtgatgaggaaactaaaattcaaagactttaagagatttgctcaaggtcacataccggtaagggctagaactagcattgatttttatcactttcctttcagtcataccatgctgtctctcattttacttttatgggtatcagttatgaaataagggggttggaccggatcagtgatttttttcaagctacatttacagagagtcttaggattcttttgagtggcctccaggtttgcttgtggaatgaagattgaaatatagggaaaggtgcttagctttgcaccagagtatccacactgagtgaggtagtagttgctcattgacagttgagaaactactgcatgttattaccgatggatgagtttgtgtccctttagtatgactggacaaaaagaaagtggaaagacatctgatataaacttttgaggttttgtttttgttttttaaagaatggggtagaattccatagctacttaaagcttgcaaactactgcattagatgatttttttttttttaaggtagggtctcactctgtcactcaggctagagtgcagtggcgctgatctcagctctctgcaacctccgcttcctgggttcaagtgatcctcccacctcagcctgctaagtagctgggactacaggcacatgccaccacgcctgggtaatttttgtatattttggtagagttggggttttgccatgttgcccaggctggtcttgaactcctgagctcaagcaaacaaactgccttggcctcccgaagtgctgggattacaggtgtgagctaccatgcccagccagatggtttttaaggaatttttcagcctgtgagtttgtaaaatattgcaaccttaactttggtggtgttacctgatgaatccctgatgactttacagctgttgcaggcttacatcagtttagagttatggggcattattgaagccctgtttatcttccaagatagtctttattcttctttgctaaggtggctatttttagtaatctttagggaaaagaggcacaatggcagaaatgagcatgtgttattattagtatatttatgcagccaatattggtaatgctttttttttttttttttaaagactgtgtaggagtgaaaggggagttttcctttccgcctttgaggttagctgaaaatcaactgacaaaagtcagattaataggagaaaaggcataaacatttttattaacatgtatggaggaaaatcacagagagattgcccacaacccagtggggtacagatgcttatgtacccttgtttttagaggaagggagatggggaggtatggatgattttacagggctagtaaatgatttttaaagttattcagtgggcttggagaatatacagtggtctgggacaaagttttttgggcctacagagcagatagtggtttgtgacaaaagtctgtccaggcccgggtgtggtggctcatgcctgtaattccagcactttgggaggctaacgcaggtgaatcacttgaggccaggagttcaagaccagcctggccaacatagcaagaccccgtctctactaaaaatacaaaaaattagttatgccacggtggcgcacatctgtaatcccagctacttgagaggctgaagtgggagaatcacttgaaccctagaggcggaggttgcagtgaggtgagattgcgccactgcactccagcctgggtgacacagagagaccctgtgtcaaaaaaaagataaaagttactcccaagcactggcatagtgcagtgtgcaatatatatatatatatatatatatttttttttttttgtttgtttgtttgtttgtttgtttgtttttaagaatattagctgggcatagtggcacatgactatagtcccatctaccagggaggttgagactagaggatcacttgagcccagtaggtcaagggtgcagtgagctgtgattgtgattccagcttgagcgacagagtgagtccctgtctaaaaaaaaaaaaaaaaatcatcaggtgtattgacatacttcagtctctcttcctgcaatattagttcagttaatgaaaactcggggaagggacagagataactattttcttctttggcaggtccagatttaggcagataagggaacttcagagaacaacttctccctgtgctttgggggtggtgaggggatggtcagagaggccttgaggattgtacagttcagcatgtcaaagtgccatattttgaggtatcggtttctgggcctcaacaactgctaataagaatgattgactttggagttgccttggagttatttcaaaaagtgaaaatgttattgtttagcccacactagttatcttagttgtcatttgtgttttctacaatctgccaatggttaaacctggcatttctatcaagaaggaactctttttgcttccagagtaaaggtatttttattatattaacccttgaaatagatccagttatgtattcactttgcgtttgtttctgaacaaaataaacctgtgtggtaagatggaagtgggtttttcacttacaatattagttacttacatttgtaccttttttttttttttaacttcttcacatttcctcccttgccctccacaatctgataagcatctcattgatgactatgagagactaatttaggccgtgtggttataaatgagatttcaattcatttcttcttctcttaacccgtctcagaggagatatcacagggtgactttctatgttgcgttttgacacaaggacagtttgtttttgctttggctgatggatggggcagctctagttgatgaatgtggtttatatgctcacaggcagatgaaagtgtccactctgccctgagaccctctcctttctgcttagtggtgttatgaaagccccatgggtatttgatttttcaagaattaatcagtacacagaagttgaaatgtagaccaaaggaaagaatatgttttttcagttaggctttttgtctttttttaattatatggggtttaccctttgtgtttcccaactcaggggtttcactattaaataattgtctttgactcttaaactttttaggtaaaatttatataccaggaaatgcatagatattaaatatacagtttaatgagatttgatgaattattataaccaccaccttaatcaatagagaaaatctctatatcccagatagttcccttgtgcctctttccagtcaatctctagacacatttacttgtataataaaaagattttgacatacccaactacaaaatgatcagatctttgtttctgtagcaatgggtagaataaaataaagtaggatttacttaaaactaatattttctttgtaggcaggcctgttgttacaggtagaaggtgctcaaaagctggtttcttaactaatttatggattatttttattttttatttgttattttgttatttttaggtttttttttttttttttttttttttttttttttgtagagacagaggctcactgtgctatccagggtggtctcaaacacgttggctgaaatgatcttcctgcctcggcctcccaaagtgttgggtgtgagccactgtgcccagatttattttattttattctgtttttttagagatgacgtcttgttacgttgcccagacaggactcgagttcctaggggattctcctgcttcagcctcctgagtagctgggactataggtgcacaccatggtgcctagcttaattaatggagtttttgataatggttgacaaagatagtggtaagcaaagcagcccttatatagactttacatcttaaaacataatcccctatgtgtgaaattgagaacagctttctagaataataaacagagatctgtatgctaactaaaaggcagagagaatattggctcagccaggccctcacttttttgttcctccctatctgtaaaacatcatttacctcatcagcgtgctacggacatgggttaatgtttggaaaattctgtggaaagagtggggttctgacaatgtgctctgaccaaggcagtttagcaaatttgtactaagtggctgacctttgataagcaccactccttccccacctgacctgtgattccatttttcttttgtgcaaatagttctgaaggtttaatgtttattttttactacgatgcagtagactttcttctctcgtgtagaaactgctcgaatgactgtggatgactcctagaatataggaataacagaattggtttctcctgtactctcaacacaaaatacttctgtgaccaaatgtgtgggagtgtgtccccacacaccaagcagtcaaccagttctgcagcagctgccagctggtgtcctctaatgcagttcagttcagttcagttctgacactgtctacctggagatagcgtcagatctcacagattgagggctcagtcccacaagtctgtccccagtcttcagtgccagtcacaggctccaggtggttttacctgtgcttctgacctgctggctataaactggtttcccaatatccccttattgggttccatgaaattgttagagtggctcacagaactcaggaaacatactgaccagttcattagaaaggatgttttaaaggacacaagtgaacagccagatgaagagatacccagggcaaagcctggaagagtactgaacgcaggagcttccatcccggtagagctggggtgcctcaccctcccagcaagtggatgtgttcctcttcactctcctggatgcccccttttaggtttttatggaggcttcattaggtaagcatgattgattaagtcattggccattggttatcagtgcaaccttcagcccctctcctttccctggaggttgagggtggggttttgagttctaactgtatgagcacagggttgattcccctggcaattggccaccagtcctgtggttatctagggactttgcaaaaatcatctcattaacataagctcaggtgtggttgaaaggggcttgttataaatagcaaaagactgtcttttgcttttatcactctggagctgttcaggaaccagtggcaagaggccgaatacagtattttaaccaaagtcacttaggaaattacaagggttatataggagctttaagccaggaaccatggagatatatgtatgtgtatatatatatgcacatatacacatacaaatatcaccgcgacccatgatgctcttctcaagggcctgtgccttctgataaacggctgagttggctgttacacttactttttcgagcaaatgaatgtgtagtttcatctggctcattcgtcaaaccccgggtttggaaggttgtatgtttttatttagctagtagcagttgatgtggttgaggtggggcttttctttggggaaggtacagctttgaatggctgttatctttcaagtacaaatagtgtagctccttatggctcaatagtatcaataaactgttttatttgctttccttttctcttcctttttttctttttttttaaacggagtctctctctgttgaccaatctgaagtacagtggtgtatctaaactcactgaaacctccgcctcctggattcacggtgaaatcccgtctgtactaaaaaatacaaaaattagccgggcgtggtggcacgcgcctgtagtcccagctactcaggaggctgaggcaggagaatcacgtgaacccgggaggcagaggttgcagtgagtcaagatcacgccactgcatcccagcctgggaaacagcgagactctgtctcaaaaaaaaaaaagaaggggttgactgccaagtttaaatattggcaggagatgaggagatttcagtttttatggagctttgttaatgagccgtgactgtttattacaagacttttacttttaaaatttacttagtaattatttactcataaaacagctacttactgtaaccagtaggtcagttctactcttgaggcttcacatttcttcatttgtaaaattagtacttgtattggtgtccattccctttctgaaattctgtgatatatacatttcctttaaaatgttacaattgaaaaaaataaagttacaataaagaccgtgtgcggtggctcaccctgtaatcctggcactttgggaggctgaggtgggtggattgcctgagctcaggagttcgagaccagcctgggcaacacggtgaaaccttgtctccactaaaatatgaaaaattagccaggtgtggcggtgtgcacctgtagtcccagctacttgggaggctgaggcaggagaattgctagaacccgggaggtggaggttgcagtgagctgagatcatgccactgcactccagcctgggccacagagtaagactctgtctctaagggaaaaaaaaaagttacaataaaagccaggtgcagtggctcaccctgtaatcccagcactttgggaggccaaggcgggtggatcacctaaggtcaggagttcaagaccagcctggccagcatggtgaaaccccttctctactaaaaatacaaaaattagccgggcatggtggcaggcgcctgtaattccagctactcaggaggctgaggcaggagaatcacttgaacacaggaggtggaggtttcagtgagttgagatgcactactgtactccagactgggtgacggagtgaaactgtttcaaaaaaaaaaaataaataaaataaaataaaaacaatgatacaataattcagtcttgtttagagttgccattttctgagtgttctggccatagcatttcttcttcttgcctccttcccagcaacatttgcccacttgctgtggactgcagttaattaggctggtttggagctctttccttcctgttccatttgtgttacacctaaagcatctcatgaagatgatttagattagttcctgccatcaaagataatccagtttaggatgaagtcaacagtattttaagggtggagttctcttttggaactgtcatttggtcagaattagtgaatgctgttgtagagctgacccctgcacaacacaggtttgagctgcgttttttctttttaaaacaatccacttatatgtggatttgttttcatcccaatgctgatcaaaacagtggtatctgcaggatgtgaaacctgtctgtacagagggccaactttttgtatatgcaggttcctcgggggactgcaggacttgagtgtgtgtgtaatttggtgtactcaggggtccttcctggaaccagtcccccagtataccgagggacaactgtgttgagatatcagctgcgggtttccccccaagctgttactcaattttcacattatctggggtttcctctgttctcatattacccccgaagattttataccaatttagggacatcgtgttttccaaatcctaaatgaaaagcaggatatgaagtgttcgtattttcatgttctatggtatttcctctcatgctcgatttatttatatctaaaatcatgtcatgtaatagtatattaataatgctatacatttggtactttgccattcataaagtgtttttacaaatattgtttaatttgaacctcatgataagctatctagacaggtattttctcagacagatgaggaaactgagatttatagagattaatttgttcaattccaagtagctaattgaaatccatacgacctttctcatttataggatttgtagatcctacctcctttaggtgcaaaggagttgtataaccagttttttttctactagaatgatgacctaatcaggagtaaatgacttttacttcatgtgtgacttcttcatactcacaggtactttgattctttcaatgtgtgttacaccaatttgatagtatcttgccttaaaaaaacatttgttttattgaatgtttactatgtactaggcctgtgcttagcactttcaaaaacctttttgttttgaaagaaaagaggtatactgaaaagtgtataataaaatacacagcttaatgagctgttataaatactcctatatacaacacacagatcaagaaatagaacatttttagcatgcctaggagccagctttttgtgtgctgtgtccaatcaacatgctaactttttgatattcacttctttttcttcttcttatttattattatttttttagagacagaatcttgctctgtcaccctggagtgcagtggcatgattatggcttactgcagccttggcctcctggcctgaagtgattctcccacctcagccttccaagtagctgggactataggcacgtgccattgcactcagctaattctttgcttttctttattgatttacttcctaaacaagcatctttaaacaatatagtttgcctagtttttagcgttatataattggcattacacaatatgtattctgttgtatcagcttcttacatcctgttttatatttttctctattatgtgtagcagtagtttgttctttttcattgctgtatagtattccactgcatgaatatgccactatttcttcattctattgttggtggacatttgtgggtgttttcctgtttggggatactatgaatttgcagctgagaacatttcctcaccctcccagctttattgacgtacagttaacaaaatttgtgtatattcaaggtatacgccatgatgtcttgatagatatatacattatgcagtgattaccataacctaactaattaacataaagaacattattttattttttaaattaaaacaattttttcggagacagggtcttgctgttttgctcaggctggtcttgaactcctggtgtcagattatcctgctgcctcagcctcccaattagctgggattacagtcatgaaccactgtgcttagctcaagaactttcttatgtgtttattctggcacatctcagcacatatttgtgttggggatatacccaaaaatagataggtcatgggattccttccttccttccttccttccttccttccttccttccttccttccttccctccctccctctctccctccctctccttccctccctccctccctccctccttccttccttcctttttttttcgcagagtctctctctgtcgcccaggctagagtgcagtggcgtgatcgcggctcactgcaagggccgcctcctgggttcgagcgattctcctgcctcagcctcctgagtagctgggattacaggcatacaccattacactaggctaatttttgtattttttgtaaagacggggtttcattacattggccaggcttgccttgaactcctggcctcaagtgatctatctgccttggcctcccaaagtgttgggattacagatgtgaaccatgatgcctagccaggatttctttatcttcagtttattagctactgcccaacttttttcttttttaaaagccagtcaaatttagcaatggggggttgtataccaactttagtgacactaaagttaataagttctgataacccactaccataggaccagcctgtcaaacatttttctaaagtggttgtaggctgggcacggtggctcacgcttgtaatcccagcactttgggaggctgaggtgggcggatcacctgaggtcaggagttcgagaccagcctggccaacatggtgaaaccccgtttctactaaaagtacaaaattagctgggcatggtggcacatgcctgtaattagtttgggaggctgaggcaggagaatcacttgaacccaggaggcggaggttgcagtgagctgagattgtgccattgtactccagcctgggcaataagagtgaaacaacgtctcaaaaaaaaaaaaattagctggacatggggttgtatgtctgtaatcccagctactccagaggctgaggcaggagaattgcttgaacccaggaggtggaggttgcagtgagccaagatcgtgccactgtactccagcctgggtgacagagcgagactctgtctccaaaaataaaaaataaaaataaataaataaagtggttatagcagtttaaggtactcaccagcagtataggtgagttcccatttcttcagatcttctctaacacttgctgttgtcaacttctaaatttaaaattttaaaatttaaataattaaattaaaaattcctaatgtagtaggaatatagtggtatctcattgtggttttagtttgcatttctctggttaacaataggagcaccttttcatgagtttattagctgtgatattcaagtcttttgcacatttttcttttgggttatttgtcttttattgacttgtggtagttcttaaaaaaattttttttaaattaaaaacttttgtgtattttggagacagggccttgctcttttgcccaggctggagtgcagtggcgtgatcacagcttgctacagcctcaacttcctgggctcaagtgatcctcctgcctcagcctcctgagtagctgggactaaaggtgcacactatcgtgatcggctaattttcatatttttagtagaaacagggtcttgccatgttgcccaggctggtctcaaactcctaggctcaagccattcacctgcctcggcctcctaaagtgagagattccaggtgtgaactacccacttaaaaatcgttttaatttaaaaaataaaatgaaaagaatgttcttcatgttaattggttaggttatggtaatcattgcataatgtatacatctatcaaaacatcatggtgtatgccttgaatatatacaaatcttatttgttaataaattgttgaggaaatacctggccggtagttccctctatattttggagatgagccccccttttttttattgtacttgttacagatatcttttttcccctctgtagcttgtcttttccctgttagttgtgtcttttgataaataaattcttaattttaatgttgtaatgaaatttaatctttttttctgtatgattagtgctttctgtgagttatgacataaagtcataaagataatctctaatattatcttctaaaagttttattgctttgcctttcacatttagatttcttaagggctaaaattattagataactaggtattagttgattatatgtaattagtaaacaaatatttattgtgacttcagctatgtagaagagtcagtggtagatactaagagatgtaagacttggttcctgccctaaaataatcaacattctgtttgtgtaagtaaggcccttggcatcagcacgatgtaatagaaagaacactgactggactgggcctggtggctgatgcctgtaatcccagcattttgggaggctgaggtgggaggatcacttgagcccaggaggttgaggctgcagtgagccgtgagtacaacactgcactccagactgggtgacagagcaagaccatcctgtctcaaaaaaaaaaaaaaaaaaaaaagaaaagaaaaaaagaaataaaacacacacacacacacacacacacacacacacacaccctccccccccccccctcagaatctggagacttatatccatgtccttttggggacctggctgtgacaccacctttgtgattttagaaatctcctttccttctctgggtctcagttttatcagtaaaataagggattggcttaagtatgtagttcttgattttggttcctcagattgataaggggtctgagtagatagcactggaagcattttttttttaaagctaaaagtatacatttttagccatggtgatgccacacaggttaaccaaaaaataaaatatctttgcttttaactggagtcgtgtgtcctttctgtgtgagaactgagtttaacagctttgatttacaataaaagttttaacttagtttttcaaaaaaatacacttcgtttattgataatcccagtttggtatacaaagtttttttatgtttttttgaaatggagtttcactcttgacgcccaggctagagtgcagtggcacaggcttggctcactgcaacccctgcctcctgggttcaagtgggtcccagcctatctaggattataggcgtgtggcaccatgccctggtgattttttgtacttttagtggagacgaggtttcaccatgttggccaggctggtctcgagctcctgacctcaggtgatttgcccactttggcctcccaaagtggtgggattacaggcgtgagccactgtgcctgaccttatacaaagttttaaataacatggccttctgactttaacttagaaaccaaagagtggtaggagtagggggaaggtattaaataacagaaactatctttggtgattaaaaagttgggtacctactattctaataacttttaagggctcttctgtaggttagtgtaaaagtaattgtggtttttgccattaaaagtaatggcaaatggcgggcgcttgtagtcccagctactcgggaggctgaggcaggataatggtgtgaacccgggaggcagagcttgcagtgagccgagatcacgccgctgcactccagcctgggcaacagagcgagactctgtctcaaaaaaaaaaaaaaaaaaaagcagtaatggcaaaaaaaaaaaccctaagaatttcaatatattatgagtcagtgaaaatatagtatttgttgttttgtttccctaagtgcccaattgagagatctggacaattactattatagagattgtgaggatggacagagaaccttttgttgactgaggtagtcaaagaaggaaggctaccagggtgagctaggattgagcagtgagaaggattgtttctatgtatggagaaaaatgggaaagagggaattgtggacagagcagtgtaagcaaggatacggaaatagcaaagtacaggtcatttttagggacagaagatgaatcagtttagcattagaagatgatgaaaaagtagtctgaagttaaagtatggaaagccttcttcaaacataaggtcaaatacagctttggaaaagttaacagttacaagtatgatggtgtaatgaagattctagttcttctgtaagccaagcaggggccattggctttaggatgccctctatgctccaatataatggtgctgcctggcatcattgaaaacattaaaaaaacttttctaaaaagtatttgaggactgggcatggtggctcatgcctataatcccaacactttggaaggctgagatgagagaattgcttgagtccgggaattcgagaccagcctgcaacatagggagaccctgcctctacaaagaaataaaaataattagccaggtgtgggggtacatgcgtgtagtcccagctacttgggaggctgggaggatcacttgagcttgggagatgaaggctgcagtgagctgtgatcatgtcattgcactccagtcagtgatagagtgagatcctgtttctgaaaataaaaagtgtttaggggataaccagattgggcttgtattgatagccagaccgccaagcaggaaactttatgtatttattttttaagagttggagtctctttctctctattgcgtaggctggagtgccacagtcgttgggactacaggtactgccaccatgcctaattaaaaaaaattaaaagatggggtcttgctgtgttgtccaggctggtcttgaactcctggtctcaagcagtccttctgcctcagctccccaagctcccaagggagtataggcgtgagtcaccatgcctggccagaaaccttattttgtggtagttgttcagctataccttgcagaattttttatgtgaatcctcagtaaatcccaaacagcttctctcagtactaacacatggctgataaatggtactgaattctttgtaaatctcaccaatctcaacagaatttctggttcggggtaaaaaaaaaaatttccgtttaatttctgtagaaaataaccactcagaatccactctctgttatgtgtaacaatggacagaaattttactgttgttggtacaaaacaatgactcatcccaaatcatctcttggaattaagaatgtaatcgtaatacactcatactcatatgtacgtgctcagacagtccctttctgcctttctttttattaccccttctcactccgctgtggtttagcttgactaatctatttgcagcacatcagcatccttaatgcagaaagtttgcagcttctgtttacagggggaaaaaaaaaggagtgtggagattgcagatttcatctcttttttcttcttttaaaatttataatttccttttttcaggaggagggtgattattttcgtttttgtttgagacagggtctcacgctgtcccccaggctgtagtgcagtggcgcaatcttggctcactgcaacctctgcctcccatgctcaagcgatcctcccacgtcagcctcctgagtagctgggactacaggcatgcgccatcacacccagctgatttttgtagcttttggagagacaggatctgtccatgttggccaggctggtctcgaacttcagagctccagtgacccagccacctcggccttccaaagtgctgggattacaggtatgagccaccgtgcctggcctacattttgtctctgacatttctcaatctaaagtatatgtatatgtacatttatacatatgttatttacatatatttttttctttaaaaaattattttttggtggactgagtcgctttaattaagactcagtcattttaatgaagtggggttatttactttgaccttcctccccaggaaatagcacttaaatacttaaaggaaaaattaaagaggaccaaggccatggtggcagggactgggagcatggtggccatacagcctgataagccagcagagaagagtcccacagtaaactgacacaaccctggtgatgtaggtggtttaggcacagaaaaaaggaaagtcagatttgagtaccctcagcaggccttgtactggtcacccccaatacccatgagaacacagcatcctagtcctccctggcttatcggtgctctccacatgggggatacctgtcacagcttttattccaggactggggaagtcacacttttctgcccaccccacccattgttttgcagagaagaatctctaaaaccttcattactcatgctgaaagtgctataggtatttggaatgggagaatgggaaagagtaaattctgaatgcattggagccttaatttgctgccctttctttccttccctctctcatcttcatgaaggagggcccattgtgaataaggaagaggggaagcctgtctgggagaggctttttgggtactgggcttcccaggaagaagccacttcccaccgtccccttgatgatcatgtgacccttttctccatgcagccagaatcagcttctttggggatgaactggtaatagatgttgtcgttagtgttatttttaaatttttagatatttttttccagatgcatcttcaaaatgtaggctttggaggttgataaggttttgtgggattggtaagtgttaatctagaagttgggcagtaaacaagaatagtaccttatcagcattaaaacaaagcatctgaaagaaatgtttttgaggagtagttgaatatttagttggttaaaaatttagactcagaaaattttcaggaaggtgataaagattcactaatcattaagtagggaatctcttaaaggttttatattgatttgatacattagagaatgctataataatagtgtactttgattggtggcctataaagtaattgtgccttttatggtatttatgaattggttatattttaaacaataaatcttgacttttgcgtcagagtttctctgttttgttttttgtttttttttttgagacctgctttgtcacccaggctggagtgcagcagtgctgtcattgctaactgcagcctcaacctcctgggctcaagtgatactcctgcatcagcttcctgagtagctgagagcacaggtgcgtgccaccattcccagtgcctcactttaggctaagtttttcattttttgtagagacagggtcttgctttgttgcccaggctggtctcgaactcctgggctcaagcaatcttccctccttggcctcccaaagtgctgggattacaggcatgagctatcatgcctggccctgcatcatagatttttttttttttttttttgagacagtgtctcactctgtcgcccaggctggagtgcagtggtacaatctcgctcactgcaacctctgcctcctgggttcaagtgatctcctgcctcagccccccaagtagctgggattacaggcgcacaccactacacctggctgatttttgtacttttagtagagatggggtttcgccatgttggtcaggctggtcttgatctcctgacttcaggtgatccacctgcctcggcctcccaaagtgctggaattagaggtgtgagccaccgcacctggctacatcatagtttcttaaaatcaccaactgttatctatgttttcctattttaattagtctaatttttaataatttatttctgggttagtttctgtacttttggtagaattgcagactcacaacaggcttcaggaaagtaattttaccaaatgcaaggctatttgcaatttagttttctgattcagaagccataactctgtgctggatttgattattcattatttaaccaaacatttttcaaatgccttccttattttctgtcttaactgcgtagaattaagcccatttccaaaaggattttgaggtaattctggagtttgagattaatatttttaaaaagaaaccagagttcattttctgcagagaaagcttttaatcaaatatacatatagtaccctgtgtccttaattgaattgagggtttgacttttctccatgcagaattcgagttgatatttttgtagtttaggagttttgacttttctcttttgcctttatgttaacaaacttgtgagtttgcaaggttataatagaaagagtatatagggtttggagtcaggaagtcctaggttcaaattttagcttaatgagcaagttacttaatttttccaagccacaggttccccagctatgaaatggaataatattacccatctattggggttcttgtggggattaaatcagatgaaagtgcttagcatagcatataaatgttagtttattttcctttggcaattatttaggctttagggcaaaattgcctacttgttttggaatgaacccaaattttatggttaattttaggctttttcttcagttagacttttgatatgtctaactccttcccaattttttttttttttttttttttttttttttgagatggagtctctctctgttgcccaggctgaagtgccatggtgcgatctcagtttactgcagcttctgctacccgggttcaagcgattctcctgcctcagcctcctgagtagctgggattacatcactatgcccagctaatttttgtatttttagtagagatggggtttcaccatgttggccaggctggtctcgaactcctgacctcaggtgatctactcgcctcagcctcccaaagtgttgggattacaggcatgagccagcacacctgggtggcagtgcattttttaatgaggaagattgaacaacttgacagaagggtgagctcatattctgaactcttacagttcatctaatgtcaaatttctagaaaaaaattatctaaatctaaaagttagtatgacactccataacattaattgtgagtccctgagggggcagctataaagataaaatggagtataggatcccccaacacacataacacaaacgcttgtgattgagtgtgcattggcacatgtacacctgtgtgctcacccctcctctcccttccttcacctctatcatgagtacaggtgtgttgctttgaattggtgaggagtgggaaagagagtccttttggtgacaagaaagcaaactggttttatttagttcaccaaaatattgttttgatccttttttgtttgtttgtttgttttgagacagagtcttgctctctcacccaggctggagtgcagtggcgtgatcttcgctcactgcaacctctgcctcccaggttcaagcgattgtctcacatcagcctcccaagtagctgggattacaggtgctcaccacccagcccggataatttttatatttttagtagagacagggtttcactgtgttggccaggctggtctcaatctcctgacgtcaggtgatctacctgcctcggcctcccgaagtgctgagattacaggcgtgagccactgtgcccagccgatccttttattttcaatataaaactgttgctgtaagcacgagcatgtccaaagggaacaccatgggatagtagtgaattgagggtgataatccagttttgaggcttaagtctgcaattcctggattaatttggctgctctgttattggtggctttgctaggatcattttcaaatcactttattttcctttatggtaagtgtattaatagtatttaataacaagattaatctgggccaagggctttcctgtgaaagttactattttcattatgggagaaaaatagagcagcatggccagtgtgcatttttgttatcccatccttaggtaagtgagtttagacagcctgagctaaatacctagatttgcaaaaacacctcctacccccatgctttccttttaccatttaaaattgtttgtgaagatcttttttttctttctttctttcttttttttttaaacacagagatagggtctcactgtgttgtttgtttgggtttgcaactcctaggctaaagggttcctcccgcctctgcctcccaaagtgctgggaatacaggtgtgagccgcagtgtgcagcagcttaagtttctgatctccctcaccacctcgcactttcactcctcataccccttccttgtttaatagaaggatcctttgttttgagtagtctccaagtggagtattttggagagactttgaataaatcctggcccaagcctgatcacaacacttggacattgagcttacctgcattctgctgttgggtagatatggaatctctgcccctcttgatcaaagctacatagcccataaggaaacatccattgagcagccttctttcctttcacttaatcaatttcaatgtattgtggtagaggtctttgtgatattccattttagactatatgatctttaggaatgcttaaccctgctgtgccaaagaccaggggaaggctgtgtattcaaactcatttgttctctgcttttttctttttaattattagtagttaactctaaatgaaagtatagaactgtttagtttgagcaaggaacactatttgttggcctctgctttctgttccccttccttcccttccctccctttactgtggcatcatgattcttccttcctgtattcttggtcattctcccagcacctcactttagccctacagtggagattcttctgttcactaataactgcagtggtgtcagtttcagtagatcagccttcgtcttcctttgcttgaatggagtgtttaacatgctggatatcctgcctctttctgctgaagcatctttcctggggtcattttgacttgctgcttatataactattatgtcctttgggtttgtgatactttatattatcaaaagcagcaaaagatagtaatagaagtaagatttttattactctcattctatgaatcagatgttattatcccattttagagataagtaaattaagagagtggttatacctgaagttccagagttattaaatgacatgactggattcaaacccaagagagcctgacttcaaaatctgtgcattgatctctactgagtctgaaggttactgacccagtgaaccagtcactgttctgtttctaagaaacgtttaggttctggctcttgcagggatctttatagtcctgtatttgcaaaaacacctcccacctccatgctttccttttaccatttaaaaatgtttgtgaagatcttttttatctttttttttttttttttttttttttctgagacggggtctcgctctgtcaccaggctagagtgcagtggtgcgatctcggctcactgcagccttcacctcctgggttggccaggctggtctcgaactcctgacctcaggtgatctgcccgcctcagcctcccaaagtgctgggattacaggtgtgagccaccatgcccagcccacattttgtttttatattctgagtattatatagtaaaaaaggagaagagttcattgatacagtcttttaaaaactgatctcaatgatatagtaggaaaaacactggattaggagataggggttttaagttctaatcctgcctggctgtgcccttaactagctgtatgagactaggcaacatttaccatttccttcccaattaaattgaggtagccgtactagatttatctaacatgcctttcattgctcacatcatgcgacattaagctttaattagaaagctttggttttgggacctctttgttttcccataggctttaaccttgtttcctttcttattgcccagcaggaattggactagagttggccaaaggtgggatgaggagaagaggtaggaatcttacaagagttggttggagtaaagttattgacaggtgggaagaagtattcctgtgactctgtggttgttcccttgtaagatttgaaggaaagtaatgagtcaggtcttaataatagtgcctctatgttatttcctccaccccattatcttttgtcagaattgattagcaaaatgcacttacccaagtattttcagggtccctgtttggatagtctaaataacgttgttctttttttttgttttggagacagggtctcactttgtcacccaggctggagtgcagtggcacaatcttggcttactgcagcctcgaccttctgggctcaagcaatcctcccacctcatcctcctgagtagctgggaccacaggtgtgcaccatcacgcctggctaattttttgtattttttgtagagatggggtttcaccatgttgcccaggctggtctcaaactcctgggctcaagcgatctgcccacctcggcctcgcaacatgctgggattacaggtgtgagccactgctccctgcctttagttacctttatcaacctatggtcctaaaggtagattcattgaacttgcctgtcagtgcttaaggatcagtcctgtcttagttcagacaagttaaattcagggttgcattctgtcaactttgtttctaatcagtggatgatcagatgatatttggagaggatttttaatatatgtgaatcttatggtggcattctgttacttaataaatactttaatttcttagcttttttccccatattctccataatttttgtagatagatgctcagacgaaggcagcagtagcacatggataatcagagttttttgtttgtttgttttaacatttctcgttaaagtataatgttcagcaatggggaccaatctatactcctcatctgtagtctgtcaataaataggttgctccgactttaaattctcagcttgaattgtttcttttttgtgtgtggaatttatgaccctctgtgatgttgaccctacctaaagcaagtagaatagctacaccagcaaaatgaaataccataacaacaacgtatgcttatgtttatatagtgcttactgtgtgcctggcatggcattgaataaatatatatatttaataaatagagttggggtctcgctttgttgcctaccttgtgttgaactcctggcctcaagtgatccttctgcctccgccccgtcaaagtgctaggattacaggcatgagccactgctcccagccagcattgaatatatttttttttttatttcatcctgagaacaaccttatgaggtactttcaggtcatacttttattaccctcattttatactagaaaaattgtgctttaagatgttaagcaaattgcccaaagtgcaaaaccagtgtgttggagcttgaattccaaaccagatctgcctgagtcaagcttttcttttatgttcttatttactaaaggcttcttgaacagaagtatgtgagagttgggcacatgcagcttggtcaattctatgtaaacccggtcagattctgagtagtgtagatctgataaagtcaatgtgaatttcttatcattcgttgcaagagacttaatgtagcaaaaatcagtatcataggaaacgagatgttactgtggtaggcacactgttctctctcagctacctcatttttgttgttattggtggtggctattgctctggcaactacaaaggcagcatttacttgacacggcgtgtatgcttaaggcagaacactgactgcttttcattgctggcaaatccggacttcatcagtactggctacctgtaaggaatgtgagcatgttggattttagaacaggaaaaacacaacttccacctcatttcacagtagagttcacttagggatacagactttttggtgacagtaactgttactttctgcttattaattcagatacttgcataatgctaacctggtagatattgtcagatgacaagccttcctcctacatgttctctataaaagaactgctagtgacaagcattttattatattaaaaattctacttcatactgttttaagttaaaatgtatttattatgaagccaatattgtgaaatgtttttttctttttccagaatgtggtttttttttcttgtaatggactaagatgcaggcttattgtgtagaatgaggagctattgcccagatggaccttagtgaaagtaacttaaataagcaagtagattttgcttctgtttgggaaaatgatctaagacggatgctggtattttgggcaggtggagactaatgttttatctcaatgtttgcaacttaagttcagcctacttaagggctgtcccttaagggtgtccaattgtttggcttccctggccacactggaagaattgtgttgggccacatataaaaatacactaacactaacaatagctgatgagctaaaaaaaaaaaattgcaaaaaagtgtgataatgttttaagaaagtttatgaatttgtgttgggccacattcaaagccgtcctgggacgcatgtagcccacaggctgggttggacaagcttggtctagaagttttctagattttactacaatgttcaaatggcaaactttaaaagtggggaaaggaattttgggtgagataaaaagacaggtttgaaaaagcatacaagttcagggaactgcaaatggtttcttaagaccaaagcgcaatgtcagtgtgaagaagtggcaggcaatgggaaaggataaatcagtggagcccagacaatgaaggagctttgtacttgatgctgaggagtgtggatttgtttctgcagataatggggaacttctgatttttctttttttaggtggacagatagaatcaagtttgcttttgttaattcatgtgacaatgtagaaggtggactgaaggtagggagagtattgtattcattggagactcattaattgttagaagactattgtaatcattcaagcaagaaataatgacctaggccaggtacagtggttcatgcctgtaattttagcactttgggaggccgaggtgggagaatcgtttgaggcctggaggcagggtcttgctctgttgcccgggctggagttcagtggtgtgatcatggctcactgcagcctccaattcctgggcttgtgattctcttgtctcagcctcccaagtagctgggactatagacgtgagccactgtgcccagctcaaattactttattttaaattttttttttttgagatggaatcttgctgtgttgcccaggctggagtgcagtggggcgatctcagctcactgcaacctccacctcctgggttcaagtgattctcctgcctcaacctcccaagtagctgggaatataggtgcacaccgccatgcctggctaatttttgtagttttagtagagatggggtttcaccatatttgtcaggctggtcttgaactcctgacctcaggtgatgcacctgccttggcctcccaaagtgttgggattacaggcgtgagccactgcacctggcctcagattactttttatacattgaaagatgacctagaaattagtcaagacattaatttagatagtcatacagtcaagtgacataaacctcagagaagaggaaggtttccgtgctatcgccccacccactagagtggaagaactttgagggagatagaatagtgatattataatctagttcctatagataaagaatgtttgccaagaaggttaacttctgtagctgagctcctttgctgagaagatgaaggaacactgtttaatggatagatttagtctgtgattctctgtggaggtgattactgtcagttctctttatcctagcagcatttggaaaactgcagctaagcaacccgtcgtcatttcctaatgttactataatctggtgtcaatgactaatgatctcattgggctagttattcccttccagcgatgctggcatcaggaagcacattaatagtctgtaagaaatgcattcattaaaaaccaggtaatcactttggagctggtcctggcagtgtctgaataaattggacaagttagagaaaatcttgaacctgaaagctactttgtctttcagcttggtttgggcaaggtaggaagagatgaatcagttataatttgatgggatctaatgttacttttataagatacatcactttaatatgatgcttcatcattaatgttttagtaatctgacagcattagacagaattgatattccccttattttattatttcttggcttcatgacagaactgtgcattaaaaggcacttaagattttaaaagggatatctaagaaagtggttaaaaaacaaacaaatcccaagtggcttgatctgacttacaaactctaacaatgtgtagctaattgcagatagattttattattcacagtattgtgtcaagtctcctgtgcacatcttctgtattggagcataagtaatggagatgttatcttgcccaacattaggtttgaggaagtcgtttttaagacagaaatagtagaacagtgttattccatactgtactttccccttttatataagcttgctaaaattaaggttgggcaataggcccttgagctaaatgtgacctgatagaaagttttagcaacaatgaaaaaaattataactatctaatatacatatctaatattagatatttaccttacttacatatcatgcacaatcaaacaaatggcaattataactacattcttttttacttgccataatggaaaaactttattaaacaaattatgcccactgttgctctgggatttggggactaggtaggcatgatttcaatggaaaataatttagtaatggtatgtctcaataatgtatcaacaacctggaaagtatatattctttgacttaggattttcatttctaagaatttgtcttatagaaataatagtaggtcaaaacaagaatgtagtcataagagtatttactgcaatgttgtttagaagagggagaaaacaaatgaaaatgggctgggtgcagtggctcacgcctgtaatcccagcactttggaaggctgaggtgggtagaccacttgaggccaggagtttgagaccagcctggtgaaaccccatctctactgaaaaaacaaaaaagaaaagaaaagaaaagaaaacaaaatgccacaaaaaacaaagagatgaaaatgaaaagagatctcacaagacatatgaatatgttgcacttcaaactgatgcaaacaggtgtccatctaaattcaatagtgggcagttagaatttgaaacttagttgtcattgatgattgccctgtgctcagaggaatcacagattaaaaaaattttttttagaaagaattgaagttgagtttcagaaaagtcagacatttaagtttacaaccgtagttggagtgcaaacacatatatgtcttaattacaaaatgtctgttctgttagtacaacttagcataaagaagagatggacctacaagtgaagtatatcaactgataagaaacaaaatgctttaaaactttggattcaaacctatgattccagaactgttctaacattttaaacaatatggtcaaactctaggcaagtttggttcccttgtgtttgtgaaactatatttttcatacatcttctgaagtaaaaactaaacactctcattagttgtttaaatctggaattggatttggaatttgccttgattttatatacctttgttcttgaggctacctgtatttgtcagttttatcttaacttactcaaaatgggtcacttagtaaaaataattgtctaactatacacttttagtttgattaagctttttggattagtttgggattttgactaagtttctatatttgtatgatcaataatttcatacttatagtaaacaaaaatttatatatctgtactcctatagatttatgattctgtggctctaaaaatttcagtgctcttagagttgtggaaagagcagagcactagattaaatgaaacctctgtgtgccaggccctagctgggctttctcgaggcattagagtgataaagttggttgaggaaatggtgaaagccatacctttgtcctgccattttttttctttatgagatcatggttgaagtccctgactctcatgatagtgaaattgagattttaaatatttgtttctctttacatcccaaatccattatagctaagaggaggaatttcagatatttttccaagagcggttgtcaattttttttttttttttttttttaagacggagtcttgttctttcgcccatgctggagtgcaatggcatgatctcagctcactgcagccttcgcctccagggttcaagtgattctcctgcctcagcctcctgagtagctgggactacaggcgtgcgccaccatgcctggctaattttttgtatttttagtagagacggggtttcaccatgttagtcaggctggtttcaaactcctgaccttgtgatctgcctgcctcagcctcccaaagttgtcagtattttacttacttttctttccttgcatattggaatagcttttttttttttttaaattatcatatacactacctgtggaggtaaaaacataaactgttgttttcttggaggctgaggcaggaggatcacttgagcccaacagtttgagaccagcctgggtaacatagcaagaccctgtctttataaaaataaaaagaattactgggtggtgtgcacctgtagtcctagctacttgggaggctgagtcaggaggattgcttgagcccaggaatttaaagctgcaatgagctatgattatggcactgcactgcagtctgggtgacaaagtgagaccccatctctaagaataaaataaaatggaattaacattcactgtcaacaaaggcactcttgtgccgtttttgtccccttcttgactgtcctggtcgtatgagatctgtttttcctctaaattcattgtatactattttctttacattgtacatttggccatctctgggaaaatgttaagaatgttaatgttctcattttagtatactgatatctcacttttcagaatatcaccttcctaatctttttctttagtcattttatccagttgtacttatgtaagctaccataaactttttctgaatcaaagcaaaatataaattaataaatgtttgcttctttaatagtgtatattttattccttttatcaaatttttaagtcagtaagtactgtgatttaagaactttttatcctataatactgaataaagtgttttgatatagaatacggtacatagatgtagatatgcatttagtgccttgcatatttgttgaatgaatgattactacacatatgagctaagtcagctgtttggggtcttctttttgcctgcatctgattggcttgtcaagcagactgactgcccacctgttagacccatatgggctggctgagtatatagctagtgttttgctcagcacacctgcttgtgcgcatggattgatgtctgctcttaaactagttgccaaggagtcaagtgtatggcaaggtgaaggaagactggcagtgaagatatcttaaagaggtaatctaataataatggccagtggttcccctgaatcttgtttgctcaagttgttcacatcagagagatgtaaaattgctttcatttgggtggatttgggaattcttttttgataatgggaaaaaatgagaaggtcctctatgatattgttgtggatggatgtgcatatggtcagagaacatgaacctgttaaattttgagcttgaatacttttcattaacaacttaattgagaatagctagatagcatctattgtttattctttttataacaagtagagaaatagagaaatgtcttttttttttttttttttttttttttttgagagagagtctccctctggcgcccaggctggagtgtagtggcgcgatcttggctcacagcaacctccgcctcccgagttcaagcgattcctatgcctcagcctcttgagtagctgggattacaggtgcccgtcaccacacccagctaattttcatatttctagtagagatggggtttcatgatgttggccaggctggtcttgaattcctggccttaggtgatccacccgccttgggctccccaagtgttgggattacaggcgtgagccaccgtgcccggcctgagaactgtcatatttttaatcctgttgggtctcccccttctcctgtcactgtatttgagcaagtttatataaattattgatatttttctggccacaaaagtgcagctatatttaagataatatttttttattttcaccctcttgacataatcaagccataacatgaaatggagatttattatttattgtttattgaataaaattttgttccttcttctattttttttggagacagaatctcattctgtcacccaggctggagtgcagtggcacaatctcggctcattgcaacctttgtctcccaggttcaagcgattctcatgcctcagcctcccgaatagctgggattataggcacacaccaccacacctggctaatttttgtatttttagtagagacagggttttgccatgttggccaggcaggtctcgaactcctggcctaaaatgatctgcctgccttggcctcccaaagtgctgggattataggcatgaaccactgcacccagccagaattttgttcctttttaataattaattaattaattaattaagatgaagtctcactatgttgtccaggctagccttgaactccttgggctcaaatgattctcccatctcagccttctaagtatttgggactacaggcaggttctaccacacctgacttgttccttattttagatgttgaaaataagcaagtgaaataaaggcttatcaaagtgtacacagcactttgctagatactgtggatgatttttcagggaagatgccattcctcccctgaagaagataattattgtagagttagagctaacagacaaaatagatgatatataaatttattcttaggagccaggttgttgagaggattaagagcaatcactagacgattagaatattggggacttccaaaacatctgaagtgtatctagaatagtagataagatctgcacaggtaggaagtagggtgagccgggtgtggcggctcatacctgtaatcccagcactttgggagggttgaggtgggtggatgccttgagcgcaggagtttgggaccagcctgggcaacatagtgaaaccttgtctctacaaaaatacaaaaattagctgggtgtgatggtgcacacctgtagtcctagctactcgggaggctgaggcgggaggatctcctgagcctgggaggtggaggttgcaatgagccaagatcacgccactgcactccagcctgggtgacagagtgagaccctgtctttttttttttttttttgagacggagtcttgctctgtcgcctaggctggagtgcaatggtgcgatcttggctcactgcaacctccacctcctgggttcaagcgattctcctgcctcagcctcctgagtagctgggattacgggcatgcgccatcatgcccagctaatttttgtatttttgtagagacaaggtttcactatgttgcccaggctggtctcaaactcctgacctcaggtgacatacctacctcagcctcccaagtgctgggattacaggcgtgagccaccatgcccggcctgagactctgtcttaaagaaaaaaagaaaaaaaaaggagtgaaagtagaggtgagaagtgcctggaaaacgggacttttaaactgagcttgctgcagaggtggacacaaaaatttggggctgttttgtttgaggaatgaagaatagcaggacaaaaacagattgttttggggttggtattaataattgtataggtagcgtggggaaaacttttagagagccttaaaagctgaacccgtatgttttagtttggtgtgagtaaacgtagattcctggtgctctgtaacaggagtgtttgtcgcagtttagtccgacagtgatggcttatagtacatatgattgtggtcaagatgaggagattaattagctaatcccaaagggatttcgtgatcatttattgaatccttaccaccaagcactttttgtcatgaatcattatttcatctaaacctggcaactgccctgtgagtttgatattgttataatcctcaccgtaacaagtgagaatgctgatacccagcaagggcaagcacctttcttagggtcacaaaacgaggaaggagtagagcagtcagtgtggctccaggaaccagaatcttaaccactatgctctaaagtgtttttcagagaaaggaagattaacattctttccttcgatgtatttttttccttgctaattccctatctccttacctacaatgtggcttagtgatcttaggacaaaggtttggcttggagacttcaaagaggtttgtccatttcagactcttcaaaaacagttactggttacttacaaataacactttgtaattcaataactgaaaaatcaaaacaactttaaatagattttaaggctggagaagggaggctagctaatttcataaatttgttgaagtttgattttctttaccctagttgtatcataaataggaatggttttttatatttatacttgtttaaatatactgtttatacctgtttaaatgctaagccaacaaaagctctctgaaagaatacatgcacacaaacacatgtctgtttcgtcacggatgtgtaactcactcatggttgctcctcctgatgtctgtgtgccacacagttcggaaaaggcacttgcttggctgtcacgctgtaagttccctttgtcatttgtgacaattggtctctttgctgtacatcttttgggatgaaggattgagctcttgtaaaagcatttcagaggtttttcagctaatgatttttccgctcattctttactgtttggtttcctaggcaacccatcctccccttgcaccctgctgacgtctgttcagcccctcttcctctccactacccctcccattactcaagttgttttttcattgctgctttaggattgcactaaaggaatatacatgttttcctaaatatctgctcctctatactttttagaatatattagaaggatgggaagaaaaaaaatcatttttagaagctaagtaacctgtatttttaggtcagttataacagggtttcatccatataaggctaaatttattctgttgtttctaggttggttttcttttttaaagttaaacaataataaagaaattgttgtccatttaaaccaggaattccataattaagctattttaggaatgtaaggtgttgtataggaaaaaacagtctgaaaatggtgggcatagttgcgtttctagatggttatgctgtgatttatttttttaaaaaatcagttgtgtctgttaaaagcatttctgttactgtggggaggggtttttaaagttttaaaaatctagcttttgggtgagtgcagtggctcatgccagtaatcccaccactttgggaggctgatgtgggaggatcacctcaggccaggagtttgagacccatctgggcaacatagtgagactctgtttattaaaataaaaataaaagtagaaataaaataaaataaaaatctgtttagttgttgttcacatttggtcctttagagatacttttttgagacagaatctcactctgtcacccaggctggagagcagtggcatgatcacggctcactgcagcctctatctcctggacttaagtgaccctcccacctcagcctcccaaatagctgggactacaggtgcatggcactatgtctggctaatttttaaatttttctgtagagatgaggtccctccatgttgcctaggctggtcttgaacttttgggctcaagagtcctcctgccttggctccccgaggtgctgggattattatagtcatgagctactgctcctgacctagtgataactttttgaattccaattccttgatcctttagcatcctaggcaaagacaaccatttctgctgggtaaagcacagtgaaaagccctgcttctctgtatacaaatgaaacagattgtacaattaatatgtattgggtgctgcatggtccatcctaacagtagtgctaattgccatatcatttatttttacatttggaagtattttactttggcctcaatgtaattttgtttttttaatgctgtagagtgtatgggatataggtaaggagtggataagaaaggaaacaatagaatcagaaatagtaagaattgctatataaatgcctttccctgtaaatgcacacaaatatatgaggtgtttttttttgggggggggggtcttgctctgttgcccaggctggagtgcattggtaggatcttagctcactgcagcctccacctcctgggttcaagcaattctcttgcctcagcctcctgagtagctgggattataggcgcccaccaccacgcctggctaattttttgtatttttagtaaaaatgaggtttcaccatgttggccaagctggtctcgaactcctgacctcaagtgttctgcccgctttggcctccgaaagtgctgagattccaggtatgagccaccatgcccggccacgagttttttgtatgtatgtctaaatacgtagaaagacaagatttacccccttttttggtgtctgtaataaatttagtgatatacgtgtatgggtgtatatgtatatagatatgtatgctatgagttagaaatgaaaaacctgccataaaagcaagaggaaggaggagttaattttgcctgaagatgtcagagaaggctgcattgaaaaaatttgccatagacctggtgataggagattgaatgggccttactagctgtgtatagtggtttgtaccaaaaagtatggggataggaggggaaagtggctgggaatattggaaaatctagttgaaagataggttgaaggccgattgtgaaatagtttcacttactttatcatttaagtaataggttggttagaccttttagatcagatcagtattttgagagtatctctaatagtatagaattatttgtacttcttgactgaaactatatgttaaataatgaatttgtaacttagttattagagtgttcaaattatacctgtttctctcccttccctcaatttttagaaagcattctctaatgaggcaggggtttttgtttgttttgagacagcgccttgctctattgcccatactggagcgcagtggcatgatctcgactcactgcaaccttcgcctcccgggttcaagtgattctcatgcctcagcctcccttgtaggtgagattacgggcgtgtgccaccatgcctggttaatttttgtatttttgatagagacggggttttgccatgttggccagctggtctcaaactcctggccaccttggatccgcccaccttggcctcccaaagtgctggggttacaggcatgagccaccatgaccagccaaggcaggttacttttatattggttaaaagagtgcctgatattaaatccttagtctcccactaaccagctctctctctgaccttggatgagccttaaactttggtttaattcatttgtaaaacaagcataataatgcctacctgaaagaactgttgtgaggatttgattgaacgggataatatgtaaagcacagctcttgacacactgtaaatgtagctgaaaaatagtagtgattattttgtggtaacagctttcattgtagaagaaaattaatggaatgtgaaggattaatgattttgggaggtggaggggaggagaccttgttaagtagattaattaggaagttattggtttgtccaaacagtgcttttaggtgacaagggaattcagtgtggaagaggaggtttggtaggagaagaaaatataatcagtttagttgtagatgggttgagtttaaggtacccaaggacacaaaggtaatactgtggaggtggctgttggaaatacgaagcctggaggtacgaatgtggaagttattgctgtctggttggagatacttgtgtctgggaagagtgatcgagtgagtagtggcctattaatgttttctttttttaaaaaatttactttcaatatactgccaataaagtaatttgcactgttatactaaggtattagaccacgtattctgagttcagatttgttgcttgactcgttaatgtatgtaggttatacccagttttggtaagcctcctgacctttggccccattcacagcattatctctatctctcaaagggaaaaagaagttcattctttgaactggggagtgctctgatgttggcaggtctactcctcctcaggtctagacactcttggcctccacagtggttttattcaggaaagttctcacctttgaattgtagacttagtgcagacttgctggtagttggctaggcgggatcacaacagtgattggtattggtaagtacatgtattgctgccaagaagttgcatagttcatgtgttcagtcatagccttttctttatatgacgaccccgctgaaatacagaatggcctgctgccttctcacagaaggtctactgttccaagcttatttttttctgagtgagaagaaaaggtcttttgccactgttttcagactgaaatttaaatttcagctgccttggatcctatataataaaagattgagacacagaaattgttctattagacttgaaatttcaattgcttttacttcccagtttgtagtagtgtttgaacctaaaatcctatgtgtgtttttagttaccttttcaagttaaactttcagaaactatctgcttaacttaaaaatttactcttgttaattgcccaaccacatcttacttcatgtgtcaaaatctgcctgatatttttaatttggaagtccacagtagtgggaagtcataggaactcccagtcagggtattcacagtaactactcacagtaataggaactcacagtcaagtctaatttttcattttaatttttccaatcccttctttacttctagtatactaattgaaaaaaaaaaacttgggttgcctttagtttcaatttataatttttattaggattttactgatactgtatctttttggtactggaggtctcagaggactgacctggttctacttgtttgctcttgggatttagaacgatagtttctattgtgttgagccagcaacattttgcttattttcaagaggcagagtggcagagtactaaattgcaaggttgtgcagaccttaaataagtgtatggtgagctataaagttacaatgttaaattagtttctggctggcccacattgtttccaaagttgactttgcattttaaaagaccttactgatttaaaaagcgaatagagaactgcttggaaacacatatcatctgagagacattcgaacatgcggggaaaaaaaaaagtggaaggaaaggtgctgctggctgggcatcatagactagaaagctgcatttaaagtttaaactgcttgggtaagacatgttttcctggtttatcctcatgtttttttccatctgtgttctcttgccattattaccaccaaatacaggagaatactcctttacttattgtagtcttatttgggagacagactagagtgtggattatgtagggacagaaagggagacttgagggtttttttttgttttgttttgttttttcttccagtatttaggttcattgatgtacagggcatatgttgtcttcttttagatttttcagtgaagttttgtactcctctccataaaactctcacacatttatatttatacatatatatgtaatatatatattatttatttattgagaaagagtcttgctttgttacctaggctggagtgcagtggcatgatcatggctcactgaaggctcaaccccaaagactcaagcaatccttccacctcagcctcccaagtagctgggaccacaggtgcacattaatatgcttggctaattttttaatttttaaattattattattgtagagatggggtcttgctgtgttgcctaggctggtctcaaactcctgagctcaagcaattcacctgcctcggcatcccaaagtgctgggattataggtgtgagcaccactggctgggccaatgttttttctcttataatgtttcttctgatactttgtggctattctgaatgtgttcttttaaaaattatcattagaaagttacttcatttttctttttttctttttttttgagtcagagtctcgctctgttgcccgggctggagtgcagtggcgccatctcggctcactgcaagctccgcctcccgggttcacgccattctcctgccttagcctccctagtagctgggactacaggcgcctgccaccgtgccggctaattttttgtagttttagtagagacggggtttcatggtgttagccaggatggtctcaatctccttgtgatccacctgccttggcctcccaaagtgctgagattacaggcgttactgcatttttctgcaccaggatctctttattttgtacttaggctttgcttgctccctctttgctttagtttcatcatctgtgaaacaaaggggttaggttagaataagaaatttccaaagatctttctacttctcacagtacgtggtgctgtgtcgaggtaacgtcctttacatacctcatgaagttagtgctagttgtaccatccaaaccacacataagttctgtgaatacaaccaaacagctttgttcacatgtatttgcatgtgtttcaacttaccgtgttctctgcataatgattcttcaacagtttgaggtaaagagtgaatatttcagtttaaaaatacagtcaaaagtatagtttcttattctggtggacgtggtttactactacctcctccccctgtgttttagtttgttgctgtgctagttttattgcatattttctctcctaaaaatagatggtctttatctaaagcgtagtttttataaatatttgcatctcaagtaaattttttcctaccacatggatttcatgtggtgagttccatgaaagcaggttgtgttaagagggcattctcctagtacctgtttattcttttccatacctctgccccaaggatcttgtttactgatgtcagaatactggcagtttgagtagtactcttgaagagttatttttgtatttatttctgctggattgaaggaggtagatgttgtactcattatctctcagaacatctattcaatcctaacccccaaaatataccttagaaacaggctctctgtgtttttttttttttttttaatcttttatgaagacatacaatacacacatttctcttagatgctggccaggaatttgtttgaacaaattgaaatggcaagttttaaccctaatttgaatagagttccagaaaatgaagttagggcagaggttggtgaggggtcatattggagtgtcactgagctagtaccaatttgtttgtttgttttgtggtaaaatgcacataatataaaacttagcattgtaaccatttttaagtgtacggttcactagtgttaagtacacttgtatagttgtgcaatcaatctccaggactcttttcatcttgcaaaactgaaactctgtacccattaagtaacaactcctcatttccccttccctccagcctctggcaccaccattctgctttctgtttctatgagtttgagccagtatttgtttagctttttcatttttgtcttgagaacttgaccttctttatgacagctaaatggatgttgaacatgaagaggagagtaatccagtaaaactggtagccactcttcatgatccatgagtgttggtagttgccaaccccgaaattagagtatcagtcagtcttctgtaatgcagtttggaaattgctattccttgtgtttgaggatgatgacaatagctagtgactaacacttacttggtacttattacatgcctgaggttagaggaaagacctgcttctgggaagaaagagtaaaggaaagattgggtgcatgacaatgtatagatacataaaggaagttcttgtctgttttctctgttaagctcaaagctaagtcatctgttgaaagttagggggctcaggttggttaggaggtttaaataaagtgacagatgtttgcaattaccaggaaatgggatagagactcatcagggaaagtagaataatactaacagtattagtggtaataataacaacaacaagaacagctaataatgactagttatctgttctatgccagctacattttatgttgtaatctttatagcaaccttattaaagtagttgttattacaggtaagagactaagttgcagagttaggatgccagtgtcactctgctgccccaagcccaggtgttctttcctttttctgcactgttaatggcattgggagtgtctgcctgacactacaaaccagaagtttagagtataatttttagaaattgttcttcagagaaaggaggaagagtgggctgaagtaaacgctatatgtctaaaatatcacaattatgttgacttttttttgccaccagaatgattgatgcccttgatgggtcatttcactaaataaagtgagttaccacagcccagtagaaacccagatctggttgtgtgaccttaatagaggtatctgaaattataaattgattttcttccaatagcccgcatctgaaataactggattgaggttcatgtcagtaaattcttcaatttctatgtagggaaaaatgaggacctttttgtttgtaattattctatttattgaacagttattagttgtacttctaatctgtactagaagactatattacaaagtgtttattttccctaaacaatggcttctcttgattcgtgttcattattgccctaaataaattgaaatttagaaaaagaaaaacccagttttcttagtatcatacatgcaagcttaagttttcttatttgtttgtttttatttgacatacatgaaggttatttccaaagatacaaatggaggccaaaacagtttgacataaagcagaccaaaacagattgaattatactgtacctctacactgactagcattttgatgtctagatggataagtaagcatagtgctaatttacaagcgcaaactcaactagtaagattaactaatttctaggctgtaatgaatttatataaatattcttgttattcagatgggaaacctcataactgtgctgtagattagacttgcattgcctaaaactggagaatgtaactttttttgtttttttgacaaacccacagccagcatcatagagaatgtaactttgcctcccaaatctgtgtatgtcagatcacttataattggagctgcacagttccctcttctaggtttgactctttaaacttggtaacatctcattaggctaaatgaattctccatgccctattgtctgtcttgctatgttgcctaacactttgattttaacattaggaaaacaactaccaataaacatgagataaaacacaaaatagatgaataccactagcttggtaatataaaccattatataacagggatttgctgcagactcttttcacacatagaaaacttttccaaaagacatttttgaagtttcgctatgaagaaagtttgccagtgactgaaagaaccttttgtaggtccctatttgggagtgcggtaactggtgcttctggactctatacacagagatccaaggctaggaaaatatctcagggtaaagctatctaagttttgtatccaaaagctattaatttcttcagttatgagaagaaaccacaaattgcgtaatggccttggtattttgttggtatggagagaaggatgatctcagaagacttgtaggcctgtcttggggtgtctgtggtgtgtgtgtgtgttgctttttttccaacttataaaaaaactcaacaatcaatcttagccacgtttttgaaaccgtagatattctaagttagcaaatccaaatcagtacacgaaacaaccatttttgccagcaccaaatgcatactttgctgagctttcgtatctgggctccagagtttattcatagcaaattctgacatctgctaagttctattatgacccagaggggagcgaagtgaagtaggatgaagaatctggaaacgcatgctgcttatagggtaaattgcattgaggaatttgcatccatgtagcctttccccttatggaccactgtgacgtttagtaggctgagctaaaaggtcatattgctcaagatgaataacaataaatggtttgttcagtgacttgttaagcctactgccagtgcctactaatagccaaaatagctatttctcttctgggatatatgagtttggctgtcatctttttgggaatatggtaatttgtagccatcactttcagtgtggtggggagatctaacatttaaaagttcttatcccagtggtttacagatcccttttcccccacaaaccgctgctgcttcttttgaaccttgaatgctaccatggtttaattttttttttttttttttttttgagtcagggtcttgctctgtcacccaggctggagtgcagtggcatgatcatgactcactgcagccccagccgcctggactcaagtgctcctcctgcctcagccacccaagtagctgggactacaggcgtgtgccaccacacctggctaatttttagatgggatttcgcatgttgcccaggctggtcaagcagttctcccaccttggcctcccaaagtgctgggattacaggtgtgagccctcatgcccggccttcctttgctttgcttttcttcagttgtggttcagttctagaccatgtttacagtagatacaggggcacagctcccaatagtgtttaaaacatgtgaagtatcggggcagaagttagcacctctaataagtttaaattccctcggatttgctttataggaagtatgttaagaacattttccagagcattttcattcaactgatatattttacatagctgccttattaaaatacagatgtattcttgaaattattgaccaatttttttttttgagatagtcttgctgtgtcgcccaggctggagtgcagtggcacaatctcggctcactgcaacttctgcctcctgggttcaagcgattctcttgcctcagtttcccgagtagctgggattacaggcgccctccaacatgcctggctaatttttgtatttttagtagagatgggtttggcatgttgtccaggcttgtctcgaactcctgacctcaagtgatccatccacctcagccttccaaagtgctgggattacaggtgtgagctaccatgcctggccgatcaatttttttttttttttttgagacagagtctcgctctgtcgcccaggctggtgtgcagtggccgaatcttggctcactgcaagctccgcctcccgggtttatgccattctcctgcctcagcctcccgagtagctgggactacaggtgcctgccaccacgcccggctaattttttatatttcaatttttaagaaatgaaataagatgaatgatgagtaattcctttttcagtaatatagtagattagatattcagagaaatcccctcgggtcagaaattttttttttttttttttttttttttgagacggagtctcgtaccgtcacccaggctggagtgcagtggtgtgatctgagctcactgccacctccgcctcctgggttcaagcgattatcctgcttcaacctcctgagtaactgggactacaggtgtgtgccaccatgctcagctaatttttgcatttttaatagagatggttttcaccatgttggccttgatgtcttgaccttgtgatctgcccgcctcaacctcccaaagtgctgggattacaggtgtgagccagctggaacatttttaaatgaggctaggaaaggtaaaaatgtatgagcacatataatatacatataacgttctggaactagtgtaagaaaaataattgaggccgggcatagtggcgcacgcctgtaatcccagcactttgggaagccgaggtgggcaaatcacgaggtcaggagttcaagaccagcctggccaacatggtgaaaccctgtctccactaaaaatacaaacaattagctgggcgtagtggtaggcgcctgtaatcccagctactcgggaggctgaggcaggaggattgcttgaacccaggaggtggaggttgcagtgaactgagattgccccactgcactccagcccgggtgacagagtgagactccgtctgaaaaaaaaaaaaaagcatcatttcataaggcagaggaagccctgaaggtggtggtggttctgagggtttcttgtaggattagaggaaagtggagggacaagagacaagtagtacctaagcatagtggaaggtcctactggagactgtcccagatggaactgggaccctggagggtgcaagtcttcagtgcatgagtagaaaaaagatgtccaagatgtcctgcatgcagagacttgcctcttactgtcttggatctggttggagaggggaaagaagcctcccatgtgattgcctaagcagacgcccatactcaaagatttgcagtcagattttatactacctgtgaggactgaaaatctctaaactgaaaacttagttgaaagtattcctatttggttatggttcccagtgtctgggagaatcaaattcatatctcttttaaattaattaattaattttagagacagggtcttgctatgttgcccaggctagtgttgaactcctaggctcaagcagtcctcctgccccggcctcccaaagtgctgggattataggcatgagctaccacgcctggcgaaaacacactttctagtcaggccttaaagacttttaatagaggaagttgcaagaaatgtgagtttgcgtaagaaaataagcaactatgagttggttattttgagtcagatggggcagattctattttccagatatggaaacagtatttcctgactcctgctcttctagaacctcactattgtactatcaagaagtagaatctttttctgttgaagctgggcagtcctttgtgactgctttgaccaaaagaatatgacagaagtgatattatttcatttctgaggctaagtcataaaaataccacacatttctttattctcttgggatgctcattcttggaacccatcagcatactctgaagaagcccatggagagatccatgtggaaaggaactgaggtctcaggccagtggcaccagctataggcttccagctgatggtcagtactgacttgccatctttttaagtaagcgatcctgcaagtggatccttcagttctctatcaagctgccctgggtgatgccatgtggagcagaggcaagctcttctctctaagccctgaacagattactaatttgtgagcaaaataagtaattattgttattttgatccactaaattttggagtggtttgatatgcatcgattgacaggtaactaaacatcggtggtaaccatcagtcttataaagcctacagatgtttaaagaaataaaggaggaggttaaaaatatgatgaggagactcttaaaactgatgaggaaaatatggaagaagaactcagtctctgtagaacttctagaaataaaaaacatgcagatgcccccagacttatgatgatgatctgattgtaatttttctttctttatttctttttttttttcgagacagggtcttgctctgttgcccagctggaatgcagtggcatgatctcagctcactgcagcctccgcctcctaggttcaagtgatcctcccacctcagtctccctagtagctaggaatacaggcaggcaccactatactcagcaagttttttatttttagtagagacagggttttaccatgttgcccaggctggtcttgagctcctgagctcaagtgatctgcccacttcggcctcccgaagtgctggcattataggcatgagccacctcagctgacctgattatgatttttcaactttacgatggtgtgaaagtgatattcattcagtagaaattatacttcagtacagtattcatgaaatattcagcactttattgtaaaataggccttgtgttagaattcaagctgtctaaaccaccttgttttgttttgttttgttttaggcttttagcagtgtgaagccattgtttttagtttctctctctagtgataagcggaaaagagggttgaggaaggggctttaccgaaccaaccagaaacaggaactaagaacccaagcctgtgttccctcccttggacacccctgtaagatgattttgctcagtcgtaggctaacatcagtgttctgagcatatttaaggtggaccaggctatgatgtttggtaggctaggtgtattaaatgcatttttgacttagtaatatttcaacttatgatgggtttataaggacataagccccttgtaaattgaggagcatttgcagcgaaaaatacagtggaaagaggatacagagtagagtaaattaatgaactggaaaatggatctgaagaaaatttctagaatttagtacagagaaagaagagatggaacatatgagaggtttagtgacatagagaatgagacgataacatctgtctgatctagtggatcccaaactttttaaatcttaggatcccttatgccttatgctctctctctctcttttttttctttgtttgttggagatggagtcttgctctgttggccaggctagagtgcactggcatgatcttggctcactgcaaactccacctcccaggttcaaacgattctcctgcttcagcctcccaagtaactgggactacaggtgtccattaccacgcctggctagtttttgtatttttagtagagatgaggtcttgccatgttggtcagtctggtcttgaactcctgacctcaagtgatctgcccaccttggcctcccacagtgctgggattataggcatgagccactgcacccagcctactctttaaaattattgaggacccaaattgcttttgtttatgtgagttacacttataatttggccacatttttgcatatatgttatagatccattaaaagtttactttaaaaaagaaacatcatagagtgagaaggtgagccacaacttgggaaatgtactaacaaaggtttgttagccagaatataaaagaactcctcaaataaaaaaaaaaattaggaaaaatggaaataggaaagtcatgaaaaagttaattttacaggagtagaaacaaatggttcatgaacatatgaaagatcctcaacccttttagtaatcaagaaaatgcaaattaaaatggcaaggaactgtctatctcctgctcgtctcctttcccccaccaaacagggaaaaattaaaaatatagttacagttgttagagatgatatgagcagtaggagcagtcatactgttaggtaccttcatttttgaaaacaatttggctttacctagtgatgcctaggtatgtcccctagtgaaattcttgtgcgcatggcttaagagacatatgtaagaatattttaattattgttcatagtagctaaaaatccaaacaactcaaatgtctagcaactgtaaagcataaatacagttggtatatttataaaagggtgacctctgagcataaaaggaatttaagtgccactacatgcatcttcgtagaggaatattccaaaatagtggggatcaaaaaaggcagttagaaataataaatacggggtgggtgcagtggtacaggcctgtaatcccagcactttgggaggctgaggcaggaggatcccttgagcccaggagttcaagaccagcttgggcaacatagcaagaccctttccctacaacaaattaaaaaaaatattatctgggcatggtggtgtgtacccgtatttctagttactcagaaggctgaggtggaaggatctcttgagcccaggagtttacagctacagtgagttatgctcatatcactccactccagcctgtacatcattgtgagaccctgcctcaaaaaaaaaacgagtatgattctatttgcataaagtttagatgcaggcaaatctaaacaatatgttgtttggggatacatatatggtaagattataaagaaaagcaaatgaacaaacttcaggatggtggttttcttggagtgggatgaggtggtactggggaatggaagagtacgtaggaactatggtttgaatatgacatattttacaataaaattttttataagcttgttgttgaaaggaaccctgaggtgattcttttttctgaagaagacttttggtaatgcggatagtaattttttttttttgagacggagtctctgtcaccaaggctggagtgcagtggtgcgatttcggctcaccacaacctccgcctccccggttcaagcaattctcctgcctcagcctcctgagtagctgggactacaggtgcatgccaccatgcccagctaagtttttgtaattttagtagagatggggtttcaccgtgttagccaggacggtctcgatctcctgacctcgtgatccacccgcctcggcctcccaaagtgctgggattacaggcgtgagccaccgcacccggcttgcagatagtaattcttaatcttttggtacatgctcttgcacataaagttttacagtaaatatatttttcatttttttcctgaatttctttatgtcaaccttgctaaatagagagcgtgcctaggaagaagatgaaactaggagaattcatccacaagcttaagttcaatggttgtagccttagaatgagaaattaggccttttattctacctgtcttaaaattagcttattattgttaaaaaccaaagactgtttcttagtttgtttatttttattttttgttcaggagcagaagcactcttttgcccctagccctagcctgcatctgctgtttgttaaatacctccatgaattgacatctcttccttttccgaaggaatgtgaaacccaataattacacacagacctgacctactttggaagaaccagaggacaaagaaaccctagatttcttcgtctttttttaactaaaaagcagagatttttgggaggcgagggccagaacttcctgtatctattcttctttgaagagcccaactcacctaagaaatttctggctgggcatgatggctcatggttgtaatcccagcactttgtgggactgaggagggaggatgccttgagcccaggagttcaaaaccattccaggcaacataacgagactctgtctgtatgaaaaggaaggaagggagggagggagggagggagggagggagggaggaagaagagagaagttttcccttgtgtgtgctgcttgtaggctagtggacttgattctaatgaagcctttgcatgtctgctgatccggaaatatttggccttttcccaaggctctatggctttgggaaaataatgatgaaatacctatttattttttatttttaattgtcctattttatatgtttgatttttgtaaacacctcagccctttttaaaaagaaatagttggaatataaacatatattctcattaattaataaatcagctggatgactagtccaaactattattccattatcattgtcactgccctgtaacttattttagttctgtgttagttatatttacctgttgttattttgctaatttgatagtttattgtgaaaacaatttttaatatttgtctactgacattttttaaaatagaaaaaaattctcctaaaccacaatcagaaatcttttcatttgattcattaacagttactaaaacaccacaactgcgttctgggtcctaggccctgtaggggggctcacacaacttcactaaacaccagccttagcagaggaagataactatcaatatctggaatgtcaagaactagaagaaacaagataatgtggtcctagcagacagataaatgggatagattcaagaattcagaaataaaaccttacacttatggtcatttgacttttgttaagtctgcaaagataattcattggagaaagaagagtcttttcaccaaacagtgctggaataagtgtatatccatgttcaaaagaatgaagttggacctttgctttataccatatgcaaaaattaacttcaagtggaccacaaaactctctaagagttttcatagagttttatagttttagctctcacatttatgaagagaagaaaacatacgagcaaaccttcctgatttggagttaggcagtggtttcttaaatagactaccaaaagcagaagggacaaagggaaaaatagataaatggactacatcaaaattaaaaacttttgttctgcagacaataccatcagaaaattgatgacaacccatagaatggaagaaaatgtttgcaaatcgtacatctgataagggacttgtatctagaatatataaaaacttttataactcaatagtaaaaagtctaataatttaaaaatagaggaaagatttcaatgtgtaatgcccctcaaagtgtatgcagttagtccacaaacacatggaaagattctcagcatcattagtcattaggaaaatgcaaatgaaatcctcaatgagataccacgtatccactaagatggctgtaataaaaaaagatggacaataacaagtgttggttaggatatgtggaaagtagaactttctggcattgctggtgagagagaatttaatgatgcagcagctttgtcatttcttcaaaatgtttaatgttccaaaaaatgttaaaagtggaattaccatataacccagcaattccactggtaggtataaacccaagataagtgaaaacacattcacataaaaattttatgaatgttcatggcagcattattcataatagccaaaaagcagaacaaccaaaatgtccatcaactaaagaatggataattaaaattaatatatccatacaatggaatattatttggcaataaaaagtaatgaagtactgatacatgctgcaaggtgaatgccccttgaaaacattatgccaagtaaaagaaacaagtcacaaaaggaccagatattgtatgatctcattgagatgaaatatttagtataggcaaatttatagaaagaaagtggattagtggttgcctagggctggtggagggataggagtgggggaatgaggagtgacagctaaacaggtatgaggtttttttcagtcggaacaaaaatgttcagttagattgtgatggttgcactatcctgtgaatttataaaacacgttgaattttacactttaaattggtgaattgcatggtatgtgaatatctcaataaagctgcttttttttttaaataactagaatacaaagaaagcagggaaattcttgctgaggagaaatactaatgtgattatttgtcttgttaatgaatttcatgtcctcgttcgggctaaatatttgtcaatttttaaaaaaatctactttcagaaagagtttcaggtatctttaacagaagatcaacagattaaaacaaatttaaaagaattagggccaaatagtctagggaagaggagagatggatactattttaccagaaaacttaggctaagtagagctaccacagttcacttagcttttgctttctggcagtacaggccaacaagaaaacatggattccttaactaacattattaaataaaaggaaaaaatacaattgagaaaaccgatttcccagcaccacactgtaagtcaaaacttaataccctgtgacttgatatcaggttcacaaaactatgtctaaaagaaaaattcttcaataatacatttttaaaaaagatttcaaggccaggtacggtggcttatacctgtaatcccagcactttgggagtccaaggcagatcacttacagccaggagtttgagtccagcctgggcaatataacaagacactgtctctacaaaaacaaacaaacaaacaaacagaaacccctatggtggcacatgcctgtaggcccagtcgctggggaggatcacttgaggccaggaggttgaggctgtagtgaactgtgatcgtgccactgtactccagcctgggtgacaaagaccctgtttcaaaagggggaaaaaaagggttccaaagtgttctttatatggaaaccattttgattctggatataggtctagtgagtctagtgaagaaatgttgtttgttaagcgatctggttacttgaactgacggaaagcagaaagctgttgtttagtctggtatctccaacattaaatagaagtttcctaacaaaacaatttaagactgaatttgaatgtagtgctagaagagcagagcattccattatgatgtttgcagttaactattttagaatagctttagatgtgtagaaaaattgcagatacagtacagaggtcccaaataccccacggtcagtttcctctattcttattatcttacagtaatatgatacatttgtcataattaatggaccaatattagtacatccttattaaagttcatactttactcaaattccgttagtttttaccaaaatgtcctttttctgtgtcaggatcttgtccaggataccacacgccatttagtcaccatgtctccttaggtttctcttagctgtgacagtttctcagtcttttcttgtttttgatgaccttaatggttttgagtagtactggtcaggtattgtagaatgctcctcagttggaatttgtctgatgtctttgtcatgattagattggggttataggttttgagtggtaagataaccaaggtaaagcgccattttcatcacatcataccaagggcacatactatcaacatgacttattactgttgatgctaaccttgatcacctggctcaggtagtgtttgtcaagtttttccactgtaaagttctttctttccccccctttcataatgtactgtctggaaggaagtcattagatgcacatgcttttgatagcattttgtgcaattgaaaaaagtaactttgtttggtaaactaaggagcctgacatatttacttttccagtggagagcttacctatgtttacacagagtttgctggaatctctacaagtaaggctaaagcaaagcttttctcaagaaagagctttagttttgttcacatgcttgaactcttgcttgaaactgctacagttctgtactataaattatggaagagatttccttggcctagaatttcttggagatgatagttgtctaccttataaagaaccatgagctgttagttttctattactatgtagcaacctgccacaaatttagcagcttaaagcagcacacatttactgtcttacagtttccatgggtcttgagtcctggcatggcttagctgagccctctgctcagggtctcagaaggctgtacagtattaaatggactgcattgtcacctggaggcttaactgggaaagtagttacttacgagatcgttcaggtagttggtagaattgctttatgagtgaggatcccagctttttgttggctgttggctggggcttctaaagagactgatcctagagagactgcccgcagttctttgatgccacccacagttccttttcctgagggcttccgtaacatggccatttacttcattaagctctctagctccacttggaagaaagggaggatattacataaaggcatgaataggtctgtcattatgtgtgtgtgtgtgtgtatgtgtgtgtgagagagaaccattgggggccagtcatcatggggtctgtttgtcacacagaatatgacttttatttttatttttaattttttttgagggtacatagtaggtgtatatatttcataatatgacttctgaagagaatatttaattttgagtaggactgcatccagtaagtctgtcttgatgaaaattagtcacagagtacatcccaaatgttagtttaacccaatagagctggttgtagtaaaaagaataaactttacttttaaaaatattgggtacaaggttaaatggaggtaggtagagctgttcaatgcagcataccagctggggatgaagaaagaagttggaggataggtgaaatacggggatatgttttccttgtttcaaaattttgctaaagtctgatgctgtcagtcatccattcttttattagtcaattatctctgtttatatttaacaactcattaccataaaatctacttttgagaaggagcaaaacataatgaagtggagggctcaggttcttgagctcgactgtctggcttcgattcctgcctctgccattcagtactgtatatccagggcacataacttcattggtaggtgtctcagaaacatctgtaaaatgagaataatagtacctactccatagggttgttgtatgggttaagagttaatgcctgtaattattcttttcttttttttttttttttgagaccgagtctcgctctgttgcccaggctggagtgcagtgaggcgatctcagctctctgcagcctccgcccctccaggtttaagcagttctctgctcagcctctggagtagctgggattacaggcgcgtgccaccacgcccaggtaatttttcgtatttttagtagagacgggatttcaccatcttggccaagctggtcttgaactcctgacctcgtgatccacccgcctcggcctcccaaagtgctgggattacaggcgtgagccaccacgcctggccattattcctcatttttttcaagtgcagtaaagatgtcatagttatgtttaaaaaaagagaaagactcctgtttgaggtatattgaagtagttacagatgaaatgatacggtgattgggattttggagaaacttggtagagatatagataaaacaattgactataaagtaataattcttgaagctgattgatgctttgaattattttattgtctacttttgttaatatttgaaaattttcattacaaaaagtaacaaaaaaatttagtgccttgggacatattaggtgctcagtatattttacctattcttactatgcttatgtttaatatattggaattaactagtctaaaacaaaaaatataaaacaaactaaaattgactctttgagtttctcatttctaagtgagaaatttgataatggaaacatcgtcaaatttggctgacattggattatgcaacatttcttagactcggattcttggtttctgtgttcatgtctttctggtgtggttgtaatttacagtttaattaatttgacctacttgttgcccgtttcacattccatttaatttagtctgccattgtttgttctgtaagtgggatggaaattaatgtcaatattattatttagtgttcttagttttaacagtgggaaacattgactttaccaatagtgaaaatattagcaaatgccaaggcttttctgggcaaacagtggtgttatgctttagttttaatgtatttaattgaggaaagaaacacttattcaccaaggttatctcaaatgtggtaaatgcagttttctgcttattatcatatggtcctacattatatagcactgtaaaactagatgacttagggctgggtgtggtgactcatgcctgtaaccccagtgctttgggagcctgaggtgggaggattgcttgaggccaggagttccagatcagcttgggcaaaagagcaagacccttctcttaaaaaaaattaatttagctgggcatggtagtacatgcctgtagtcctgactactcaggaggctgaggtggaggatctcttgaggccaggagtttgaggctgcagtgagctattatcacatcattgcactccagcgtggtcaacggagcaagactctgtctctaaaagaaataacaaatacagccgggcgtggtggctcatgcctgttatcctagcactttgggaggctgaggcaggaggattgcttgagcccgggagtttgagagcagcctggactatagtgagacctcatctttacaaaaataagtaaataataaacagataagagaaaataaaagaaataataactaaaactaaatggcttgattactttaactaaccaagattgagagttgtatgactagtagtgattctgatttatgtgaatgaacccttaggacttaaatgtcaatttaaaaacttaaaaaagtcaaaacccaagtctcccagagttcgaattaggaattggcacagtgagaaccttatcttgataactctctttctttcttttttatagtcagggtctcactctgtcacccaggctaggagtgtagtggcttgatcacaactcactgcagccttgacctccggagctcaagcagttcttgtgccccagcctcccaaaatgctgggaccacaggcacatgctaatgtgcccaaccaatttgaaattttttttgtagagacaggattccactatgttgcctaggctggtctgaagctcctgggcttaagcgatcatctcaccttggcctcccaaagtgctgggattgcaggtgtgagccactgtgcccagctgatacctctgctttcaagtcatgtaatagatgaaaacattgaggattagaggggtaaagtgattttcccaaggtcacaaacatatcttagagatacagctggaaattgaactctcaatctcagcacccactgcattcgtctttttgctgtcacagtgatttccaaactgttctgcagagccctaggcttctaaaaagttttgtctgtaaccaggatggatactcttttttctgtcttatgtgttagggtttatgtgtgattttgttcagaaggaaaaagtttctactgctgtgtatgatcatttttatatccttcctacactctgagctccttattctgtgctgttttctacccagaaaagtacatttgattcattgaagggatttttttttacttagtttcaaaaaatgccaacttgatctcttagtttcaaaaaatgccaacttgatctatcaagaaacctgtgacccagagacctcaggaaagttgcacaaagacttttaaatatggagggataattagttttattatgacattattatcaattaacattttacttccttctagctctctacattttcattttctcatctcataaatctcattccttatgattttttggtggggatgtgttacttacggtctcttattttcctagaacaatatttatgcaaatatgtctttttttttttttttttttttttgagacggagtcttgctctgtctcccaggctggagtgcggtggtgccatctcggctcactgcaagctccgcctcctgggttcacgccattcttctgcctcagcctcccgagtagctgggactacaggcgcctgccactacgcccagctaattttttgtattttcagtagagacgaggtttcaccgtgttagccaggatggtctcaatctcctgaccttgtgatccacccgcctcggcctcccaaaatgctgggattacaggcatgagccaccgcgtcggccgtctgtctatcttaaatgaaactatttctgatatctggagattcttttggatctcattggcaatgaattaggggtcatgttaattggcttaaaagtagtattgtcataagacataaaagaggggctaatagtataatagttgggttttacttaaattgtggatgcttttaatgatttttaaaaacccacaatgttattaactatactcaatactttaatgaattgatacacagttacgacaatttcctttacataaaatccttggttctaccttagcatctttttgaaattctacacttgtactctaatgcaaatttaggaccatcagagaaggtcagtatttaggatgtctgtaatcctgctacaggaaaacacaaagaatcttgttaaatgttaactctgttatattaagcatatacttcatgtagctgtcttttgacatctgttgtggctatgtttaacctatataataattttatatttcagtggaatcattctcagttttttctatggcaatgttgtttatcagttgtccgcttaccacctttaaaataaatatcagaaatttggccaggcacggtggctcacacctgtcatcccagccctttgggaggccaaggtgtgtggatcacaaggttaggagtttgagaccagcctggccagcatggtgaaaccccatctctactaaaaatacaaaaaattagccgggcatggtggtgcgcgcctgtagtcccagctacttgggaggctgaggcaggagaattgcccgaacccaggaggtggaggttgcagtgagccgagatggcgccactgtactccagtctgggagacagagcgagattccatctcaaaaaacaaaaacaaaaaaacccagaaatttaagaattaattaatgtttactattagacttccagggattgatttaagttacttaaattacactattcatcacatgaaatgcaaacattcattatggaaataacatttgtttgacttgaaaatgtgatgattactaaatataaggaactcattgaaactggaataaatgcacaagccatcacacaaaacattccattttgaaggaatcccagaggggcattatctgtcagcgctggtagtgtgcacctgttcttcggaaaacaccttggaaggtagttggtgccatgttcctgatgggcacagggaggctggcttcttactccaggctgctcagggaagatagtctggtatcataaacatccagacaagaaatgcatgatttcacaacgatgcaccttttgacaaacaatgagcacactactgacatccgaggatgcattacaagtgagactttcagaaataggaggatgaaatgcagtctgaaaatggatattgcttcctgtttttccttagtcttcattgtcaaataattgggagatgtcaagagatgagggtttaggatagtttttcaactgttttctgtttccttggttcactcagctcctgctacttcacgcagactgtgttattagtccttgagggcatattgatataatttaaaacaatttaaaatatgaactgttgctgattttgttcaacaggaacagcactaccattgtaaggttagcaagatacccaatataataaatctccataggggaagtttaagaaaattatgttacggcagttgagttcagctctcttttcagctggagccttaagtcttggagcgttctaggttctacatctaaatgtgcttaacagtacacaggcttcttgacaaatgctgttcttgggaagagtacaatccttctgtgagtctgtgttatttttacctgtgagttggcattccaggaaagagtagcatgtactcattaagaaaattcatcttaaaatttattcagctttttgtcttctgacaaccttgtattttaggccctattgccaagttatttcccgtctttctgtcctgggactaaagtttctttttttcttttctttttctttttctttttctttttttttttgaaacagagtcttgctctgtcaccaggctggagtgcagtggtgtgatcttgactcactgcaacctccaccttcctggttcaagcaattcccctgcctcagcctcccaagtagctggggctacaggcccacgccaccatgcttggctaattttttttttgtatttttagtagagacggggtttcaccatgttggccagactgatctcaaactcctgaccccaggcagtccgcccacctcggcctcccaaagtgcaaaatttcattttttatagtttaatttcccaccataactttgacatttttctttggaaataaactacttttttaaaaatttcaaaatatttctataagttgtaggttgaacacccctaattcaaaaacgaaaaatgcccccaaatcttaaactctttgagtgccaacatgacaccatgtggaaaattctatgcataagcacttaatacaaacttgtttttaatgcacaagattatttaaaatattgtgtaaaattaccttcaagctatgtgtataaggtgtatatgaaacataacgttttggataagggatattcaacctgtattgttattcttattatttttattgttttattttttgaaatggggtctccctctcgcccaggctggagtgcagtggcgtgatcacagcccactatagccttgagctcttggactcaaatgatcttcccacctcagtctcctgagtactaggactacaggcatatgccatcatggctggataatttttaaaaaattttttgtagagttgggggtcttgctgtgttgcccaggccggtctcgaactcctgggattacagcatgagccaccaggccggcctattttgtcattatgccactttcttagacagtgttctttggttgccattttgaactattagaactgccttgttaaaccatttagcttttgcccttttcttccccagatccctaatacttttctgcccaatcctttctctctattcagagtgtttcctgtttgtcctacattctctttctgtcctccttctttcctgctcttccctctttttttttttgagacggagtcttgctctgtcacccaggctggcatgtagtggtgtcatctcggctcactgcaacctccacctcccaggttcaggcgattctcctgccttagtctcccaagtagctgggactacaggcatacaccaccatgtttggctaatttatatatatatatatatatatatatatatatatatatatatatatatattttagcagagacgggttttcaccatgttagagaggctggtcttgaactcctgacttcaagtgatctgcccgcctcagcctcccaaagtgctaggattacaggtgtgagccctgcacctggcctcttccctctcttttttttagggctttgaggcatccttttcaacagctccttaaccttaaaattaagccatcaatcccattctaagtatctccctcttaaacttctgcaatttgtttaatctgaaataaacacctgaaaatagaaaattgaatatctatattttgtaaataatcctgattgacctttatttttattgtcaactctcttttcctccactccttttttttaaaaaaaaaaaattgttgaatacatttaagtgataaacctgtaggacaagagttgatttaactataaaacattgttggcactttgcaacaataacaatcatgtcagtatgcctgagagagttgctcataatattggagacactcgtaggcttctgttttctgagagggtaaatgtcaaccagatgggaattactggaactgagaaatcattttctttttgtctttaaaaatttctcttctatatcttgaatttcaagtaatcacagaaaatttcctttgcttcagataccatttactaattttgcacagtataccattttccaacttattttcccactttcagtaaactttctgttctctatccagacattggaaatgcatgaactattttacagtcaccattcagtacagcctagagggcagaaaaataaaagttcaaccactcacctaaaaagcactatacattttattgtattttattattattattattattatttttgagatggagtttcgctcttgttgccctggctggagtgcagcggcgccatctcggctcactgcaacctccgcctcctgggttcaagcgattctccctgcctcagcctcccaagtagctgggattacaggtgcccaccaccacacctggctaatttttgtatttttagtagaggtggggtttcaccatgttggccaggctggtctcgagctcctgacctcaagtgatctgcctacctcggcctcccaaagtgctgggattagaggcatgagccaccgtgcctggagtgctatacattttaaattatagttgttaaccactttctgtggagtttattgaaagctgcctgacccttatctttgctggccatgtagagtccttgtgtctcgagttggctagcatccttgcatcccagccattccttaggcttgacagctgcatattttcccagaaacagttgtgattggtgtgtataatgaatagaataacctgttctttccaaatatacatccctgttttgccccttagtacttgatttgactaattgtttcaagctgaaatatagacttcaattaaaaaattggaagccaggtgtggtggctgttgcgtgtaaccccagcactttaggagactgaggtgggaggatccattgagaccagcctgggcaacatagtgagaccctgttgctacagaaaattaaaaaatatatattatccaggtgtggtggtgtgtccctgtagtcccagctactcagaaggctgaggtgagagaatggcttcagcccagaaggttgaggctgcagcgagctatggtcgtgtcactgcactccagcctgggtaacagtgcagacgttaggatcttcccaagaatgtggccagcctacatcctgaccttggtcatgtggcacgttattaatcatggccatttaatgtgtaacaggttgcattcaagagcctagcttgtgttggtttggggttcttttaaatttgttttctgttgacaattctattttctagtaaattttaaataaaaatgttttttcattaaggctgattccaaaggtacttaagttcctttctagccagccattcttagctgggtcctgtgaaagcattatgccctatagaaaagaaaattgagtgactattttctcagttctcccaaacatggtactattctagatgcattgaagagaagtcaattcattacatacagtgatgctttaagggcagttgttctcagagtttgattcagggatgtcatagactccaatactgtttcagtgggtcccctaggtcaaaaccatttttaaagaaatgccacaacattattttcacttttcattcatagtctctcacaattataaaatagagatttccagagactatgctatgtatgatgctgcaattgctctgatgaccaaggagatgtgtggttgtatacacgtgtcttttaaatttttgtcttaatttctgatttttaatttgatttctaagcaaatattgaaagatattactcacataatcaaaacttctttgaagtttctcctaacttttaagagaaggagtcctgagaccaaacagtttgggaactgctgtcttaaggctgtaagacttaattctctgagagaacccctcctgggaatggctgcacacaagggcagtacagtaaaccagtcagttgctcaatagacattttaaaaattgaattaaattgagctcctagaatataacttttgagaccttatttgagattttctcccaaggcaatgtttgagcattgagagccttgtaacttgggccaggtttctgtgagatagacagttggcaattctcaatatcaagtcaatgatttcagaagtcattttcaaggaatacgtcctttaactggtagattaattatgtagcctgttggcattatgtggatcagtgccgtccaagagaaagagggcacatatattatttacaatttttaaataatcatattaaaaaagtaaaaagtggtgaaattagttttaatatcttttgtttagcctaatatatctaaaatattataatttccacatgtaatcaatataaaaatgtatcagggagatagtttaattcttttttatattactatctttgaaatctggtatatattttacatttatagcgcatcagtctggatagttacacgtggctggtgcctactgtattacactgtacagatctagatcataaaatagttgtagagctgagccgagaatgttctagagtagataagctttgtcataaaaatagagaataaaaattttgctacagaagttagtataaaaacataaccccattgaaaaaagcttacaatgacaaaatgtttgatatctgcctaaattctaaagacatttctaaaagaaatagagctctttccttaaaacaaattttttaaaaaaataagcttttcttcaaactgtaatgttttctctttccttctaaaaagcatgcagtctgctcactatattctttgaaattactgtatgttcatctgcataccagtgtaaggagatcctctttctcgtcttggaagaatttgagcccttgtgatctttgcatttccctcctacgtagttctttcttgaactgtccatttgtcctggcatatccctgaatccgtactatctgctatagggcatttatttctgatggggaagggtggtttgttttgatcttaatgctgaactgtcccttagttcattgtcttttactctgttgccgtatcttgcttacaaatatggtgtcagaatatgcaagtgaatttattgcctgttgtgaagaaaccactatttttttcagcttcattcactatgaacattattgtgcttacaaaagtgagttgagttaaaaagaactgtgttttttagaagtgagaattaaaagggagaaatagtaatttttcctctcatagaatgaataataaagaactatgactttaaatttggcatgatctaaatttaatttttttcctaccacatgccaattgaaacagaagaatttgttgaatgggaatgtcttgagtagggaaattaaggactctcacaatctgttatctctttagtagcatacttgatacagtgtcatgtttaattaatattagaatgtcaatttacaaaatcatgctctttggaagataaaagaattctgtgtagaacaggcaaacttaggaaatatatggtctcttggtaacatgttggaagttttctgctttgttataattttcatatgtaagtacaattaggagatttatagattttcaaccccaatataataacattctttgagagtttatcttttctttacctactgatttacctttgttgtggacacattcagtttttcaagcaactggtgtgtactttacaccaaaacctttattatatagtcttcagtaatctgtagctgtgaaactcatactcatttatctgtttagatattctcaaaacaatcatacctgtgtgccagccacctgctgtctgacttggcagtttctctgttccaactttatttttctgctttttagaaaactcccactttccagtttgcagctaaggtaggagctgagttcctttccctgttaagtggtcttatcaggcagttatgccattgccaagcaacagtaagttctctcctctcaggtgttagctagtaggtagggttggcaaggggagcctggcctgctgtgaagaagtagaccagtgtctctctgccacagccctcagggtcgggtcttgctgtgggttccatcctatggctcactgtgactttcctgaatggaatgcgtttattttttttccagctctgttctttccatgttcttcccacatcagctggcggcagccagttggttctgaatgctgcccacaaattgttagctattttgcttcttggtccctcaatttgtcccttgaataaggaattgatgtgtttcagatccaggattatgttgcttagtgaagcaaatctaatccttgccaaggaatgcctaaagttgaaggcttgattccagaagaaaataaaataacaacagcactacctgtaattaacatatattgcctgtttactgtgccaggcattatattaatcaggttgcatgtattagctttgttaatccccaaaatcactttaaagtaggttccattgttgcccacattttacagatagggagccattggaaaattaagtaacctgttctaggttatatattaagggatagttccaagattttgaatctaagtagcttgtcttcagagtccttgctttcagtactatattcaactgctaaataaagcttcactttggtttttttgttttgttttgtttttttgttttggagaaagtgtctcattctgttgcacagattgcaatgcagtggcgtgatcacggctcacttcacccttgctaggctcatgcaatccttctgtctcagcttcctgagtaactgggactacaggcacacactaccacacctggctaatttttttattttttgtagagatgaggtctcactttgttgcccaggctggtcttgaactcctcgcctcaagccatccgcctgcctttaactcccaaagtgctggaattacaggcgtgaaccaccgtgcctggcccaaagcttcacttttcaatgtcttctggaatctgaactctcactgaagagtagacaggagtttgatgttttaatctattaaaacttctttgtacgtgccttctaagaacagattatattcaatgcaatttttcctgaaaagatgaagtacatttgtttgtaaaattcatgtatgtatgtatttatttattatagtacatatttatggggtacatttgatattttgctgcatggatacaacatgtaatgatcaaatcagggtaattaggatatccattaccccaaacatttatcatgtctttctgttggtgacatttcaaatctccttcagccattttgaaatatgtaataaattattgttaattatagccaacaaaaggcattattgctagtacagatatttcttgacttatgatgggttacgtcccaataaacccattataagttgaaaatatggtaagtcagaaatgcatttaattcactctattgttatctacccacgtgattgtgtggctgactgggagccacacaatctctgtttaccattatgaagatcctattgcttcagaatgcaaatgaaatttagagtgagtgccttgtgaatcagggaggccccactatatgactccctgtgatctcttggaggtgaaagaatgcacaaatttcataagttaacctgaaggtcacccgcttttccccagttacattgtacatgccatcaattagtagggggtgggcagaggtggaagatttcaggcacaggccttagacagttgatgccctctgttattaaggtaaataaatcctagcagttcttcccaccttttgcacatcatggcatgcacagaaagttgagattggaggtgatccattattgcttgtaacccatttccaacacacttgtttggaagttctttttttttcttttgagacagggtctcattctgttgctggcacgatcatagctcactgcaacttcagctcccgggatcaaactgtccttccacctcagcctcctgagtagctgggactacagacacatgctaccatgctcggctaatttttaaaaagttttttagtagagatggggtttcaccatattgcccatgctggtcttgaactcctggactcaatcagtctgccctccttggcctccgaaagtgctgggattacagctgtttggcagctctgctatggggatatatctgcaagtttctaagcttgttatatttatgaaagcattctgtacattacaaggtgccattcacatgtaagattttattaataatgactattaagaccaagctatttgttctaggaagagacattgtgtaccatgattttttttgttgttgttttgggagctgtcctgagagaagcaggagcagatgctagaccagttgtggagttaaggtcttgtatgtgatctggtgcagtaatgaggagaagtagaaatgcaggtggtcaagggttatattatccaagacttcttacaggaaaccaagcagctggtgagatcctcattaaattctctaccttcttctctgcctatcccagttctctctgtagtgaaattctgctttctttgtcaagtctttcccagactttttctacctcttctcctgtaggtgaaggtcattcaccatcctctgtctgttgttatacctggtacatagctccattgcttgtacttccaatgctgcattgttttcagttccacacatcttttttcctttttagactgtgatctccttgaagtttaggctgtgtctgattaatccttgtagctccagccacacccagctcctttcatcacactccctcgttaggcatggcttgaatgctctttgagtacagctgaaatttatctccctgtgcctttctcccgtgggtcctcattttaacacctgaaacagcttcagataaagttacttttatgccagccatttatacatctgaataatctgccacgtatggctccaaacagtctttatttctctgagctaaacatttttacttttgtaattttgttttcctgattttttcctcagtaagtactgtatatgttccctttacctctctggtgcatagaatcttagaatgttaagatttggagaggactagagtttgactagtctaggttcttcatctaaccagtattgcttccatactgattacataattgaaactgagatatagacatattttggagcaacacaaatattttaagtatttcactgaggaagtttagatttagtaaatttttaaaagtccttcatcgttcattcttcattaaaatgtatttgctgatgagtatcttattaaaagggggcacattggaaagatatgttttatgatgcagtgcatgtatgctaaagaaagatcttcagattcttataacattcttattaagaatttgattctaaagccaagctacctaggcttcaatcctgcacctgccacatactaggtgtaaattacttaatcttgggttaattacttaatctctgtgtgcctcagtttctgtatttctaaagcaaggttaatgataaggtgggtgttaggaggtttaaatgagttagtacttccaaaccactaagagttatgcctggcccatagtaaacatttcgtatatggtagatgctgctactgctgctgccaccaccatcactgctactattattattattattgagttctacaagcatctggtgagatgtgtaaagcccctgtgaaagttctcatagaaccttagtaagacaccatgtatttatgatacaagcttcttgcctttttaaaaattttttattttatttaaagcttcttgtcttaatgagagaccctgtataccactctgcactgaaacatgatttgacccagaccgtaacgacatctatggagtaataaagtattttttcataggattttaccgtataagcaattgaagaaatggcagaagacccattagcttttggagtctgttcctttgagaccaacttgctaggaatccatttcctatctttttaaaaagagtaaattaattttcctcattgacattctgtaaacagaatactggcagcttatattttatggaacgtaatgttttaaagtgaacctaatttttcttagtaaactgcttttaataatgcatcagagtaatttttttccctctgttgtcaggttgctatcaagatcatagataagacccagctggatgaagaaaacttgaagaagattttccgggaagttcaaattatgaagatgctttgccacccccatatcatcaggctctaccaggtaggatcattagtgtatagcagatagctgcaaagaacccagaatattgtatgtatggctccctttgaagaaatgtgggtgggtgaacatctgtgactttttttgtttctatgttaatcctgctatctttcctacccttctgtttacgcgctcagcacttagtatcctcaagtttcccctggccatttactagtacgttttccttacccaggtaggtctttttaatttgttctttaaaatttgatgccattcttagcaacaactacacaaaatgttaattcagaagatgatgagaatttattttatttagttcagagttctaacacaggatgggaaactcaaaaagaagagaatttagagaggtgaaaagttagagatgaatataacatttttttaatagcattatttgaatactagtttctgtgatcatgttataaattgttatggcaaaggactgcttcttggatcaatcaaaacctacctcttttctattctaataggattgtagacttagttttccaaggtagtaattattttgataatcaagagaccagatcaagtgaccagatctctccaataggagagatttctattttagttttttttttttttggtcttcccaagaaacatgcatatttcatgccatcatcaaaatgattccctagcataactacaaaagcagtaaatctgatggctggaatttcaagcgggataggaggagaggaccttgccttagcaggctggtgaaagagatattttgggagaggtggggcttcgggatgcttctcaaattgcaatgtgttggcagccgagaactttgcctctgcataggcccaactctacttgctgctttctgccagaacagccatctcttagttctgaaggacgtggccacccacttggttattttgctgctgttagtctgcagtaaatggttactggcccagacataggaccatgtgtaaaagtggagaaagtacacccaaggctctatgggcaagctttcgtagcctcttagttttatggaaaagaaaacatgttgtgatattaacatgtgtggttaaaactacagcgttagagctcttccctggcatcagctgctcacataatgaaattaggtcaacaggagcagacctgttgaaatttatcagcctaaattatgttgaacaacgcctaccttctgccccacaagcaaacttatgaaagcttcctggtgctgcctgaagacctatatctgtgagctcacaggtgtctaacctcagcttccttcctatcctgatgggctgaataaatttcttgaccttaccttttaaaataaatcatctttaaataattgtggggcttaggctgacctttctcaagaggttgacttatagctattacccttgtaactgaattctgcaagtttgcctgtcttacccaagattagcctatgaggatttccacaggtccagtgctagctttgagcagtgccttctttcaagctttaattttgctttctggcagctgggttttttaaattttatttatttatttatttatttatttttgagacgaagtctcactctgttgcccgggctggagtgcagtggcatgatctctgctcactgcagcctgcgcctcctgggttcaagtgattctactgcctcagccttccaagtagctgggatcacaggcatgtgccaccacgcccagctaatttttgtatttttagtagaaacggggtttcactgtgttggccaggctggtctcgaactcctaatctcaagtgatccacccacctcggcctcccaaagtgctgggattacaggcgtgagccactgcgcctggccggaactgaatttttaattgtatttagttttaattaatttaagtgtaaaactaaaaataattttaaaaagaattgttgaaatgatagtattttggatatattggggtaaataaaaagtagtattagaattatcttcaccttttcctttttcctttttaaatgtggctactagaaaagttaaaataatatatgcagttcatattatatttctattggacagcactgttgtagaaagatatacaataagcagagaacagtgttcctctggggattgagatggaggagattgggaagaggaaagcctttggtcttttgttttataatgagtgtatgtaatcattattacttttaaaaatgtttgatggaaaatgtaaaaaggaagaaaggactgacaacatactacaatgaattttaaaaaggagcaacaaagggaccaagacaaaacacaaatcacttacgttactttaaaaggttgagtattttaaattactgttctctttttttcaaataaatgggcagtggaaaggaaagttgtcatttctataaaaaaaagaaagacatatgtgatttctgtggcgttcttatgtgactcccattattttccccaaaggcttctttttgctttagtttttttttttttgatttgatagggcatttttgtgcttcagatgattgatgttgaatctgaagtttaagttttggttcttgacaacttctttgcctctcagttttatggagcttaagagattgcagagacctcatggaacatcaaaaagcctatctctctcaagcaataaatgtttcctacttttaagaacttggaggaatatctaattttccctttcttcttaataacatttatatttgtttccccaaaaatgttttaaattttctttaatctatagtggttattaatatttcaaatgagaaaagaggagtcattagtttatcttcctgtatcagcctgtcatttgtgtcactgtctgtcactttcctgcctttgcaccaggttatggagacagaacggatgatttatctggtgacagaatatgctagtggaggggaaatatttggtaagtacatttattgcattctttaaacagctattgagcacactatggcaaacctaaaatagctgttcagtgcctttgtcacttgagcagcagtcacttgatgctgttcttcaatcctgccattttctatcaacaaaggcattttaatttgttttgattaatctagtaaaatccctttaacacatttgtttccttagcaaaggtgttttgtttatttcagtcaggcgctgacagttgagattaaagatctccaaaaacaagcatcctttctgaacgtgggacttagggtctttcctgtttgcaggttttaattgaggttaccaagtgcgacagaactcacacaagtgtgtgggcctctgttgtgtcagaaagagccacttagagcacataatctcacccgagtgcgttccttaaactttgtttaaatataacatgtaactatattatttaccatgtgttcacagttcccctcagtaattcttgtaattttgggggttctgccttcagtagctatattttcctctcacacttagctttagcacaatgtcagaaataagcaagagactttgttactgacaaatctgatttttaagatgctaaaaactgacaaaacgattttttttctaacagtgataaatggagccaagtagagttaaagggtaaacttccaaatctaaattgatgtgtcttttattttttcttttggcaactaactacagagaaaagtttctttatatactttatttgtctaatttcctcattttaaaaaaaatttatcaatatgaacacttgctagtttaaaattttttaatttttattttaaacatttgctccttcctgcacgataaaatgtatttaaaagcatagaatcacttttaaaatgaatcttcttattaatgactagtcagttgtggctgcatggatgtgtgtgtgtgtgtgtttgtgtttttaaagtttccctagcgatctagtgtttttttgtgtgtcaaagtatctttagggtaagtgctagtcctttttaaaagaggtatcattatttcttaattttatatttaattggctttgtatatgtgattagttaatgtcaaagctaatggtgatagaaatttatactcaatatagtatgggaggggatactttattttaaagaaatgaaagcattacaagatttgaaggatagcattgtttgtcaagaaggtatagtaggccttcactatgtatgataattatatgccaatcatgtgccttggagatgctgactcaattaagacactggttttcctttccgtggagaaatctggtggaaaacagacagggaaatcaacatattactttgaagatgagaatggaaactgtaaaactctgtatagtagagaacagtagtgcagatggcagtttggttaactcttggagatcagggaaatcttcctggagggcatggttatatggaaatttatgaaccagaaaatgaaagcacaagagagaatatttggagagagagaaatagcagtcatgttattgggagactatactatggtctgacattccaggcacatgttatgataaacctgccttaattaagatcacaaatgtatacaaaggcaaatagaaaactttcattatctagataaggttttttctttggacaaggtattgctctgctgccctggctggaatgcagtggtgcaatcctagctcactgcagcctcgaactcctgggctcaagtgatcctcctgcctcagccatctgagtagctgatactatagctgtgcactagcatacctggctaatttttaaatttttagtagagacgggggtctcactatattgttcaggctggaagatacctttttacaagttttattctataaaaagtcaaacatctcccaaatccttgagctgcctgttaggtattttatttcatagaacgacatttattggtggggaaacaatggtaatttggggagaaaaaagatcatgtcatcttaatgtttgtaataaaaaaagacccaaacacagggcacatcaatctaccttactctttaagaaagcagattttatttatttatttatttatttatttatttatttatttatttattcttttttgagctagggtcttggctctgttgaccaggtgaagtgcagtaacgggatcacagctcagtgcacccccagcttcctgggctcaagtaatcctcctgccttagcttcctgagtagctgggactgtaggtatacaccaccatgccaggctaatttttaaatttttatagcgattaggtctcattatgttgcccaggctggttgtgaactcctgggctgtagcaatcctcctgccttggcctcccaaagtgttgggattataggcatgagctactgcacccagcaggaagcagtattagagagatccgtttcttggtcctggacttcatgtgaatgtacctcaagggatgaacaaacagaataccacttctgataatgttattttaaaaacaaaatattttaggttggtgaaaaagtaattgtggcttttgtcattgaaagtaatggcaaaaaccgcaattacttttgcaccaacctataattatatattgtaacacatattatgtaatatataacaatagaatttgaaatgttattattgatactattaagtaatattattataaaagatccagatgtggaagaaaatagtgtattacctaaagaaattattgagactgcacagggatagaactgtctcatgagctctgatttttaaaaatgtctgtgtaaaaaagatgaaaggggcttagtcaagaaaacctgggctttggatgtatttagacctaggtttgaatcagatctctgtcacctatttgcccttttacttagagcaaattactagatgattctggtgcacaggttccaggtctgtataaggtaagatctagaatatttgtattatagttgtgaagattaaatgagatcgcatatatagagctctagcacagtgcttccttacgccttcatgtgagagagagatcaacttctgccgtcaaggtgtgaggagctctgctgacctgccttgcttgctgaaacaagtgaaaactattaaagaaaacaaaacccagtcatttaaagtctctggaaatcgtcctaagagtaagcagaaaatgaaggaacattattcaagaacatctgtgcaaattcggtaagaaacaaagtctggtcagcaaggtggaaattcccgtccaggctactgcagccaagaacgcagggcttccttctgtcaaaagacaaaattgcaagtttagtttgatgatcccagttggctttatttgcgattctagaatcggacaacatttcatttcatagaataagtgttccagtaagttgagcagaagagtttggcttatggacagaagggcttaagaagtctgaacagtgtattggttacttttaaacagaacaatagaaaattaaccagttaacatcaggttacttcgggctaccttttttagtaaggattaaagcagagggaacttcatcattgtgccagttaaagattttagactgggctgtttgggaaattggctgttatctctttctcctgatttctcaggtcagataacaacctagttttcgctttggaactttagcatgagtgactccattttgatatttagtttggtctgttggtgcctagtgcagaagtttattcgaaaacaatggtctcctgtaatttttatttgtcacttctcctcaattctctccagcatctgaatagcagctttcttcccaggaggatttggacatcagcaattctcattctgccccgagctgcctattgctgagtcctggagaagtgcagttaagagatgggggccccttcttctactcagcccccacttgtggaacttgatcaggtatgccgagaatactaggacccagatcactcttgccttgggtattaagacagtggtttcactgtcttttgctgctaggagaggcaagctgagaggaccccaggctgctgtcctcccccgctctccatccaccaaactctcagttcctagagtgggagcgtcactcagagaagtttgctgttgtccccaaccccagctccagagccctaactctgagatttttacctgtggagaaaaacaaaccataaaacagctcctaatttcttcccaaaggaactgacttcatttgcaacagggagtgaagaagttcaaacctgattgtactctcaagaacagtagagggaaaagaaaaaagaaaaagaacagtggaggttgtggtaaaggacatttgagaagagattcatgaaacaggccaaatggtaggtttgctagttcgcagggggagaaccaatgaattaatttagaaagagcttctctgggattagaatgaaaataaatcactggctgggtgcacacctgtaattctagctattcaggcaggaggatggctcgagcctaggagttggaggtcagcataggcaacatagggagaccctgtcttaaataaaaacaaaaataaaacaaaaaaacactgatggcaaaaattatttcttcaaaggaaccagaatttgattgtattgtttgtagaccaatttgtgccccagggcattattcaaaacaaaagggcaatcagccagcaactagtggagtttaacggctgagtatggtcagtaaatgagaggaagaaagtcctagcaaaaacactgtgatcccaaggtaactaactgtaggcataccgaagctgcctgttccagaggaatcacattagaggctgaacactgtaaatatggagaaataaacttcactagaagaatctagcttttagctgggcatggtggcatgcgcctgtagtcatagctccttaggttattgatacgagatctttctaactgtgggcattttacagctataaatttctctctaagcatgctttggctgcatatcatgagttttagtatgccgtattttcattttcattcatttgaaagtattttctgaattcacttttgatgtcttgtttcattatttatttattagtgtgttgtttaattttcacatatttgtgaatttcccgaatgtttcctactcttgatttccaatttcattccattatagttggttgtttttctatcctctatttcataatttctgctataatatttgttatttccttctttctgcttgcttcagttttagtttgttcttcctcttctagtgtcttgaagccaagcagaaagaaggaaataaagattatagcagaaattatgaaatagagaatagaaaaacaatagaggatatcagtgaaaccaaaagatagttctttgaaaaaatcgacaacattgacagatctttagctagattgacgagagagagaagagaaaaagagaagactgaaatgactagaatcagaagtgaaagaaaggaacattactacagtcccttaagaaacaaaaatgggctgggcatggtgactcacgcctataatcccagcactttggtatgctgaggtgggaggattgctttagcccaggagttcagtaccagcatggacaacatagtgagacctcatttctactaaacataaaaaattagccggatgtggtagcatgagcctgtggtcccagctacttaggaggctgaggcaggaggatcacttgagcccaggatgtcaaggctgcagtgagccatgattgtgccaatgcatttcagcctgggcaacagagcaagaccctgtcttaaaaaaaaataaaaatgattataaaggaatattatgaacaactatacatcaacaaatcagctgggcttggtggctcatgcctataatcctagcactttggggggctgaggtgagtggattgcttgacctcaggagttcaagaccagcctgggcaacatggtgaaacaccatctctacaaaaaaaaatagaaaaattagccatgcatggtggtgcacacctgtagtcccagctactcgagaggctgaagtgggaggatcacctgagcctaggaggtggaggttgcagtgagctatgattgcaccactgcactccagtctgggcaacagagtgagaccctgtctcaaaaaaaaaaaaaaagtcagcttagatgaaatggacaaattcctagaaagataccaactgttgaaacaactgacttaagaagaaatagaggccaggcacggtggctcatgcctgtaatcccagcactttgggaggctgaggtgggcagatcacgaggtcaggagatgagaccatcctggctaacacggtgaaaccccgtctctactaaaaatacaaaaaattagctgggcaaggtggtgggcacctgtagtcccagctacttgggaggctgaggcaggagaatggcgtgaacctgggaggcggaacttgcagtgagccgagatcgtgccactgcactccagcctggacaaaagagcaagactctgtctcaaaaaaaaaaaaaatacatacatacatacatacatacatacatacatacatatatatatatatatttccctagctaaagtaaaaaatggtgttctggttgcaaattgatagtctttacttcatttgacctctttgtagcatctgaattcttgactgtttccttctaaagctcttagttttgacttccacaaatgttcaacttctgattcttctattgttcggactgttccttcttagtatcttttgctgggcctcctttctctgactgctagaacatgttgacatgttgtagcatattctctgactttatatatatatataatatataaataataattatatataaaatatataaataattatatattgtatataaataataatttgtatataatatattatatataaataataatttatatataatatattatatataaataataatttatatattatatatatatttttttgagacgaagtctcactctgtggccatgctggagtgcagtggcgcaatctcggctcactgcaagctccacgtcccaggttcagaccattctgcctcagtctcccaagtagctgggactacaggcactcgccactatgcccggctaattttttgtatttttagtagagatgggttttcaccatgttagccaggatggtcttgatctcctgaccttgtgatctgcccgcctcagcctcccaaagtgctgggattacaggcgtgagccaacgctcctggcctggctagggaaatattaataaaatggcagaggtggagacagatgttaaagaagtggaggcattgggtgctattttgagaagcattgctctgaaggaaagaagggagaagacagtagtttgtacaggaagcaaggttgttgggagagagttctccacggatatctcacatttcttcatgtttcatgagtaaggcactgactgcctttgttctagactgttttctcaaggatgtttatatagtgagcacccttgaaagacagagatagtatctccctccacagctcaaagatctgtttattgcccagtgtgaaagattccctaagctccaagctcagggttcctctcctataatggacccgactgtgtgtgtaggcgtcatctggtcccctttgcagtgccctgtgaaaattagggcttggggaactgaagcaaatatgttgatgttcatgctgcttgctgtgccgtaagtgacaaagtcttttgtctctgacagaggggtttcctatcttctgccatcacccatgtaattgtggcaggttgagttattagcttgcagaaatggtgagatctcagaccctcttgatacttgacaggaaataaggaggggtttgttttattttgattcgtttaaatatgagacttgattacaggttgaggttgaagatgcagtagtggggaagatgagtttgaaaataattgatatggaaaacaatctctaaagcaagatcaatgaggaactgagggatgagcataattgcaagaaattagccttgcacatgaagaaggatagaagataaaggatgcatgtgggtgtaggcaattttttaggtagaagaatgtgaaaaagatgtttcatgcttttcatataattttctattgagagtagcagattatgttatcagatgaattaagggtgagagggtagagacctggatcagcatggagaaagtgaaattagctgcagggaggaatgagagagagggcaattaagaatagctaaataagttgattaaaggccttagagataggaaacagttaacttgttattccattatacagaattgagtgatttttttcccctaccaccaatgctcaattacctgtgtgtaaattgaataagacagacaattggactgatcctgtttagagtttacaggacatgtgcaaatgaagaggcaacaggtgacaagggttttgaggccactagcaataatgtaattaaagtgtgggcttttgggcttaggctgaagtgggttgggaaggcaagtgagaccaggatgactgatcttaaataagaatttttaaagctggctgggcatggtggatcatacctctaatcccagcactttgggaggcccaggcaggcagatcactggagcccaggagtttgaaaccagcctgggcaacatggagaaattctctgttatttaaaaaaaaaaaaaaaaaaaaaaaagaattcatgaagctacaggtctagatgaagttgaaaagcaagtgtgttagtgtgttgggcatatgaaggttggagagatgaaagtctaaaactacactgcccaacacgacagccactgtccacatgttgctgttgtgctcacgcctgtaatcccagcactttgggaggctgaggcgggcggatcacgaggtcaggagattgagaacatcctggctaacatggtgaaaccctgtctctactaaaaatacaaaaaatgagccaggtgtggtggcggacgcctgtagtcccagctactcaggaggctgaggcaggagaatgttgtgaacccgggaggcggagcttgcagtgagtcgagatccagccactgcactccagcctacgggacagagcgagactccgtctcaaaaaaaaaaaagaaaaaagaaatgtagctagtgcccctgaggaactgagttttgaatttaatttacatttaaatttaaaaactgaggtattatgaaaagttttaggccagctgtgagagttagccaactacagactaagagagcatagtctccaagatcacccctcactctgctgtcacctacaagttcaggaaattcccaaaaccggttcagtttgataaatagctagaaggattcacaaaattcactgaaagctaatatactcccggtttggtttaatacaggtaaaggatacagattaaaatcagccagggaaggaagtgcagagtccaggagaagtacgaaatgcagaacttttgttgtcctttccatgtggatacaagatatgttacactcctggtattgatgtgttacattgtgtacagagcagtacccatcagggaagctcagcccagcctctgtgttcagtgtttttattttacataagcctgattgattgattgattgattgctcacatgattgatctgtgtgtctcggtcaactgatgctcgtgacccaaagcccacacgtcaagtcacgctgttgtgcagccaacaatgtatatccagcctctaccctgagactatatgggtgtggcgaatcccagcctaaatcatgttattagactctctggcatgacccaaggctcccagacagagacactccgagcagacataacattccaagaacccagagactgcttcccagaagccaagggaaggccaggccttctctttgggtaaggccaagttcttcactctgcagagtctaaaatatttttctattaaacgcaactcttattttgataaaactacattacaccttggctatagacaacttagtattttagttgtgatacgcttataaagtataaaatacacagtggattttgaagacttactatgaaaaaagaaggtaccctatctcattgctattatttttattgattacattctgaaatgatcttttgatgtatttggttaaagtaagttactgattttcaaaatgagtgctttttttttttacttttaaatgtgattacaagaaaatctgaaattatataaatggcacacattgtattttatttgatagtgctaatttagaaggttaagataagagagggggaagtttagaatttcagagttaaaataatgtcaagcaaagacaagttcaagatgtggccataggaatagttgctatacattggtagagttctaggtcaccggagagaaagaaggctaaaggaaccatgaagcaaactgtcaaataagttatcctcattgatgttcacattccctaggtgatggcagaatttgagtggagggcgcaatagactacaaactaggtttcggtgagtgtctttgatgaatgtgaaggcaagagaggcagaaagggagtataccagctgcccaaacatatggcgtagtattgttagtggagaccttgaagaggttacattaattcctaatccctggtggaatattgtccctttttacctcaagaggcctgtaaaggaattgctagtcttagaggagttggttggaaaagtgattatcaatgggaggtgttggccccgatgtaaaagccctgctgcccttctttgccctctttgtccctccttaacttttgtgacccatctcaaatgttattccccctgtgaactctgctctgattttgccaaatagctaattacctttttttcttcactttgaacatacctctcctatagcactttttgaagtaattttttttttcatttctaagtttgtcttttactggtaatttagactctggtccatttctttttcctttgactattttccaaggggcttgattgaatccatgaatgtggtgcccacagatagagagggaagactatatatgctgaattcaatcacttatcaccacctccataactaccaatctggtctaagccaccatcatgtcttgctaagatcactgcagtagcctttaaatagtctctctgaatctgccctgacttcccccccgattatagctagaaggattcttttaaaattcaagtgggaccttaccactgagctacttctgttggctttcccatctatttggaataaatttataattcctactatagcctataagattatataatttggtctcctgctgtctctcaccacagctcctagcactctcctcctcacatcggcatctttctttttcattaaacccttcgctgtgctcccgctttaagaccatatattccatttcttcttcctgaattactcttttcctacatatccacatggctgtctctcctgtttcttgccagtctcttatcaaatgttatctcattagagaggtgtttgctcaccatgctgtctaaaatctcattcttcctactggcccattgctctgtagtctctgtcttgctttacttttctttttggtttttatcatgaactgacatatatttatttgtttttttactgtcttgagtcaataaaatttacgtgccattaaagactttgtcatttttgtttcctaccaaatcttcaatactcaaaatagtgcctacagggaatgcatgttccataaatatttattgataagttgaataaaatactaagtgaatgaaagaacatcactggattgctgattatggcgtttaagttttattcatctgtgtcttccttgtttaatgtagtgtctaacatatagtaggcactcagtaaatgtatttcattgtgtcataatgaaatataactaagtcaagcatggaatttgcatgttatttaataacatcttagttaaatgagtttttgacatggggaaagcaccttttttgggtaactgtatagagaaagacatattgaagattatgaattctaagcagtgtaataaatagacttcagtaattggttatttcatgaatatttactactcattcaattgacttatccagtttatttttgcatactattcagccttatattatgaaggagcagtgatgacagtgtgggtttatttaatgttacaaacagaattgagaaactggttagttttgtaaaccactaaatttataatttaaaacttccacactctgatatctttagatatatatccccaaacttcctatttgagaccatgaagtcataaatccagcactttatcaagcaaaatttcctgaataccaggcagaactcatgggcatttaaaacaaattactaatttaagaggagtctgttgaaatgtgtatgatttattatgaacattctcagtgtcttaaaaataatatttcttaatggtgccaacatgtatggaaccctgaacttctcacaaagccattcatttatgccataggtcactcaaaaactattaggacagaggatcagaaagactaacttgcataaccattgtgtacaagatactgtgttaagtgtttcacataggttattttatcttgtgactgcctggaagttcaagaatacaacacatttgtttgaacactactatgtactggtttgttgtggctttttttttttttttacatgtttttatttaatccgcagcatcctttatgtcttcacaactaaactaccattttcccactagtttatttactcctttgattattaaaaaaggtattttcggccaggcgcggtggctcacgcctgtaatcccagcactttgggaggctgaggcgggcggatcacgaggtcaggagattgagaccatcctggctaacatggtgaaagcccgtctctaccgaaaatacaaaaaattagccgagcatggtggtgggcacctgtggtcccaactacttgggaggctgaggcaggaaaatggcctgaacccaggaggcggagcttgcagtgagccgagattgcgccactgcactccagcctgggggacagagcgaggctccgtctcaaaaaaatcaaaacaaaacaaacaaacaaacaaacaaaaacttagctattttctaagggtctcctaacaagcaagtaaccatgctactgaactttagtcactctgaatcaaaataattgacttgtatttatttccctaattaatttcccatttattattattcattttttgttctgttttcttaatatcagatatgactaacatttattttatttatttatccttttttttttttaatgcccccaccaggagtgtgcaagtggagagatgcatggatgaaggaggggagctggcgggggtgggtctgtgaccagcatttatattgtaactggccaagatgtatgaggaagccacctgtgctttgacctcactttacactaaaacattcatttatagtctgatcatccagtcatttctaccatgacataaaaataagagccccagagaacaaatcaaattatttttgctgtattgagtatatataaatcccaaagggccaggcatggtggctcacttctgtaatcccagcactttgggaggctgagatgggcagatcacttgagatcaggagttcaagaccagcctggccaacatgttgaaaccccgtctttactaaaaaatacaaaaattagctgggcgtggtgacacacgcctatagtcccacctactcgggaggctgaggtacaagaatcacttgaatatgggaggcagaggttgcagtgagccaagatcgcaccactgcactccagcctgggtgacagagtgagactctgtctcaaaaaaaaaaaaaaaacaaaaaaaccttaaaggaatatttttgcctggctcctacattaacatttactttctctgaaaatcataaccctgtgtttgttattatccagtgtctacaaacagcccagcttctatagttaggtaaagtaaattcaatatcagttgttctttcataatcaaaacagaagtctacaatgccattcttacatacaacagcattgacagtaattccttactatcatgtaatagccagggcatgtttagctttctgcagatgtttcaaaacatcttcttatagtttgtacaaattacgatgcaagaaatccatacatccattgagttgaaaaatgtctaaattttttataatctaaatttttaaataatctgtgacaacctcatctcttccctacaaacatttactttttttctatgctatctatttatgtaagaaactggattgtcttaaaaaatgtcctacatttggaatttggctgatcatatatttattgtgtcattcaacatgttcctgtagttcagtgtttcttggaaagtggaagttatatttaggaatttgcttagttcagtttttggaggggaagcaggagtgctccatagttttttattgcatcacttcaagagttgtataatatctgattttcccacttttagtgatacttagaataatcttcaggtatagttattgttcaccaaattgatcctttataaagtttcccatcagtcttttacgtaatgttttatctactcctgtcatttagttgcctagctatttcattagaagttgcaaggccgggcttggtggctcacacctgtaatcccagcactttgggaggccgaggcaggtggatcacgaggtcaggattttcagaccagcctgaccaacatggtgaaaccttgtctttattgaaaatacaaaaattaaccagccatggtgatgcacacctgtagtcccagctacttgggaggctgaggcaggagaattgcttgaacccaggaggcggaggttgcagtgagctgagtccgcgccattgcactacagcctgggtgacagagtgagacttgtcttaaaaacaaaacaaaacaaaaaagaagttgcaaaatggtgattatttgaattctctcattcattcaacatttatgagttattcttcttctgtaaagaactttgccttataaactacttagaaattatagtaatgacaagataaatgcttgattctttcttttccttatgtatcagtttttagaataatgaattggttctctgcaatctccagtggagactaaggaagttggttttctattttgtaacataattatgcaattatggattttagtatattttatgtgcttcagtccattaagtcattcttcttttgaaactgaaattattccacttagccagtgggagcctggagcctcttcaggctgactcctgtgtccttttgatgtgagctcaatagtctttgatatttttgttgcttttaggcaagatgtcctatgcttatcttgaacatttcctgtaccagacatggaatcaaacatttctcctaggaattctggtttggtctcctctcctctcctctcctctcctctcctctcctctcctcccctcccctctcctctcctctcctcccctctcctctcctcccctcccctcccctcccctcccctcccctcccctcccctccccttccgtcccgtccccttcttttcattttccttttctttttctctccttctcttctcctctcctctcctctcctctcctcccctcccctcccctcccgtcccgtccccttcttttcattttccttttctttttctctccttctcctctcctctcctctcctcccctcccctcccctcccctcccctcccctcccgtccccttcttttccttttccttttctttttctctccttctcttctcctctcctctcctctcctctcctctcctctcctctcctctcttctcccctcttctcccttcccctcccctcccctcccctcccctcccctcccctctagatagagtctcactctgttgcccaggcgggagtgcagtggtgtgaactcagctcactgcagcctccgcctcccaggttcaagtgattctcctgcctcagcctcccgagtagctgggactacaggcacacgccaccatgcccagctaatttttgtatttttagttgagacggggtttcaccatgttggccaagctggtcttgaactcctggcctcaagtgatccacttgtctcagcctcccagagcactgggattacaggcgtgagccaccgtgcccagccaactctggtttctttaaatggaaaatagcatttaaagaccagaatttgggcctcagggatgctcgttagtgctactgggttattattgcttagaggaggggacagagctatgaaatatatatttttaatggagaggaaaatgaaacaagtttatactaacactccaattaaaatgtaagatttcagcatttttacttcttaaatattatatctttagttctcttttcccttatgttgaaaattgtggttccagatgacgttaacatagtcacttttttgatatgagtgaggggagagactgattgattgaaaacaataccagtagtattacaaataataaggagacttgtggttctttttgttcttaggatatatcccatgaagaattgtcttagtctatttgggctgctctagcagaatacttttaactttatgtatagttaggtattatgtaccgtaatctactgattttttacaggttgctttcaatttttagaaatgttcttctatttgattcaattctgaattgtttcagttatgtaagacattacttgtttccaaagttaaagctacaaaacaaggtgcattcatatgtctggcttccacaccttttccgtaagtaaccatttatttaacattattccttttggcaaatctaaataaatatatgcatatacatacacatgcatatttgtattttcccttccttcctacacaaacagaaacacactctacatatttttctacgtcttgcagtgcttcatggatataaacccatccatggaccaaaaatccatgggctaggagggaagacacacaagataagaaattactgtaatataattgtttgctgatgtcatagaggcagatagattaaatgtcattagacacaaattatggagcagtttttctagggcgggtgagtaggttagggttagcttcagagaaatgacctttaagctggactttaaaggataaccttgaattccaaagttcagctggggatggggatgagaataggagacaggcattccagcaagaagtaaaaccctgagcaaagtgtacagcatgttggtgaaacagcaagtacacatgcaggtgaactatgtttatgaattagaactatatattgtaggctgtgagattttgttgaaaagttctaagttaaatgaatgacacgaccaaagaaatgtgttagaataactggtaacaatgtaaaggatgatgggcagaaagggaaacctgaaggatagagaagaggaggcatactctttaaatgtaagtcgaaaatttagcgtattttgtaagtaattggatgttaagagtgaggaagaaagaggagttgaagatgattccaaagtttctttcatggacatctagatgatggtaatagggattcaggaggagaactaggttacagcaggaagataaagagaacgttagttcaggccaggtgctgtggctcacgcctgtaatcccagaactttgggaggctgaggtaggtgcattacttgaggtaaagagtttgagaccagcctgaccaacatggtgaaactccgtctctattaaaaatacaaaaattagctgggcatggtggcacctgttgtcccagtgacttgggaggctgagataggagaatcacttgaacctgggaggcagaggttgtgatgagccgagatcacaccaccccgcttcagcctggatgacaaagtgagtctctgtctcaaaaatgcaaacaaacaaagagaacgctagttcagtttggtccatgttaaatttagatatctttcaaatttttttaaattataaaaataaagatgggatctcactatgttgcccaggctgatcttgaactcctggactcaagtgatcctcccttcttggcctcccagtgtgctgggatcacaggtgtgagccaccacacctggcctaaatttagatatatttatgatacctagatgaagtttttcagtagacatttgaaaacaggagtttggagctcaggaggttagatgactagaaacagtgaatttggaagccattagccttatgtattggcattagttaccatctcatgctacataaaattccctggagacatgtacttgagctgttccctttggaagactagttagagctaggattgcaacattttgatagtcaatattttaacaaatcgaaaggtacctctgttgacttggagcatgcaggttatactaggatctgattagaacctctgttacaggattagcaaaccaagtattgctaataccttggtgtagcatgagaaacattggtactatatgagaaaacttgaataacatttttgaaaggccttttgtaatatatgagattctatttcaaagcctacctgggtttatgcttagtctagaaatactttttaagaagccataagaaaacaaatccttccttatacattactgtgaatggacttgatatgaaaaggatggcatgttttttatgaagacaacttaaaaagtgtgtagtttacaaaccttgtttaatagcaaaatgaagagtaaaaaaagtgtttttgtaaaagcttatagtctcttctctcattggtattccttgagttaatttataataataaattaataagtattaataatcaatataattaataataatttatcattattaataatagtttaaagatagggtcttgccctgttgcccaggctggagtgcagtggcatgctcatagctcactgcagcctcgaactcctgggttcaagtgatcctcctgcctcagcctctcaacagattaccaggtgcataccaccatgcctggctgattttgtttgtttgttttctgagactgggtctcactctgtcgcccaggctggagtgcagtggcacgatctcggcttactgcaaactctgctttccaggttcaagcgattctcctgcctcagcctcccgaatagctgggactataggcatgcgccaccacacccggctaattttttttttgtattttgagtagaaatgaggtttcaccatgttggccaggctggtcttgaactcctgacctcaggtaatccacctacctctgcctcccaaagtgctgggattatagaggtgagccaccgcgcccggcctatgcctggctgatttttaaattttttgtagcaatggggtcttgctttgctgttcaggctggtctttaagtgcggggattataggtgtgaaccaccatgcctggcctaatctataattattaagtatccatcataggcagagtactattttatgtgtaataaggaggcatagaaaaaaatagttctagttccacattttcaaaactaaagcatatcctgtgataatgtgtttcacgaagaaattgtgttgtctcaaaactctcagggaaaaagtttagtttatttggaagagacagaagaaaatttagtatactttttgcttgtatgccaagtacagacttggatatatgaagacaggtcatatatgttagtgtgcctttttagattagttgggaagactcttgaattcattgaggtgagcaatagcatttagcattcattttgctaataaaatctaaggttcaggaaatagttttaataaacagggataggaatgtattcaatcatcttttgttcttttaataaatacttattaagtgcttaatatgcgtcagataccgttcattgtactagacacagtattgaacaaaatggcaagaatgcctgccctcatggagcttgttttctagtggagaagacagatagtacaccaactaagtagggtagaatgtgtcatttgttagaaaatgataaagtgcgtaggggaagtgaatatgaaattgaaatatcaggaggtaagctgacaatagagataggaaagacctctctgagaaggttatacttttgtaaaagatcatgcagctatttggggaggagcattccaagtagaaagaatagaaagaacaaaggccctgtggcaggagtatttctgctgtgtttgagaaatagcaaggtggcatatgtgattatagtagaacaaaagagccagtgaaagaaggtaaggtcaaaggtcatgagctgggaacccatccggaggttttgacagaaaaaaatgatgtgatcttatttaagatttaagagaattaccctgctacatagaaatgcagacttaattgtttgagtgtaggagtttgaggctacaatgagccatgattgggccactgcactccaacatgggcaacacagcaagaccttgtctcttgagagagagagagagagagaggaaggaagaaaagagaaaatgcaaacttatattcatataaaattctatacacaattgtttaattgttgatagcagctttctttgtaatagctaagaactggaaacaaccaaaatgtccttcagtaggtgaatggataaggaaactcttgtacatctattccatgctgtactactcagcagtaaaaaggagcaaatggggccaggtgcagtggctcacgcctgtaatcccagcactttggggggctgaggcgggtggagcacgaggtcaggagtttgagaccagcctggccaatatggtgaaaccctgtctctactaaaaatgcaaaaattagccgggtgtggtggcgcacgcctgtagtcccagctacttgggaggctgaggcaggagaatcacttgaacccaggaggtggaggttgcagtgagccaagattgcaccactgcactccatcctgggtgacagtgagactctgcctcaaaaaagaaaaaaaaaaaaaaaaggagcaaggttaatagacacatcaacttggatggatcttaaggacattatggtgactaaaaatatcaggccagtcatggtggtttatgcctgtaatcccaacactttggaaggcctaggcaggaatatcacttgagcccatgagtttgagaccagcttggtcaacttggtgaaaccctacctctaaataattagctaggcatggtggcagatgcttgtagtcctagctgcttgggaggctgaggtgggaggaggtcaaggctgcagtgagccgtgatcttgccactgcagtccagcttgaatgactctttctcaaaaaacaaacaaacaaaaacaagaaaataaaaaagccaatctcaaaaggtcgccgactgtatgattctgtttatatagtgttcttaaaatgatgaaattacataaatgggaaacagattagtggtttctaggagttagggatggtggggcatagaggaacaagcatgactgtgtaggggtagtgcaacggagatctttgtggtggtgaaatatttttgtatctttttttgatacaaaaaattgaacaggggaaaggcaagatccgtttacacatgcaggcatatatgtgagagtactcagtaatgactgagtccgaatagttgtaattgctattgtagtaattgcagttgttgttccacaaatctacacatgtgataaagtgacatagaactatacatacgcattgtacccatgtcaaattctgggttttgatatcgttctataattatataagatttaaccattggcggaaactgggcgaagggtacacgggacctctctgcactgtctttgcaacttcctgtgaatctataattatctcaaaataaaaagtttttaaaaaaagattactaccttggctgctcttttgaggagtaatcctaggaggttattgcagaaatctaggagtgaggtagttgctgttaaatgaggctggtggcactagagtggagtgaaggcaggggtgagaaatagttggattctgaatatgatttgaacgtagagttaatagaatttgctgatggataggatgcagggtgtgagagaaagagaagaatgaaagatgccataaaagtttttggcctggtcaatggaggagcaaagaaaagagatagtaacaagaagcagcaacaagtcaagaagcccggtaagaggtagttggattcttggcaagaaagacaaaatgacaaaccctcttcctctagtcagtggcagccacgcctgggagttagaggacaataggatattaaagtgactgcactcttattaacctgcttagggggagctgagttatcttggcctcgccctgcttttttggaaagaagcgtttgtttgataaacaggaagtcgtttccatgggtgtaggaagaagaaatgatagaactgagtggcaaagcaaagaactactagctgtggttagtttggaattggcagaagttttttcaggtagtcacctaagatgaagatgagcacacatactgccttttcccttttctaggctgggttcattcttcactgaaatgtggtatttctgcctattgcttgtcctgctgtcagggtatgttcattttcagctagtgttttgcatcaactatgagttgtagacttagcagacaaatggagacactgtctgtttagagtggaaaagtgacttattttaagaaatgttggctccgcaccactatcccattagtggcatacctctgacactccattgaagctggcctagggaaggtaagactggcttctgtgtatttttgctctttgaaaggtcagaacctaaatgtaccacaagatattttcttcctgagtaagattgggacaaaattacaaacagtgaattctgaagcaaacttacgtgctggtgctctaatactttagaaaattcaaaatcgatttcctgtacttctaacaatattactcttcgtcgggtatgtaaatctcttagtgtcacttacttcttttcattttgcaaggaagggcagaccaaaaagattaaagaagaccaatgccaagtcatggtcatgggaaagtgagaaagagaatttaaaagtactttttacttttttttactttgttttactttttacttttgaaaagcacttgaaacaggagaaccattttttttccttttaaccgagagtcacctcatccctgtctgggtacatgtttggagtgaaattgtggtcaaagaaaactttaaatttgtcccagacctataatggcaactaaatagataagtagttgattgatggtgaaaaaagcttagtgtgatggacttgactttatgcagcaggtgtctacttgaggtttgtttagattggtgggggtggggagggggcaggactctagctaggggcatggctgcagtgtggatgattgggatgaggatatgggtagtatttgtgtctcagtatttaggagaggtagttcactgaattgcctggaagaagcagaacaactctggagttccttgcaattggagtttatcctgacaaggttcaacgtacattttactttgcgtattgagtggattcaggagccatttggtttcatttgccttctgaaagtactgcagtatttgtaaaaatgctgtgactatgtgttaagtccaggctggtctacagctctggatttcttcactgaaagttaaatatcacatttgaacttgaagaatgtttgctgcctgcctctagagcatatacgaatataaagcagctatttgtcagcaggcagctgaaaggcgattttcagcagggagtgaaaaccactgcaggctgctggcttcctggcacacccactagacctcgtaggtttacagtgaaagcaaaccaatgggagtaggggttggggggataagatgggcaaaaatcagggcagaggctgaggtctgaatgcgattgagccactggaaggagcttgcatgtgaagagcacagtgctcccaaagagaagaaaacttgaaccctaaacacaatggctaggagcaaatatctaatgtgaacactttaaaaaaaaaaagtgatttgttccgtaagtgtatttagagtccaggggaaaaaaaaaagtgatttgtttatcttctttgtatctataactataggggtactgaaggtaactttggggaaagtattatagtttaagctgtactacccagtgcgctgttacagctaccttttaaccagaaccattaacagtgacaatcgatgtgtagaaaatcacctttaagctctgcagaatcctgaaggactttgtgctctattgactagatgtttaagtattccctatatagtattcagtggaccttttcaaaaatgtcttttgcaacatctttgaaagtgaaagttttaacgtatgatactcttaatcagagtacacgtttattcccaaatattctgttctttctttgggtatagcatgcaacagagtttacttgtatttagaagatcaagaggtgggggtattggcaggataaatgatttgtccagggacaactgatgtgtcactgtagagataaaacagaactaggctgcattccagcagcttctggcccgtataacagttttgagaactttccaatcactttaggaaaacaaggtacttagaaatttataaagactttcttaataaaagaaatcacttattttggaaattgtgaaattaatcattctgcagcatttaagaagcactttgatgtgttctggtaattagtatttactgccagacaaatgtctcttgggcattttaattaatgggtagcttggccaaatgagcttctgatggtaaaccttcataagggtttatttttatgtttctcaagaatagctgtctcttcaaagctctttaattagacaaggtttagcaactaaaacatattattagaataattaggccttgggttaagagaaatagggggtcagaggagcaggtactgttagaaaatggcctcttaaaacatagcattctacctctgatggatggccagttctttcacagcttctgttaagttactctccctagtttggacttcgtgttgtttaaagttcatagcagacctcaccggaagcctaaacacacccgagtgggagcttacttatccccacctctgacctcccagggaaagcttgattctagtccttttaactgctaagtggaagacttcttattttctcctttttcttctattaaatcgataatcttggctataacaatgacttgtatttttgagggagatgcttcaaaagccttgtgtgtggcgaacaaaaattacaataattcctttgaggatctttcttaatgatttatattatctacatataagatatgttcttaaagtgactacagtatttgcattccagaatgttatatttcttgtggtcagaatgcagtttgaattattttgcaatctgctctgtagatgggctggcatctaactccccttcttcaaccttctcccctaccatttcttgccacaagcgctcagtcttggcagttattgctagtaaatatgtgctaccctgaacttcctctttgtggtgaaggaaagatacacctgactggtcctgtgagggagtgagatgtcaccaaaacaattgtgtattctaccaaaactgttgataaatcacaatatatttatctatattccctcatttttcactttcctactgtctcaggatgcttaggatggcaaatatgtccttttcccagctagatcagttgattaaaggacagtgctcatgagactattagacatttctaacagaacaactgtatcatagctgacatttctaatcccactagctgtcatgacctatatgtgttgttggtttgataaagaactgagtcaaagatatgtatgttgttggtttggtataaacctactgctattattagaaagttcttaaagaacctgctaatccatcaaatcatttttgaatattgaggatagcctgctttatagtattatgattttatcacatgtaaattcttttgatataccttagttaacaacatggccaatgaaatgattttatttgagttggtagaaacttcacttggtttttgattgatgttatctgtaaaaattatcattttgtaagaaccatttggtgagccccataaatgcagatataaagatgtaggtatatcgctatgcactccagagaacagttaccgagtaagtgtgtttttatgtcaaatcgaagaactttgagaaagcagaaagatagtaacctaaacagagtgctctgtcgaggagttttctccccctagcagtgacgaatttctgtccaccctttccttaaatgatttaatattggggccttgcttttttacctcctctttaacacaggaaatatttctgatacttatcttcatgtgtgtgtttgctcatgtctgtgcagtcttctgcagtgaggatatgaaaagaaaggtagtgagttctatgacccttgaaaaacaccagaactctcttttcctaatgaaagtacaagtgtgttcttatgcatacttttgtataacaggatttatacttaaaatagtttggatacttattactaatgaattttgatagatgcaaaccaggactatcaatgtgttgttctctcattgctcattttgcctctttaactcactcgagagggccccttgtagccctccttaagtctaccttttgaaattacacaagtgtccaaaatgaaaactgactgtattcttcttcaacacagaccacctggtggcccatggtagaatggcagaaaaggaggcacgtcggaagttcaaacagatcgtcacagctgtctatttttgtcactgtcggaacattgttcatcgtgatttaaaagctgaaaatttacttctggatgccaatctgaatatcaaaatagcaggtgagaactgtactgaggatgtcagatagggacaaaggagcttttccttggggttctataagcaagggattatctgtttccatctcttcagaaagaactattgtgaaagtaaggacaatttaagatgaaaaaaaaaatagcctgaaaattgataaactttaaaagtacttcccctcccctgccctttttttttttttttcgagactgagtctcattgtcgcccaggctggagtgcagtggtgcagtcttgactcactgcagcctccatctcccaggttcaagcgattctcctgcctcagcctcccaagtagctaggattacaggtgcgcatcaccacgcctggctaatttttatacttttagtagagttggggttttgccatgttgggcaggctggtcttgaactcctgacctcaagtgatctgcctgccttggtctcccaaagtgctgggattacaggcgtgagccaccacacccggcctgtttatttttaatgtagtatcagctggaactaggctggggagaaagaagggaaaggtgatatttaaaatactattactttggttaacgggtccttttttacataagaaataaaatatgtaataaagtggaaaggaaaactactaaaattgtataccctctcaccttcacttgagaaggttgatttatgtcactgctgacacagagcatacttattctaaaggctgtaattgtatgataatttaggaaaaatagatcttagagtggcttataggcagtccagctttttgtcttctcaaattttactagtctgcttatctgacagtgccttgagagcacttttcactgccttgatctgttcatgcttaattttagtaaactatcagcattttgcctaatgaatacagactcaccatttactaataaaattaagtgactgcaatctatagagaaactgtaaatatgaaaataagccatttatgtttgccgacactttccggtatagcatcgtgtatccccggtctcccagataaaaggaaggacatctcatatagaaaactaaaatatagctagaatgtaattgtctagaaaaggcaaggtataaagcagttctaaggattttcttccttagtagaggtgggatttgagagtttggatttttatcataggtcaaagttacctaagggtacctttgcagggtcacaattcttctgagagttgcttttgtgtagataagcctgttcacttttacatcctggagcatcacctagctttttatatatctgaaactgacagctacacttttgtttagaactttcatatcatttataagttctttcactcctgcactagcttattacagagtacacaggaattaaaggctttctttatcttatataaaatcatgtttttcctttgctctcatgtcggttttattttctccaaagctctatagatactggtagttcccacaaaggtgtgtggcatggaaaagcctggcaatttcaaaccttcttttgtaattatttgttgtagcttcaattaaattaatactaataatacctactaaacttcacaacccttaaaactgtaataaaagattgattagtgtcttattattactataacaaattaccacaaacttaatgacttggaaaaacacagatttgttagcctgtagttctggaggtcagaagtccaagctgggtctcacagggtgaaagttaaaacagcagcaagggctgttcctcctggaggctctgaaggaaaaatgtgtccttgccttttttagcttctaaaggtcacctgcattctttagctcagccccttccttccttcactccaacctgtggcttccattgtcacatctcctactcctaattccgaccctcctgcttccctcttgcaaggacctttgtcattacattgggctgtctcagataatccaggatcatctctctcccacccccacctttttttgtttttgttttcgagacagggcctcattctgttgcccaggcaggagggcagtggcgtgatctcagctcactgcaacctcaacttcctgagtatctggaactacaggtgcgcgcttctatgcccagctaacttttgtatttttagtagagatggggttttaccatgttggccgtgctggtctcgaactcctggtctccagcgatccacccaccttggcctcccaaagtgctgggagccaccgtgtctgtcctcatctccccattttaagatctttaatcatgttaatacaagtcctttttaccatgtatggtaacacattcacaagtatgggggattgggatatagatgtatttgggggccattattcaacatgccacagatgtcactgtaaggctctttggattatagattagggtagtgaattaaaagaaggccctctggacacgcaccacccactctgcactgaccagcccacctggatagcagaggacacccccagcccccaccaagcattgaagacatagtttatttcctcatatcctttctccttgggtgtagttggggtggggaaggagggaagactggggtcatctccattccttgggctctgtgcccgagtccatggtgcaccactgtgctgcgagctgtggggcctgctgcagtgggagtgtgtggaacaccttgaccaaaggggagctttgtcttgtgtgttttgaaaaaggcttaatgaagagaatgttgttcattcttagtagtatagtttgcaattcttaatgacaaatagtaagtttcagtagaaaacaaaacaaaacaaaaagaaggccttctttatattctctagttttattttccgtccgctgacccaagattaaaaattttcttaatgctcccttggttcttgattttgaatttaggatgattttgatttagttaaagaaatttcttttttttctttttttttttttgagatggagtctcacactgttgcccaggctggagtgcagtggcatgatctccgctcactgcaacctctgcctcccccaggttcaagcgattctcctacctcagcctcccgtgtagctgggattacaggcatgcgccaccacgttctgctaattttttgtatttttagcagagacgagttttactatgctggccaggctagtcttgaactcctgacctcaggagttcaagatcctgatccacccgcctcagcctcccaaagtgctgggattataggcgtgagccaccacgcccggctgttaaggaaattttatatcctttagtttttacattgagaaactcagagtaaaaacagagattattgataattgaagttggaaactctactgaaatatttggtaaggagatttttaaagacttttctgttgttgttgttgttaatagttaaaacaaattcaaggagtcacaatgagagtgtctacctgctgatatataattacagactccggggtgctggcagccagccttgggctctctctgtgttaacacatatactttggcaagatttttaagttcattaacccaaagcgtacatttttattatttgttttaagagcaaaacagaaaaataaatgagcacctctagttttgcggcctgctacaatacctaacattagctttgctcatgcagtctttctcttatatgccatcgttactcagtttctcagtcattgcctgaacctcctttcttgcacataaattaaatagaattatcattctcacctcccagttcttttttgaacttaatggactagtgggagaaatgcttctagttgaagccaactagaacatgactaattttggagaggtaggttggatgtttttgacaggataaggtcagataggtaacgaaatcaactttaattctaaaagccaaaagtaactttcagattcctgatcttttcaatggcctcccttttggtaaagtatcttaaatgtcagtaagaagaaactactatatatgaaagaaacatgcaagagagaaaaagggttttttggttttattttaagaagttagtcttggctgggcgcagtggctcatgcctgtaatcccagcactttgggaggccaaggtgggtggatcacctgaggtcaggagtttgagaccagcctggccaacgtggtgaaaaccggtctctacaaaagttcacaaattagctgggcatgatggcgggtgcctgtaatcccagctactcacgaggctgaggcagaagaatcacttgaacccaggaggcagaggttgcagtgagctgagatcacgccattgcactccaacctgggtgagagagcgagactccatctcaaaaaaaaaaaaaaaaaaaaaaaaaaagagaaaagaaaaggagaaattagtcgtaagcagctcatctttaaaataatcgtatatgttatagtaccaaaataacttggaactaataaaactcagattaggaagtataaaagattcatgttttctgtatgccattgtttaagtgattttaatgaaaataatcatgcatccagtttcgtgtagaagatgaataaattggtctgtggatatttgtgtttacattaatttatttttacattttgtattaatgtggtgatttacatttgatactgtttgtttgttttgtagagacagaatctcactatgttgcctaggctggtctcaaactcctggcctcaagcgattctcctgccttggcctcataaagtgctgggattataggtgtgagccaccatgcccgccccttcccccttcttttttaagaaactgggttaccttctgttgaccaggctgcagtggcataatcatggctcactgcaacctcagcctcctgggctcaagtgatcctcctgcctcagcctcccaagtagctgggactacaggcatgttccaccacacctcgctaattttaaacattttttgtcactatgttcctcagcctggtctcaaactcttggcctcaaccagtcctccctccttaacctcccaaagtgttagaattatgggcatgagccaccgtgcctggcctacatttgatatttgatactgtaaaaagctagctatcacaactgtccatactagttctcttcgagagaataagtgttccctggatagatagatattagttatagatattataagttataattatagtataagttatatcttcagtcataaatactataagattcagctgagcaaggtggcatgcatctgtagtcccagctagttgagatcaaggctaaggcaggagtcttacttggacttaggagtttgagtctagcctcatagtgataccttgtctactgaaaaaaaaaaaagattgaaccattgttccactgtttatgattttttttgtgcttaattcttatttatgaatttttgttctagttctgtttctagagagaataaagcccaggtgaataactttgttttctttctggttttagaattattagtaacaaatccgtgttcttaatggcagtagcaaacctgtcttctgtagaatttttaaagagatgtttctgtcattagtaatacagaagaagccttgatcattttcagaataaagaattttacgacagggagaggtggctcatgcccgtaatctcagcactttgtgaagccgaagtgggaagatcacttgaggccaggattttgagacctggggcaacatagtgagattccatctcttttttattaagaagaaaaaagaaaaaaaaagaattttatttctaaaggcagttaccaagtctagaactaagaatttgtggaggtaatctagaatcttacttgttaacgaagcctccttgcataatggcacagaagagaaaaaagaagcgtgaaacgtgactccagccctaaagaactgaggctatatgggcagcaaacattagatctttgaaaagttggtaacaccaaaattatgctttgcatatatataatgtacttcacaaagcatttttacatgtatcacctaattttattggcatgcaaatatatcttattaaaaaagtaaaatctcttcatcttctggcacttttaactctccaaaacttctgaatttcttgtaaagagcacccaggcaaggtatagagaaccccaatgctgggaaaagagtaggattcttggcctccgacttttaacttttcttgcctgagatgtgtaaggatccacagaagagcagttgaaggactgacgaggcacaacacagctcactcagcatggagccggcatcgctggatgatagtatccttaacagctaccaaattatagttggatacaatagaagagatgttacaaggcatgtcatgactcattatcacattaattgtacagtctaattagcataggagttcagaggatgatagaagtactgtagtttgtaagattccacaagattgtcagttccacaaggactgtaaccatgtcctgtttattgtcacactcccactggctcatacatgcctgttctgtagcaggtgctccccagctttgtcgaactgaagttcaggcggtactgataaaggacataaatattgtattgaggacatggcatttgaggtgcgtccagtgtcatgtgattggatgatcaggtgtagaggagagaattccagcaagtgttaataaggcacctgtcagttgcagacactgatacaggcacgggggtacagcagtcagtaagataaccccttggaacttatattctaatggggataaatagacagtaaacacaaataagctctcatagggctgtgacaaagataaactcgagtaacatggcagaatgatttgtgcgagaggtactgcttttagccaggatcttcaaaacattccacgcagaaagaagaacaatgcaaaggcctgagagagataaattcaacatagaagaaaggggtagaagaaagtccagcatggctggagataatgaataaaatggggattggaagaagttggggtgagagagatggcaaaggccagttgcacgtggttaggatgtgggatttcatttaggttccagtgggcactgagttggagcagcgtgggcagcagtagaatgcacaaggtctatttgaaaaaaaaaaaaaaagggtgagcagctcagtggaagggaaggctaaaggagaggagtctccccgagaaggcaggagcagtagatgtttatattagattgaaatcatttgaatataagatataaggcttaattaatccaattcagtatggagacggcaaaaagctggaagctgagggaagggaagggcctcctggtaataggaaggccagttaaaggctgtgaatggtaaaatcccgcatgagggtgatggtggcagtaaacatgcaaaggaagaaaacggcaacaaattcaagagagaaagcaagcgagaatttctaggaccagataaccaatcatatgtcttgaccaggaagagggaattttgaaagatatgtttagaaataaagaaatgaaattttcttactgatggattatattaagctatcaaaaaaatggtgttttgaaaatggttaatgtattgctattcgaaagtaattttaatgtccttgtccccaaagattaagtagcaaggtgtctatatttaaaatagattgcctgagaaaaaactgaaatgtagctggcttactccctgaagaaaagttctttcaaatgcttagacgttataagaatgttctgaaaattgtggaaacattttttttaaacctaaggaagttggaaacttttgtctttaaatgtcgactcccagaatggtctccatgagatagtttccactctcgtgttattgttttagttggcaatcagtagacagcaaagatcagaaatgcaactatagaaaggccaatatcctggaaagaattttcagagcatggatttaaggtaccatggaaaattttgaccttaatgcagtgagagctagaccattttattattttttagggagaaattaaaacatttcctaactcaattgacctttcacccttagtatgaatatactgagataccatcatatagaaaagaaaggttggaaaccttggatttttgagtacccttccacagtgtgttgactgacagtgcctctgactggtcacaggaagtagttatgcaatactcattatatcaatctaaattgtatttcatgattctaatgccctctttttaggctatcattcattgcacctcccaggttgacatgtccagtgaattgagaccagagaggcctttgtgtttgtcctgaattcataatagagtctaggaattttaatagctagacctgtgttcttgccctgaaatggcatatgaccattaccaagaagcggctctaaataaccttcctgcacgttgacccttgggaaaagaaaatttgaaatattatctctcttgaatcctattcctgagactagaactttacaaatttgtattctacttaatgtcatatctatattttttaatattaagattattaacttagtttaacacagaaaaaacgttgatgttccaggaaggtgcaccctatttagcctacggtttctcgtatatcttggaacactgaagtgtaacacctgaggctgtgtaaacagaggccagcctgagaagctgagaatcaagaatttgatgctcaaccatagattcctcttactcacacttctagtttgtgcagagtgacttctctattacttttcctcagcctcaaggattttcatgccattatctattaattgcacgtcacttattttggggataattagaaaaagggggaatgagaggttgggaatagaaaaagggagagaagcaaagggcagaaaagaaatggaagcttttgctttgaggtcttgtgggggtgggggtggaaaaaaaagtgtaggagaagcctgagcccaaaagcttgcctcctccctctacagggaaagggagttgagcggagtgtaagagggtggatggcatgcgcttctgacctaccaaagcatctggaaatttcagactgctctttgtctctgagactgtgttgggcacagcattgaataaagtgtggatcaataagtatgtgaagtgctggatatgttaattcactggatttaatcattcctcagtgtatacatgtatcataacatgtacgatgtaccctgtaaatatatacaactattgtaatttgcccattaaaataaaacaaaatataaataaaacatgagcagtgatgattaaaagccaaagtttcatcttaatctgtataatatctagaacaaagaaaaataattttatcggcattttattgaagctgcagaaaatgacagctttgaaaaatctcaagcaacgtatggtttaaggaaattaggtgtacacttaagctatagtttgtttgtttctccctttcctttcctttcctttcctttcctttcctttcctttccttccttcttcttccttctttccttcctctcttgtcctctccttttctttctttcgttctttctctctcgctctctttcctctctctctctctctctttcccttcctcctttccttccttgcctccctccctcccttcctgtcgctcagactggagtgcagtggtgcagtcatagctcactgtaaccttgaactcatgggctcaggggatcctcccacctcagcctcccaagtagctgggactacaggtgttttgccaccatgcctggcgaatttttaaattttttgtggagatgggactcgttttgctgctcaggctggtcctgaacttttgagctcaagagatcttctcaccccacctacctaactgttgggattacaagcatgagctactgtgcccagcctcttacctgtagtttctagtttaagaagttttagaagaacattgatattctatccatttagagtagtgttttacttttattagtggctatagaaactataagaactatagaaaagttatagaaacttacagttcttataggaactctaagaacgtttatataagtctgcccaaggtcatgtgtcctcatgaggatcgtaagctcctcaaatgcaagttgatgttgggaagggactaacgaatcacccagagtgctccttcactctgattctgagggagtctttattgtgttgtgtgaagcgtgttggaagccaggtgtggtcgcacgcacctgtagtcccagctactcaagaggctgagatgggagggtcgcttgagccgcagaggttgaagctgcagtaagctatgattacaccattgctctctagcctaggcgacagagcgagaccctgtctcttaaaaaaaacaataaaattttttactttttgtagagatgaggtctcgctctgtcgcctagtttggtcttgaactcctgagctcaagtgatcttcctgcctcagcctcccaaagtgctaggattataggcatgagacactgtgcctgacctaaaaaaaaaatttttttttttttttggctcacacctgtaatcctagcactttgggaggccgaggcgggcggatcacgaggtcaggagatcgagaccatcctggctaacacggtgaaaccccgtctctactaaaaatacaaaaaattagccgggcgtggtggcaggcacctgtagtcccagctactcaggaggctgaggcaggagaatggcgtgaacccgggaggcaaagcttgcagtgagctgagattgcgccactgcactccagcctgggcgacagagcaagactctgtctcaaaaaaaaaaaaaaaatttgatgtgatattatagaaatttaaaattaaagcaatgtcaaaaagagtgaggctgactttttaggcaagcctttgcaaggtggcagaatattagtaaaggtccccattatatcagaatctggttgtcatttatgagttctgaaatataccttatcagttctcttaaaatcataagagagtgagtataatatttgtatcagttttcttagcatcaaaaagtacagtttgctagtggtaggcatgggtatttcatctagtctttttaaaatatcctgatttgagtggtctttggctcgtctttgcggaggttatacacagaccatccttaatttaccatctcaagtagtatacaggatcttttcccagccagtgacttctgaatcctcagagattttcagtgttccaagagattcatgtcatacaaagtgataatgacttttctattttttagaagttaataaatgaaataattacttaggtctttccgcccttcttaaatggaatagtttgagagcctctgagtataaatcgagtctacctgctggcagggcgctaatgagcatgcttatgacttggtcattccatttattgttcaagtagttggttatcataatagctttgaccagggtacagtttttcattgtattttattaagtttacatctattatggatcactggattatataaagcataaagaacactaatgttgaaattcaaattgatgaggataaaaatgataattctgtaatgcctcaagacaaccttcaccaaattcatgatttgtctttgtttggccatggttcttacacagcacatcaaattgtttctagggcctcaagaaacaaagtttaaaaatgttacattacatacatacacacaaaatatgtatataccacatgtatatacattttttacacacatatccgtatctatatctatctatctatattatatccagtttgatttattgggaataaagactatctacattcatagtatattatttgcaaagaagtgctaataagtaatgacccaatatttgttaatccatttcattatttaaaagcaaggcatgaaaataattcatttaatcaagtctggtttttaggttcaaacatgtaagtgttccaaatcctaggtcatgaaaagtattcatctgttttgtgtattataatctcagtatatttgtggcttccaaagccaggtgccgtggttcatgcttgtaatcccagcactttgggaggccaaggcgggaggatccctgcataccagcctgggcaacataataagaccccatctctatcccaccgcctgcccccccgccccatcaaaaagaaaaaatacacatacacacacacacacacacacacacacacacacacacatatatggcttcctactaaacatgatatatcaattttaaataaatactttttcttgaataattgaaataaatagtgtgggtcacttgtatgatgggataatatgaatttgtcttaaaattcatagtgaacttttaaattaatttttaatgtactaatgtaaaataaaatgtcttttagctaaagtctcttctgtatcataaatcatagaaaaatgacaaaattatttttaaaatttctttcccgggaggtttttaagataatacattcctttgaaaggagtttgtgagtcagaaaagctggaaaataaaaaggtaactgtactgatttctttacattctaatccaagtataccatggttttcttgatcagattgagtgagtctctgaactgttgatagaaccttcttcaggaaagccccatttctctagaatataccaattgcccctctggaacttttccttaaaactcatccagtggttataattatatagttacatgtgtgcttgtttcatgtgtatctcccccactggactaatctgctacatgagggcagggaccatgtctgtcttgttcaccttgtactgagaatacatttgtggtccatcaaaaaattgaggaggcaggccgggcgtggtggctcatgcttgtaatcccagcactttgggacctgggcggattacctgaggtcaggagttcgagaccagcctggccaacatggtgaaaccttgtctctactaaaaatacaaaaatcagccagctgtggtggcacatgcctgtagtcccagctacttgggaggctgaaacaggagaattgcttgaacccaggaggtggaggctgcagtgacccaaaatggtggcattgcactctagcctgggcgacagagtgagactccatctcaaaaaaaaaaaaaaaaaaaattgagaaggggagtactttattcccattatcatattttcacatcacctttcagttgggttacttttcagatgtctgctctcatttgaagtttttttttgtttgtttgtttcctattagctttaatctaagatagtattttgttacctactcttaatttctaggtaacaccttagagcttcttaagtgacaatcctatcttcttttctctaaaagtaggcttctgcttatcagaccatatgtcttagtttttaatttggaaaaaggtttttgttttgtttttttgtttgtggttttttgtttatttgtttgtttttttgagacacagtctcactgtgtcacccaggctggagtgcagtggcccgatctctgcccactgcaacctctgcctcctgggttcaagtgattcaagagaatttaaggggacactgattcatcctgttctataaaaggcacactaaaattttgtataccatgctcacctatcattattagaaacttacctgattaaatgattaggcttttattgttcttgttgatattctttacaatcatgactatgatatactcattaatgtttttaagaattccgatgagtactgtttgcatgtgttgtagaaagtgtctcattataatcctttcctttatacatctagtcagtactgagtttgatgcaaagatcctatattgaggaggtgtttggggatttatatgagaagggttggatgttgctatctaaaataaatagagtggagaagactggtttattacttcatttaaaatagctgagttcagctattgtacctgctaaggtgttttgggataaaaatacataagtcactcattggaaatgccaatataatgctgatccaaatctccccccaaataagatgattacttgattttttttttttccttgaaggaattttctcttgtgtatatatgctaaggctgtgagtcaggagtttttggcattacttctctattagctcctagtgaggaagttcagccaggggttgaagtgattactaaatcctgaggacttcccaatatctgtttttaagagtgaactaatattgtgacttctgagaactttgaaactcatcctttgtcactaccacaattctgagatccacacacttgacttttgttttgttcaatttcaaataaagcccttaggtcatatggtttggccagtgacattatataggaaaagcagatttaattccttattagcgtcatgttccattttaatagtcaggagaacattctaaatcctatttatatactgttcttacaccagtcttgatctttggttctttgcatcatttctagcagcaacatttctaattattagaaatttctaataattggaaattaatcaaggacctaattatttctgtcttcatctttgggtctctaattgcaaatgcagtattgggattgtgaatcctcagaagcttttagctttgaaaacatgaaggatcttgtcacagtgatttttggtgaggttgttcatttagggtaagtaaatatcttcccacttcactttttcccctctgctccctgcttccaagctgtttacttatacagcaaggaagtgaagcacaagttacccttggaaagcagggttgtccgtcgctcaaagctgtactgtattgccttagagacactgagaacactagtactggctggaaagttgtgcctaatctgtttacatctgctttggattgttctttggttagccaaaaaagaagtcaagttcattgctctaaagtggtagaccaaataagaaaattgcctgttgcagttgccctgatttataaattaatgccgcccgttttgctcttttcccttaccacatagacatatccagttgatgatatacttatttttagggatatcagttatcactaccttatatatccccaggctcctgatctcacctccaacaaagaattccaagtctcaaaattgatagtaagctctggtatttaagccttcctagaagacagtcatatggttcaaattaaagtctcctgctctgtattaagagaaagggatttaagttgccatttcagcctgcggacaaatgctaaccaactagggtgttgggggttggaaagcaacttaacaaattatattgagagccacttgcgagtggagaaataaatgaccatggccacatgaagagaccaacttcgctccactcatatggcttctgttgtgtaggtgtgcgtatccatcttaaccagcttcttctgtttctccctgttcttccgtaactctttagaatattcatcattttaatgttgactctgtaggtcatacatctttcccattgccagtaaataagcagtaagggatatcaagtattttatcggcatcagtacctgagaattacataaaactaactgctcagtgtttttgttcttattgttcaagatgatgtcttaaagtctttatacttaaaataaaaattttagttatagaataatgtaagcatactatagaaaatttaaacagcaacaaaaccgttttaaatattcaagctgcaatcccacctctgaaaccattgttaacattttgaatgcattttcttttgtctttttactatgcatgtttttcatacttataatcagtgtatttacaattttatatttcccatgttgctccatatagtcatcattttttttttttgagacagagtctggctctgtcttgcccaggctggagttcagtgccaccatctcgggtcactgcagcctccgcctcccgggttcaagcagttctcctgtctcagcctcccaagtagctgggactacaggcatgtgccaccacacccagctaattttgtatttttagtagagatggtgtttcaccgtgttgaccaggctggtctcgaactcctgacctcaggtgatccacctgcctcggcctcccaaagtgctgggattacaggcatgagccactgcacctggcctcatcatttttaatgagtgcacatcaagtagatgtaccataatttacctgatctaccccatattgtttttgttttgttttgttttgttttaaaagacagggtttcgctctgtcacccaggttggagtgcagtggcatgatcatggttcactgcaccttgaactcctgggctccagggatcctctggcctcagcctcccaagtagctggaactacaggtgtgcgccgcttcaccaggcaccatattgttttatgatctcaccaattcttggtattagcacaatcctcactttttctttggcatttattactgcattctaaaacttcaaagtgtgtttacttaaccttttgaacgtacagggaatcctttctttgccttaagtttctgtgttttttttgttgttgttgttcttgtttttcacttacattgaagttgtcattcttctggattttttttcctttatatttcaccagcatttggcctgctagcactcttcatcttgagccatgtgaactaaacttcagcttatggtagtctagtttactttatgtcttctggaatccagctagtggtaatgatcccaggccttgtccctttctctttcccaggctgacttgagctggagcagtacagcactccggtgttccttagagcgatatgagctctggaatggtgaaagaagattgttaccaaatacaaagtgcctgtggttttggggagatgatgaggctctgtgtgtttactggctgcttacctttgggatttgaataacttaaagattataatcagaaaaaaaatagattcttaaaaaaaaatggggagagttaagattatctgaaagattactaaaactatgtcaactttcagttatacaggtttttaaaaatattatctaggtttttttttcttcttttctggctatgttttttcatttgatagtttacatattgaaggaaaagaaggaaaacctaattttttttagtgttcttcgttaacagctcttgttagaactaaggaagcaagtgatattatagacaaaaatgaatttttaaattatatgtagtgtatactagctttgtctcttactaatatgggttactgagaaatagttattagtgtgggagtaatactaatattttcaatcatgtgactaataagcatatcactcacacctaattgccattttagcattaatgattatacctatcactaaaatatttactcttcctttaaaattatatttaatgataactggaaacttcatcattgtatatattcttcctagattacagtttttcttcatatatgaaaattgctattttcaacaaaaactttagttgagatctctgtcttaccaagtagttcccagttcctacactctgagttctgatacattcatttcctatttcaaactgtatcgctcttttcttccctttctcccaccctctctgttcttagttagtcagtgagttgttttaagatatttattgagtgctttctcttcctgtcagcactgtgctaggccctaggaaatcagtggtgagaaaaacctctgccctcaaaagccctaatgattgtggagcttagatcccagagcagtggttccaagtggcgagaaatagcagtggaggaggaaaaggagctattcttgtctcttttgtctttcatttattatgaaatattatgtttatacataaattttctttaagcatctgtgtatactttagtgaatcactagaagcaaatacctgtgtagtaattggcactcaggtcaaaaaactagaaaatttcatcagccaggctgtacacctcatcacaaccatatccttcccccaagagaaaaaaaattttttttgtacttttgtgttaatcacttatgtgctctactttataggtgtttttttttttcttttagtagttttgccactgatgtaatgcattacttaggagttttgctccaagggatgccatttatactgaatataatgtgtagtgggtccatccttaaacaatatagttttgcttgttttgaatgatacatgaatagaatcatattgattatattattttttgtctgtttcatccaacagtctgtgagatttatccatgttgtttgtatagctgcgatttattcatttttatttctatatagtattccatgatatgaatataccacaagttatttttccattgtacctattaatagctattttaaaagcagaagcccctattgctttcagtttggggcacttactaacagctgcaacgaacattcctaaacatttatcctggtatactcttaaacattagtgtgtattcttaaacatttaagagtgtaaactgagaagtgaaattgctgggtcatatggtgtgtgtttttaggttttatttggtaatgctgaactgtttccagtaggtgtgagagttccacttgctccatgtcctctccagtgcttgttattatctactcttaaatttttgcccatctggcaactgtgtaatgattatcttgttgtggttttaatttttactgtttctctttaataatgagattgagcttctttttgtgtctcttggcctttttttgtcaattgtcaatagtcttttgctcatttttctactggattctctattggtcttattgatttataggagtttgtttctttttgatagtctggatacaagtcctttgttttttttgtttgtttgttttttgttttttgatgattgattggttggttggttgttgagatagggtctcactccatcacccaggctgcagtgcagtggcgtgatcacagcccacagcagtctcggcttcctaggctcaggcaatcctcttgcctcagcctctcgagtagctgggaccacaggcatacaccaccatgcctggctaatttatatttagtttttgtgaagacgaggtctccctgtatttgcccaggctggtcttaaactactgagctcaagcaatcctcctgtcttggcctcccagaatgctgggattacaggagtaagccaccacgtccagccgagtcctttattttataagttacaaatatcctccctcactttgtggtttctcactttctgtttaacgtgtgtataaattttggcataattctaatgtaacgaagtttaccacttttccctttatgattagcactttttgtttcttgtttgagaaattcttccatcccctgaggccgtaaagatacctgctttttttttttttttttaaataaaaacgtgatagttttacctttcacattagggctataatccacctggaattaatttggggatagagtgtgaggatggcagcctctgtaatttttttccatatgaataacgagttgttcctgtgccactttttgagaaatttatccttttcccattgatatacagtgtctaccattcttttctatgcatgtttttaaaagaaacttgacgcagtattcctgaagcattatgtgtctttgggaattaacataagcagagcaaagggtggcagtcaataataaaatgaaaaacagtaaactgtaataactaaggaatttgcaagttttttgtttttttgagacagtgttttgctcttgtcacccaggctagagtgcagggtgcaatttcgactctggtgcaaccctccgcctcctgggttcaagcaattctcctgcctcagcctcccgagtagctgggatttcaggcacctgccaccacacctggctaattttttatttttagtagagacggggttttgccgtgttggccaggctggtcttaaactcctgacctcaagtgatccgccagccttggcctcccaaagttctgggattacaggtgtgagccactgtgcctggcaaatttttaaatttcaataaaaataattatgggatgtacgtgaacttaaatataaacacatacatgatgctgaaagcacaatgtggggctggattttgagggcactgagaactggcgttataggctgcatctgattcatactaatttttctttaacctttatacttgggaatgttacttttgaacctcacgtctcaggcataaaacaaaaataatgctcatctcaatgaggtaataaatacaaggtgctgtagcgcagcactcaacagaaggtcctttgaaaaacaactgtttaatactgcaaagtgcagcacaaataggaaaactgttgcactggagagatgagtcaaggacagtccagttccaagtctttctgggatacatggctccctccagggctcttgccactcacctgcatggccacgacgttcgtttctaagtactctgaatatatttgtatataacttaggattagtatctgttggttgtcatcaatcttggtaagaaatgcctaattttattcacagcttgacattgtagataactctgaatggatctggattatatttgtagtccatttctgtgatgtagcctgtctttacaacaaataaacaaaaattctgaggggaaaatgataccatttctcatcgagaataattatgtcatcatttgttttccctcagatcaaagttacataacacttggatgagattacatggatgctgtaagccacctttttctgcttttctgctctctcggcttccttgttacattttcctgactttcttcctttagccgcgctttctctctcctttttgctgcatcctctttctgttctcgcacctagggaataggaagtacctctgggtgttttcgaagccttaattctcatccttcccttttctctactttttctttcaaaaatattttatccttttactactataattcagtttctcagaatatcttcacttaaatttctgatcaccttctcaaactcaggacataaagaaaaagtaattttttttcttcccaaaccaacttctgctttccttaagtctgtcatctgctcagggccatattctctacttctccttctttttcatcccatatattctgtttgttatcaagtactgtccgctcctttcagaacatcttttgaattgtttttttcattttcaatatctcatctgatcacagccttcaatattcacctcacacctaacctaatcttgctttctagtttattttaccacttcacctgcctgctcagaagtcctagcaactccttattgcctgtaagtgtggctctcaaacctcttcagaaagaactgtgttttactggtacctttatattcacaccaaaagcataagtgacaaaaggaaatacagataagttggacctcatcaacatttaaaacttttgtgcatcaaaggacatcatcaagataatgaaagtccacagaatgggagaaaatatttgcaaatcatatatctaataagagatttgtatccagaatgtataaagaacactcacaactcaataataaaaagataaccaattttaaactgcacaaaagatttgaatagacatttctccaaagcagatatacaaatggctgaaaagcacatgaaaagatgctcaatattattagccatcagggaaatataaatgaaaaccactgtaagatatcatttcacatccactgggacagctgaattgacaataataagtaataataataaagacaataagtgttggcaaagatgtggagaaattggaatccttgtacgttgctggtagggatgtataatggtacggccactttggatagcagtttggatacttcctaaaaagttaagcagagttaccatatgacccagcagttccactcccaggtatatatccaagagaaatgaaaccatatggccacacagaaactcacataaatgttcatagcagcattatttttagtcgctgcaaagtggaaacaacctgaatgttcaacagatgatgaatggataaataaaatgtggaatgtccataccatggatgttattcagcagtaaaatagactcaagtgctgacataggcaacaacatggatgaacctccaaaatattatgctcagtgaaagaagccagacactaaagcttatatattgtatgattccatttatgtgaaatgtccaaaattgacaagtctcatagagacagaaagtagaaagcctagggctgggccattggtgaaagacttgaagggtgttggggagtaactcctaattagcacagggtttctttttggggtgatgaaaatgttctaaaatttcttctttggttttttcactgccttttccttacaaggtgaaaaatgttctaaaactgattgtggtcatcgtcgcacaactctgtgaatgcgctaaaagccgctgggcattacactttcaatgcgtgaattgtatgggatatggaatacaagaaatatgttatggccaggtgcagcggctcatgcctgtaatcccagcgcttcggaaggccgaggtgggaggatcatgtgagctcaggagttcgagaccagcctgggcaacacagcaagaccctgtctctattttattctatgttttaaaatttaaaaattaaaaagaaaaaagaataacattttataagaaaatattttatgagagacttataaaagagacattaagaatatgaagtaatatatttcgtattccttatctcaataatgctgtagggaaaaaacaattgaaataaaagcagtaaatgagtggagcatggagagtgtgtcatgagccaaaggttataataaattcataatcaagtttttttgtatctgaagtctaataaaatttttaaatgtggaggaaaaaaaaaggaaagaaaaaatagtaatggttcacaggatgaagtccaaggtcttcattctgtcatttgaagctgtattttatctggcatgatgctgctgtgcactctttatttcttgccatatgcccctacaaaccctttattgtacccagggcagtgtcttgcttgtcacttgaacttagcgagttaattctaagtgttctgcccttgctcgtgctccctcctgactgccattcagagcaccctttccaccttccttcattgcctctccagatcctggccattcaaccaagttctgcttcctttgagcctttccctagaactatgttttatgcctttggtttgttagaagatctaacacattgctattcccattggaagagttccataaatacatgttacataaagagtgaaggaaatggaggaacttacttagagacttataaaagagacattaagaataggaagctttagtaaataatgaaagatattgtgaattagagtagctccagagccaaaataagatgaaaaagcctattaaatagaaatggttttctaggttcaagttcagatcaaacttaagctctaaagcttttcttggcttggtgcagtggctgttgcttgtaatcccagcacttacgaaggcctagtcaggaggatcgcttgagcctaggagtttgagaccagcctggacaacatagcaagacccccatcactacaaaaaaattttttttaaatagctaggcatggtggtgtttgcctgaagtcccagctacttaggaggctgaggcaggaagatggcttgagcccaggaggtaaaggcttcagtgaactatgattgtgccactgcactcccatctgggaaacagagcaagactccatctccaaaaaaaaagtttttctttacctttttctttggcatttctgacttaagccagtgagaattcttcctcattcttttttactcattgcttgaatttgtgttatgagaatttttttcctccaacttggatgatctttcaattttttccagttgtctatacatgtagataactgaaaacagcaaagctcttagtgattctgttccatgtctatctgttccccacctccatttcctaccacacaccccagcattcccctagtacatcactaaactatcaacagaacctaaaatagactagtttgttttaactgtatttttctttccagtcctcttaaaatgtgcagcaaaatgtccccaaaggcaagcagctaagagaatgaagaggaggtattctcccatcacagttactcagtcccagaagtattgattggaaggcactgaattttcaaaatgacttccagatttagtacatggtaataatttgaggctttcccacacggataatttaaatgttcagaaaataagttatgttatagctgaatgggcagcaaattagacagaattttaacttacaagatgcatagcaatagtgaagattaatgtgaaatactagtaaagagccactggtagggaagagaagacagcgatatgctttcaatgaaaccgtcaatttataataatatgtatattgaaaagggagagtggatcagatcctgttaggtttggtacgttaaagaaagaattaggataccgcaggctcagtaattaaaggaatctgcccataattggggggtaaaaggtgtcttgtaggcagggaatagcaagattttgcttgaatgtacaccttagagttgggagtaacaatacttggaatgattatagaagacctctcgacaggtttctgagactagaggattttgtttggtgcataataggagatgagagcaagccagtagtatttggttgttgttgaatcttacagaaatcttgcatttggttattgggtctagctgttgaagccagctgtttggatgtaacatagtggaagcaggtgcttctgcagatgtggctctctctagttgtctggctgtaatatatcattcattctcatacactcatttctcatataaaatccttataactattagcagtctaagcctgcagacattgctgaagctggttccctttgatattgttttctttgtaacagtttcctgtttggtagataaaataacaagctcacactattaggtttgtgccttcacctccctggcaaagtaacatgctagaaaggttactaaacattagtggttcaaaatgagaagtctgtacattttatctgcttataggcgaatttaaactcaactggtttaaattcattgcttagcctgttgcatgctccattgaaaacacaaacaaaaaactccatgattcttctagccatgattcttctagagtttgttatccagtcattccagtgccagaatccatcaggcagaacagaatcattcgcatttctcctctgcactggagagaagaggaaggctgatcatggaaaaggacctggtgaaggttttttgcaaatctaaggatcttttttctgtcttttatttttgcaaacctaaggatcttccttctggataattcccagagacgtcaactttgctgaatctcagttgttgggatttttagcaacctgttcccactctcctaagaaaaaaatcttaatagtgaccagtgtgtgcagactttaatttgtaagtgaaagttacggtgtttcaaaagttgcaggttagttggtagagcattaaatgcagttttgttcatagtcaacattaagtgcccactgtgttaaacactgttagatactgtgaaagagagaagaataaggtaaggaactagagagagagggtagatctttacaagagaggatgtttttcaggagctagaagaatacattatttatgtattcaaataataaagggaaagaaagtacagacagagtagataggggacatttcttgtaggggatccaggaggacttcacagaagaagtattatttatttccattaatgaatgagagtattcatcttctcatagaagaagctataatgattctatttgtggtcctgactgccacaccccttatgatcattaagttaattttagaaccttgggagggacagctaggaggcagaggctctcgttgctggccagctgccattgtcagtttgagaagtctccagtagtcaggaggtgacaagaggattggcccagttattttattgcagtttaatttcgtgaccctttcttgagtctctgctatgtattagaaccactgtgtagagactaggataaataaaacggtatctcctccatttactaattaatggagggtataaacacacaatacaattaagtataatataaggcagaggctgggcgcagtggcttacgcctgtaatcccagcactttgggaggccgaggtgggctgatcacctgatgtcgggagttcgagaccagcctgaccaacatggagaaaccccgtctctactaaaaatacaaaaattagccaggcatggtgatgcatgcctgtaatcccagctacctgggaggctgaggcaggagaatctcttgaacctgggaggtggaggttgcggtgagccaagatcgcaccactgcactccagcctaggcaacaagagtgaaactctgtctcaaaaaaaaaaaaaaaataaataatatatatgtatatgtatatgacagaacagtaatgggatgtagaggcgtaaacaaaaggctgtggaagcacggaggaggaagccattgacatggtgttttctggtggaaatcagttaagccttcatacaggaagtaatatttgactgggccttgaaaatgagtgatactttaaagatggaaaagaaaggaaaaggcatggtacagagaggaaatagcatgtggaaggcatgtaaacacaggatgtgaatagtctagtgatgctagcatggccagggataaattggaaacataggatggagctgggttgtgaagggccttaaatgacaatgctgagatgaagactcttctgtaagtagaagggaggcagcccatgttttttgagcgaggaggtaacaggatctggtttgtgtaactttgtgctatgaatggatagcttaggggaaaatgaaataggaagtaagcaatagcatcagtcaagctagggatgataagagtatgaactgcagtggtagaaatggaaatagaaaagaggaggtggagtcaagacacatggagttgaagcagtaagagttttattaccaggttgaaatgggaaacgagggagaaaggacttgaagatgactccagtgtttctagtaacacaggtggtgatgtcactaatgagggtaaaagcactgaaagcgcaggtatgactttggaaaatggtgggtttgaggtgtttcttcccaagcaagtattggggattcatgccaagaacttaagagtggtaccagggccagacatataaatttggggtatttatatcaaatgctggtagaagtagcgagattaaaagagttagccctgagaaaacatagagcaaggagaggcagttaaaatcagcagagcctgctgaaaaacaccttctgtagaaggtagaaagaaggaaagcaaatagcaaaaggagagttgtcaacaagagtaaaactggaaaagagagggacgggtttcagagagtaggtgggtgcttaacattttcagatgctgtgatttcagggagcatggtgtccctggggcatgagggatttctagcctgtcacatgggtacacatacataaataaaagcatttctacaccagagactcaatcctttggccagccatccttgctcattgtcttagtgtagctcctgaagactcatccctgctacctcccatctgctgcgtcttgtagcagtaggagagggagagaagaagggaggaaaattgaagcacaaggagagttaaaattaaaatgtaagcattcttgcttcagtttgtaaataagttgcatattcttccttttgaataaactacttaattataataatgtcactttgtctaatttttaaatggtcatagatgtgtttgtcataagaagtaaatataacataaaaattctgggtccaagccaaaagaacaaagctggaggcatcacactacctgacttcgaactatactacaaggctacagtaaccaaaacagcatggtactggtaccaaaacagagatatagatcaatggaacagaacagagccctcagaaataacgctgcatatctacaactatctgatctttgacaaacctgagaaaaacaagcaatggggaaaggattccctatttaataaatggtgctgggaaaactggctagccatatgtagaaagctgaaactggatcccttccttacaccttacacaaaaatcaattcacgatggattaaagacctaaaccttagacctaaaaccataaaaaccctagaagaaaacctaggcattaccattcaggacataggcatgggcaaggacttcatgtctaaaacaccaaaagcaatggcaacaaaagccaaaattgacaagtgggatctaattaaactaaagagcttctgcacagcaaaagaaactaccatgagagtgaacaggcaacctacaaaatgggagaaaattttcgcaacctactcatctgacaaagggctaatatccagaatctacaatgaactcaaacaaatttacaagaaaaaaacaacaccatcaaaaagtgggcaaaggacatgaacagacacttctcaaaagaagacatttatgcagccaaaaaacacatgaaaaaatgctcaccatcactggccatcagagaaatgcaaatcaaaaccacaatgagataccatctcacaccagttagaatggcaatcattaaaaagtcaggaaacaacaggtgctggagaggatgtggagaaataggaacacttttacactgttggtgggactgtaaactagttccaccattgtggaagtcagtgtggtgattcctcagggatctagaactagaaataccatttgacccagccatcccattactgggtatatacccaaaggactataaatcatgttgctataaagacacatgcacacgtatgtttattgcggcactattcacaatagcaaagacttggaaccaacccaaatgtccaacaatgatagactggattaagaaaatgtgtcacatatacaccatggaatactatgcagccatagaaaatgatgagttcatgtcctttgtagggacatggatgaaattggaaatcatcattctcagtaaactatcgcaagaacaaaaaaccaaacatcgcatgttctcactcataggtgggaattgaacaatgagaacacatggacacaggaaggggaacatcacactctggggactgttgtggggtggggggacgggggagggatagcattgggagatatacctaatgctagatgacgagttagtgggtgcagcgcaccagcatggcacatgtatacatatgtaactaacctgcacattgtgcacatgtaccctaaaacttaaagtataataaaaaaaaaaattctgggtccagctgagtaggcttacatgtgtttcctgattctaatgtggtcttaacatcatccagtttcatttgcattcttttttttttttggagacggagtcttgctctgtcgcccaggctggagtgcagtggcgccatcttggctccctgtaatctctgcctcccaggttcaagcaattcccctgcctcagcctcccgagtacctgggactacaggcgcacgccaccacgcccggctaattttttgtatgttggtggagaggaggtttcaacatgttggtcagaatgatctcctgacctcgtgatccgcccacctcggcctcacaaagtgatgggattacaggcatgagccactgcccccaggcccatttgcattcttaaaggaacaagtaccactcgctttattctgcctaggtttatgaagggagcagtactatttttgctgacataaactgatcatgtttatatttcagctcatctatatctctgtttcactattattgttttaagtgtctggctatgtggtttctaaatgttctctttttgcatttaatattcagacaatgatttggaatctttagtgactagagactagtgtttgctcagttataataaaaggttacaataatacgaattatgtccatttgcctttctagattttggtttcagtaacctcttcactcctgggcagctgctgaagacctggtgtggcagccctccctatgctgcacctgaactctttgaaggaaaagaatatgatgggcccaaagtggacatctgggtaagtaactgccttctcttataccccacagcattagctacccttggttgatgacagctattcgcatcctgaaggatacataatgatgcaacatgaattgagatcctggtcacctgttctttcaagtcccaattcctgtgcaaagcctttttttttttttttttttgaaacagagtctcactctgtcgcccaggctggagagcagcaggatgatcttggcacactgcaacctccacctcccaggttcaagtgattctcctgcctcagcctcacaagtagttgggattacaggcacaagccaccacacttggctaattttttgtatttttaatagagacagggtttcaccatgttggccaggctggtctcaaactcctgacctcaggtgatcctcccgccttggcctcccaaaatgctgggattataggcatgagccactgcacccggcctactcgtgcaaaatctttcctccaatacttaccttgtggactgagccacatatttcaaatttcccctttgcatttgcaaaagaagcccaagggccagcttggatgggggccgttgccaagaagagagattatttctactgtggccacttaccttatccccagagaatgagtactgagaaaaattcaggatgttaccctaaattaatgcctagaagcaaagaagattgttaactgttctaagatggaagaaaaagtttgttccataatcgtatgcatgactcaccatcatctgcatacacacactacagtagtcttttttgtttcccctgatgtgattaattgtacatcctctctgtttgggatgcagagccttggagttgtcctctacgtgcttgtgtgcggtgccctgccatttgatggaagcacactgcagaatctgcgggcccgcgtgctgagtggaaagttccgcatcccattttttatgtccacaggtaagggagtcgctagcacacagctatgaatgggttcatgaaagttagacccactcagttatcccaggaatttagtgatggagtataaatggcccacttacaaccttttttaactccagcttgctgacctgatgcctccaggaggcaaggttctgtagaaacagtatataggttttggcatcagagagccctacttgggtttgaatctgggccctaagtctgtctcagctttagtgtcctcatctataaattggctgagagttttgtgagggctgctattactgtaaggattaaatgagataatgtatgtgaagactcagtaggcccatggcatagcagtaatgcaataaatgcttttgtttcacttctgtcttcctaccctttttcaggatatttccacttattgggttctcattgcaatgtggttttaaatgccaaggataaagtaggctttgcatcttagtcttgctactgcttcatttcctatttctgtgctctttgtcctccagaatcaaatttaaaaaattttatttaacgagtgggcagtaaggtaggcaggtcttggaaaaatttaacaccgaaaatagatacaagatactcagaattaacagtattttatcaccatttatttgcacataagaagggaacattttagagaacgcaaaaagtcatatagttttgcttaatcatctgttttcattttaaggaagaacatgtgtccactgggttgacaacaaggtagaagcccatggtaattgcattttagaacaaagaggtgaaccttggagtagatttaacttggctcctttgaactgataacgtcatagtgtagaagatagtgctaaatgctgtgggacaaataaaatagagaaggagttaggatagtggttggtaagttacatgaaaaccccttcatggagaaagggacctttcagcaaagcctgaaagaaggtgagggtgaatgctgtgcagtccggggaagagcaccccctggctgttgaggggtcagcgcagaggccgcggggatggagcatggctgcatgtgaaggaacgggaaggaggcctgcgtgcctggaaggaaggagcggtgagagatgaggaagagagatgaggtcagagaggtaagagggagcttaattttagggcctagttaatgtaaagactttagattttactgtgactgaagtatacaggattggagggttttgacaggagtgatgtaatctgagttttattttttccaaattttatgatgaaaaatttcaaacatacaaaaaaattgaaaaattttgcagtgacttttgtttaaaaaagatcactttggctgctatgttgccggtaggctaaaaggtacaaaggctgaaggagggacaccagttaggaggagacttttacaatagtccagataagagatgttggtggctggttcccagtctggggtgtcgagatggagatggtaagaagtgatcagattcaagagatgctacctaccatgtgtggcaggcactgttcaaagcacttcacaaacattaactcacttcattattttaacaaccctatgagatacacaagattattgtctccattttactggtgataaaactgaagccaggagagattaggcaattttcccaagataacactgctaccaagtggctgaagtagaatttgaacccaggtattttggctccaataacatttagtgttggatttgatatgaaagaaagactccagagtttctatcctgagcaaatggaaggatggttttactgccaactgagatggggatgactggggaagaatacttacattttggagagatgttttagacatgtcatgtttgaggtgcacattagacatcagagttaagatatgaattggcagtcgcatttaggagagaattctgggttggggatgtatgtttggaatccccagtgtatagataatagttaaagccatgaggtgagctcactttttaggcagtggttacagagaagagaagaggtccatgaattaaactctggaacataccgctatttagagaacaagcaggtgaagaggtatcataagagttgctggtgaggtaagccagagggcctgctgtcctaggagacaagtgaagagactgttcccaggaggagggaggagggagtgaggagctgtggggagtgaatgctgctgccaagtcaggtaagaggactgagaactgaatgttgcatttagaaatgtggagatcgttaatgattttgtttcttttttatccccccacaccctcaccttcctagatcattaatgattctgaagtacacttttggcagaggaacaggagcaaaagcttaatcatgtggttgcaacaaaaaaggaatagaaggaaaatagacgacacgctctttccagtttactataaaaggaagcagagaagtggtccagtattgctctggccagggtcaccagtgatctcgttattgatcaactgcatatccttagtctttttcttaatcactgcccagcagtgattaacacttcacccttgccctccctccctctctcctttcctcccttcctccctaactcccttttttgggactgggtcttgctctgttgctcaggttggaatgcagtggtgtgatcgtggctcactgcagctggacctcccaggctcaagtgatcctcccttagcctcccaaatagctggagctgcaggcacacaccactatgcctgactaatttttttttttggtagagatggggttttgccatgttgtccaggctgatctcaaactcttgagttcaggcgatctgcctgccttggcctcccaaagtgctgggactattggtgtgagctactgtgccctgtctctttagagttatatgttagagcagctttagattcacagcagtattgagtggaaggtacacagtttgcatgtaccctctgtgctgtcctgcctccctcccctgctgacccctgtcataatcaatgtgccccaccagagtggtatgtttgttacaatcaatgaacatgcattgacacattatcacccaaagtccatagcttacatttgggttttctctcagtgttacacattctgtgggttttggtaaatgtatagtgacatgtattcaccactataatacatataaaattgtttcactgcccccaaatcctctgtgctctgcctgtttatccatttctccctaaccccctgcaactactgatcctttcactgtctccacaagtttttccttttccagaatgtcatatgggtagaaacatacaggatgcagccttttcagattggtgtttttcaaatagtaatatgcaataaggttcctccatgtctcttcatggcttgagagcccgtttctttttagcactgaataatatttccttgcctggatgtaccaccctttatcctttcacctacggatgacttggttgcttccaaattttgacaattatgaataaagctactgtaacatctttgtgcaggtttttgtgtggacataaatttttaattcatttggttaaacactaaggagcacaattcctggatcatatggtaagagcatggatagttttgtaggaaactgccaaactgtcttccaaagtggctatgctattttgcattcctgccagcaatgagtgagagcttctgctgcgccacatccttgtcagcatttggtggtgtcagcattttggattttggccactctaataggtatatagtgatatttcattgttgttttaatttttaattctctaatgatgtatgaggatgagcatcttttcttatgcttatttgccatctatatatctttgttgaggtgtctcttcaggtctattggtcgtttttaacttcaggttgttttattttcttattgttgagtcactcattacattttaaaacactttttctcattgcttctgagacgccatattctccagttttcctcctgtcctctggaagcaccttctccatcttctctaccagacttatttttctctgctcatcctttagatcttttcatctttacaacatctttctggagccatgttatttactgctgtagcttcactgatcactgtggtgatcagtcctcagttaactttttgtcccagacctctcgatctagggcgacatatccaagtatttgctaaccattatcttcactttcatgtattgaagtcagatcaatggagacatattcagaaatgaacttgacttccccctccctagatttgctctattctgtatttgctgccttagtgaatagcatcaccatctgaccaaggccagcacaagccttgatgtttcctctctcaccagtgccacagctgatcagttaccaaatcctgtcaattcaaccctccattcatgtaggcacttctaagaccatactatcatcttcccttgcctcaattaaacaatagccaattatatggattcctggctccagtcttgtccccctctaatctattgtcaactttgctacatgactaatctttccagaacacaaacatataaataaataaaacataccacacacacacatacacgtacattttctctctctttctctctctcttacttaaacacacaaatctgattatatcattttctagcctgaaacttttcagtggtttaccattgcctctaaggtaaagtttactccataaggtggcaaagcattggcttacaaacatttttggctatgataagaaaaaagtacattttatactgtgacccagaacacgcatatatagatacaaatgaacaaaagctttgtttgcttgatttagagatggggtcttgctattttgtccagactgaactcgaactcctgggttcaagtgaccctcctgcctcagtctcccaagtagctgagactagaggcgtataccaccatgactgaaaacaaaagacttttttttgagacggagtctcgctctgtcacccaggctggagtgcagtgatgtgatcatagcttcctgcaatctccagttcctgggctcaggcagtcctcccacctcagcctcccaagtagctgggactacaggcaagcaccaagcaccatcatgcccgtctaatttttaaacatttttttatagagatggactctctctctgttgaccaagctggtcttgaattcctaaccttaagcgatcctccctccttgacctccatgagccactgcgcccagccagcaaacaatttttttaaaaaagcaaaacttaccttactatgtacagtgcatttcaatatattttattctattccattttaaaaaatgctgatttcgacttactaaattgatctcctatctgctatttcagaaacaatgacatagaaatacctttataacctgactcctgcctagctcttcagccccagctcccactctcccaccagtcaccctaattttcttctcgttccctgaacaagttctgttttctggagcatttcccactgccgagaatacatcttccctatcccaccccactccacccactcctgtattctagaattcagaataaaaaaaattagattggatagaaataagaatctagataatttctattcactcttcatgtctctaaactttctcttatcgtggtgcttaccaagctttatattgtaactacttctttcattgtatgtcttccacaccagactgaacttagtgaaagtacagacgaaacatgtctttttcacaactgtcaataacctaccacaggatctggtgtgtagtaggacttagtaaatatgaaatctgaatcagaaccaccccatccccagtggcatttgtttacattcagaataaaattcaaggagtcattattactatggcctacaaggcacagctgtcattgccccttctttggtctcatttcctgttactgttcacctccggttctgagctccagtcacagggccttccttgctgtttctcagacttgccaaacacatacattcccctcagagaggagtcataggtcccctcagagaggcctgtcctggctacccccatcattctctttctgtaattctgctttttcttcatagcacttactttattgtctcctcacctcctatcaccacttgaccataataagcatttggtttttgtttactgttatgttcccagggctttggacggtgcctgagttctagtaggcactcagtaaatatttgttgaatgaattaatgcatagggttgttcgaacactgactccaaaagcccctctggagagtagtcttatccaaatcataatatcagtagtaatatcaaataattacatttgtttagggcttttgagtttataaaataatttcttttttaataggtttattttttgagacaggatctctgtcgcccaggctggagtgcagtggcgtgatcttggctcactgcagcctccgcctcctgggcccaagccatcctcccacctcagcctcctgagtagcttggtctacaggcgcacgccaccacgcccacctaatttttgtatttttttgtagagatgggatcttattatgttgcccaggctggtcttgaactcctggactcaagcagtccgcccaccacggcctcccaaagttttgggattacaggtgtgagccactgcacccagccaatatattttttaaaaatatttcaatttttcagtttttatatttttggcgacagggtcttgctctgtcacctaagctagagcctagtggtatgaccatagctcactgtagcctcaaactcctgggttcaaacaaccctcctacctcaggctccaaagtagctaggactataggcctgtgccaccattccaagctaattttttaaaagattttttgtagagatgagtctcactacattgcccagtctggtcttgaactcttggcctcaagcaatcctcccaccttggcctcccagagtgctgggattatgggcagaagccagcatacgcaacctaaattattttcttttacttaatctaatttgagctacataactatattttagaataggtaatagcacatattttatcatcttgctgatgaagttttggaagctgaagtttagagaaatgagttaacttgccaaagccacacaggtaataagtaactaggtcagtattcaaatttagtgtttgttttactacaccatactgttgcaaaaagagcaagataaaccacttcctttacttttccaatgtccacagtgtttcctgtgagcaacttggatcttttctatcctccacccccatcacctcacaccatggcaagagattcttactgaacccttcccggagccggcttcagatagggggtcctagaaaacagctaagcatgctgtcagccacactgtctattagtgcttagaaataaactaacagtctaactgcttagaactattatttgtaatatgatgttagttaacctgaaagcttcaagactcagagaaagccaacaggattatcctaaacgtagtcgctctttaatcccagttaaataattccctaagtagcaatacaagtttttgtatgattagtacagagaatgagaaacaaccagggtaggaagtcagtagatacttgctatattaccaatatgatctctctggcccttggtaatatacatgtgcttggcattgctgaatgtcataggcctaaatcccaaggcccattagagaatacttcaaaaggataaggcatagcagaaaatgaattcatcggttatttaggcttttcttagcttagacaaccttcaagtaccagaaagtgtcaggtgaaggaagtttagagtctgtcccagagtcctttttctgcttacgcctcgtgtttctgggcacagttgtatctcagtagacctggagcatagtcttctgatggaggcgagtgctggctgcttttcagcctgtgaggccagctgctattgctgtattacgggagatagcgtgattgagagaattccttatgcacaagatccttccttttctcagctgttgtcataggcttgagctgagtttatctgtttttcttcctgaagggtctagaaactccagcagagctggtatagtgttctaaatgatcacttggaagaccagagggcaaagcctctaccatgtagctgcttctagccaagttgaattccagagtagctacatacagctgtgtgggaggccatgctctgcaaatggatatagttagctcaagaattctaagctgctctctattgtcagtaatgtgtggaatgaagtatcctcacaattcatgtatatttctatgcctggtgttgtttgtttgacacaagtttcctttcataggcatcctgagatgtactaaagacatatattttcaagttggaatgacagtggcatacatttaaaagaggatttatttgaggctaggttgattgtataccacctagtttttataattatgtatgtgtcttcctcctctccccactagaatgtaagcctcttgattatcagagctgtgttttacactcaataccttccataaaacctgacagcccctggtaagacataagcattcagtaagtgtttttgaatgaaaaactgagtcatcactacttaactatggaatcttatatcagactcttgtttttttttttttttgggagacagattttgccgcccaggctggagtgcagtggtgcgacctcagctcacggcaacttccgcctcctgggttcaagtgattctcttgcctcagcctcctgggtggctgggactacaggtgcgtgccaccacacccagctaatttttgtatttttagtggagacggggtctcgtcatgttggccaggctggtcttgaactcctggcctcaagtgatctgcccgcctcggcttcccaaagtgctgggattacagacgtgagccaccgtgccctgccagactcttgtattatattattaacatgatctaaattatttattcatcaaaccacttggttttatatactttttttttttttttttttttagtgtagagacaagattttcatcatgttgcccaggctggtcttgaactcctaggttcaagcaatccgcctggctctgcctcccaaaatgctgggatcataggcgtgagccatcacgcccagccatggttttatgtagttttgttatatgagttattgtgaaggtgaccaagtcaaatgacttttaggtgtaaaagggtgttttgatctactgtagagtttgcttcctattccttaagtaaaataagtttgatccaggccagtgtttttggattaaacttctcagagcatcccaaagagcagtttgataaaaccctgagtctaaattatagaaggattaaaagttgaaacttgctgttttcttgagctgttgtggaaggtgaaacctggcctggcttcatgtgttggcaaatatttcctctgatctgcccttccaccgatggatgcaaataacttaaattttttgagcaccagattcattcaatatatttttttaacaacatacttaaagcctagtttaccctattcccctgttgtaccacctgctagcagacatactaagatcgtttatttaactgaaggaaaattaatttacagtgaaaaaactgcagcgttagtgaaggcatagagatctcttgtggacaatatttttgagtctttattgattagacttcattgtgacttaattaattgtaatactgcatgagcattttattactgggaacgcaaaacccaggcttacataatgcttctgatggagaatgtaacctgcagctactgccaaaaagcttctacttagaggcaaacaactctgccctgataggcttactcatcaagaaccacacagcatcttgcttggctaaaagcactttgtttagaaccaatggggcaagggattaaattggctcacccaccaagtctccatataccgaggggctcagagtcctcaaagcagttttctcataccttttgagacacactgcaccgccagagagaaaaatctatgtagtgctttcatgtcagtgaatgtagaaatcacagctgatgtcagaaaagaggttaagaactacttcagagtgaaacaggccagccgtgttcattcccatgacctaacataactaaaaaccagtagataaatagtggtactgccctatttattattagccttttcaaaccagctgtctcctggcttatggcaaccctaaatagaaaaataaaagaaggacattccaagtggaaggacttcagagatatggataatagtcaacatttattgaccactttctatgtaccaggcactgttgcattaccttatttaatgttcagaacaactgtctgaggtaagctgttttatgaggtaaactgtatgagaggttatttgataaataagaaaactgaggcatgataaggttaagtaacatgcccaagatgcacatctagtaagtggcaaagctgagatttgaacccaggcagtctggcttcagagaccatctaaccatatgtgtttgtattttcattctcaataaatacatagtaagttagtccaagaatcaagagagtcatagaatggatatatttgtctgcatcgggattacttactgaaaaacgagtagcaggaactctgtattggacctggaggcagaattttcttaaactgtaatgactgatactaggagtcaaaagatactagaatgtaaaccacaagatggacagcctcctgtaaaacagtatagcaagccaggatcttttcagggttgggctagagctaaatcttggcatccctaccctttaggccaggatttcctgatttctgaattttaattctggcagcatcatgcccacctagaaaaactgatcgaaagtaaggaagttcaagaaataggtgtcatttttctaataaatggatatacatgggtcaaaaccttttctttgtggtctgtctcgggttgataaacttggtaaaactgaagagaaaagcctctcagtgcatgtttattgattcctaaagaaacttttcttatgggctccatctctttgcgaaagtgttccaggccatctccctatggcctctatgttcagtcactgaaagtgtctcacagaatttagagatataaagaactttatttctattccaggatattctgattacaataatttgcagaaaccactagggttggaatttatagttaaatggataattctccaccttcttttctgatatcttactgttggaatatcatttttgaaattttactgaagtgtgggacttccatttttcttcccccgagcaactgaaaataaatgtttcaaaacatgacagttttttcttagtgccattgtgtcaagagaagctaatctcaatgcttattttttatgagtcggatcttactgcagtcagtgctgtcataggttaagttccaaggttgtgtattttctttgtttgtgtaaaactgtggcattgactacatccttgtcaggcttggtggcatgcacctgtaatcccaacaactcaggaggctgagatgggaagattgtttgaggccgggagatcaaggtggccagcctgggcaacatagcaagaccctgtctctaaaaaataaaaataaaaaaaatagccagatgtcactttgggaggccgagatgggcagatcacgaggtcaggagatcaagaccatcctggctaacacggtgaaaccccacctctactaaaaatacaaaaaattagctgggcgtggtggcatgcacctgtagtcccagcaactcaggaggcatattatcgtttatgaggcaggataatcatttgaacccgggaggcgaggttgcagtgagccgagatcgcactgctacactccagcctgggcgacagagcgagactccatcaaaaaaaaaaaaaaaaagccagatgtggtggtgtgtgcctgtagtctcagctactggagaagctgaggcaggaggatcacttgagcccaggggttcgaggctacagtgagctatgattgcacccagcctggccaacagaatgagactccatttcaaaataaaaataaataactagtcctttaacttggtatttagaaatgtttatttctattatagcagtaatatgtcaaaatttaatgtatagaataaaagcattccaatccttataacaccattgttctagcagtacccaaaataacaaaatttcagtgcaacaacaaaatccctgtattttgtattattatagttaacatttatacaatctctgaatgtatctataggttagcacatttactgtatgttatttatatatacaaatgtcattttttttttttaagacagagtctcactctgtcacccaggctggaatgcagtggcacaatctcggctcactgcaacctctgcctcccgggttcaagtgattctcctgcctcagcctcctgagtagctggaattacaggcacacgccaccatgcctggctaatttttgtatttttagtagagactgtgtttcaccatgttggccaggctggtcttgaactcctggcctcaagtgatctgcctgtctcgggctcccagagtgctgggattataggcgtgagccaccatgccgggcccaaatgtcttattttgaggaccatttgtctatttgtttacatttttaaatagtgactatgttaaataaataggtttgatcttagctggcagttgacattgacagtgtttcttgagcgtattaataaaacatcatttttagggcttagtccacaagcagagtgaagattcctaactctggctggcttcttagcaaaagaaggtatcttggcagaaaacacccctggtttcttattgatttactttttaattatttctgcagggatcatagcactgcaagatagtcacactgttctgtccatgttataacaagatcaggacattataacagactttattttcttttcatgaggaaaaacagcatgttttgtgtgcagtttgtcttttaggaaaaggcaggcagcattaaagaggtgctctgagacaaacattttttaaatccagaacatctaaaatacagggatagactcttatcaaagccatgtggctccatcctgagattgctgttgcaggccatccattggtcttgttctgtttgctataatagcatcacttctcccccagggctggtacccgagctggacaaagtgagtggataacagcatcaagcagtgtattgcatagcatccttgttctgaaaactttaagactttaatgtcatttaacttttaaaaggtttttgtcaagtaattcattttccatagaaacatgtttcagagatttaatcgccaatttatttttgtttcctttttagattttgaaatttagaaaaaatagaaccctctttgaagtgagaattgtgccagaagcaattcattactaagaagtaaacatttttaagaagtttgtttaaattattgaaaatatagaactcttgggctgggtgctttagaattacctttgaacacacctaccattgactggaccaagtacataagaaactagatcatccccttcttctgagcacctgtaagcagcatgcactttcttgcctgcaagaaagcctttctgtgccttctggtacacagatgtcttctgtttccaccagctcaaagcagctttatgtggtcagaaagaatccatgactcagtttcttctatgccattgctcaccacagagctggaaaggattgttttgccatgttctgttctttggtgtcacatgcagggtttcagggacaaatggctttccctccttcataggatcagcctgaagagtctgatgatctggttccttaaatttttacctatctcctcttatctttgatccttgattcgggaagccttctgtttcaagccttccatcatagtcttcatcaccttgcaacaactagagtatataaataagtttgctctaccacagtgtatttaatcctcaccagcaaaattatgaataagacaacgctccccatttagtgttctcatgtccctgcctcattaatccatccaacttgccgtctccccttaaagctagttcttggtctttgcaccatctatttgcctggcccattttgtactaacctagcttgtgggtgattctgtcatgatggaacctgtgaagatgacatggcatctgatctgccagaggagagaattgttttggtttgttttcataacccagaataccaataatgtgtttattttaggtaccatgtaggttaagagctccctggagtaagactgaccagaatttgtattctgctttggcctcttattatctgatcaagtttctcaacttctctgattttaaattctctttgtctataaaattgagataatagtattgggttggtttgtgaagtagatgcttaaattaacttaaagggtttagcactttgcctatcatgtaaatggtcaataaatgttagtaatgattaaataatattgttgaatgaattgctctattagtctttcattctcttcttccctattttttttactcttttctatgtatctttctctcatttttgctctcttggtatgccaaagggacattactattttcagtcaaatccacacggcttatggagaagacttatctcccaagaattgttttggtttgttgtaaccacttagagaaatttgttttattatcaaggacaaaaaaaaagaaaaaaaatgttgctttcacagatacggactcacactggctatgtcaacttaattctcattttaggaccctgcccatacagcagctctctccccacaaagtcatccaaatgcctggcagcgcagcagggcaaggcctgtgctgaacatcctctagttaacgttctgttggcagatcaggtttcctgggcccacagtgactctcactgcggagaccgcttggcgtcttgcatggagcagatgaaagcagctctgaagggaagctgcttctctggcacacacaagcagaggagcatattcttgcattgcccaaagtggttcagtttcatttagcatcagaggccctgccttttgggtgggagcaaataatggggcccttttattttttatttatttatttattttatttatttatttttttagagacggagtctcgctctgtcgcccaggctggagtgcagtggtgcgatctcggctcactgcaagctccgcctcccaggttcacgccattctcctacctcagcctcccgggtagctgggattacaggtgtgtaccaccacacccagctaatttttgtatttttagtagaaacagggttttaccatgttggccaggctggtctcgaactcctagcctcaagcaatctgcccacctcagcttcccaaagtgctgggattacagacgtgagccaccatgcctggccaacagggaccttttagacaataaaatagagtagttcttggtatctggaaaagttgatgttttgtttaatgtgagggctccatctttccatgcttgtaaattgaatgtcctgtgggtgattgtgttcttaggtttgagagcatctattcccctcgttttcaccctgtttccatgttttatgtagaatggtgtcttcaaatctcatctgaatttaatttcatgaactacatgacacttaggaaatatgaattgatgatgatactctagctttctgcattttgtcatattttccatctgcaccacatatgaaaaatgttaaatttctgttccttggcacgttcgatattatgtaggatagtcaagattaaaaagctcttgcccttgacactgtaaccaagaattgttttggttcttaatctggggcctgtagacaccagggtctgggggatctatgcaggcttcataggacatcgttgagtagtctaaagttacatgcaaggtcttgtgtataaattcttgtgcagatttttttttttttttggagaattttcaaggcatctgaggccaaataatggttaaggatgactgaatagaggtttcaagatcctgaaattgaactagatatatcttctaattaggaattattatggtactgtttttggtttggttgtgtgtgtggtggtgttgttgttattgttgtttgcttttaaggaaattgccttggaaaaaatctgttttaaagcaagcctgtaactgaacaccattcagctttggtcatcttatgcactaaattgtgtgtggagaccaaaggaaaacaggagagtgccatctagaggccttaacaacagtttggtcctagccttctccctacacaggagtctttaacaacttcctaaattaagaacacttttgtcctcttaagtaactgcaaacgataaacatatgtgtcaatgacatttataatctatacaggtgctgctacagttgtggctctagccttactactctggaaatgtaattttaataaagcgtactgttgtagatggcatttactttattctataggaatgtagaagtctttgagatgtacactgcatttgaatatagttttaattgtaaagcaacaacaaattgatgcctgatgtaagaaatcattttgatataggaactttgttgtattatcttttgaagttagagtaaattaaaataagagtaatttatcttagttacttgtagtattcttttcacaacagtaatatagaatggtgtttgccaaatggtatagaaattgaagagttgaattcaccctagaaaagtagatcaatttatatccatgtggagatgtataatagggtagtcaagagcacagcttagaagtcccaactttaccatttctttgccatgttgaatatgttaactttcaaaatcttgtttcttcttcatttataagtggagctaattatagtctctaagttaaggttgttgtgaaggttaaatgtaataaagttggtaagcacagtgcttggtatatcaaaagtagttttttgtaataatgtcttactgttgttgttattttcactggccagttttgttttcaggacggttgtgattaaatagaagcagaaaatttaaaaacctatagaaaattttattttaaaaaaattttcacaattacaatctcatttgattaaatactcaacaaatatttatttacatattcagtagatatttatgcagctcctaagtgtctagatataataaccattttaggtactggagagttgatactgggtacaacagaaagaaagacatgggccttgcattgcagtggaggagtcagacaataagtaaatacataaacaagatggtttcccaaagaaatcatttgcgtgaagacaatgaatgtgatgtaatagagagtgactggaggcccatcttagagtagatggttaaagaagagctttctgaggaagtgacgtttaaactcttacctgaatgacaaggagccaatcatatgaagatctgaggaatggccatttccactaaaggaaaaaacaaacaaaaaaacacatgtaaaggccattggatgagagtgtgttaaacatgtgcaaaaactagaaatgtgcatagtggcaggaaaccaggtcagagagggaagtagggggccaagcgcggtggctcacgcctgtaatcccagcactttgggaggctgaggcaggcggatcacttgaggtcagttgttcgagaccagcctggccaacatggtgaaacctcgcctctattaaagatgcaaaaattagctgggcgtggtggcacaggcctgtaatcccagctgctggagaagctgaggcaggagaatcacgtgaacccaggaggcggaggttgcagtgagccgagatcgcacactgcactccacagcctgggtgacagagcgagactctatgtaaaaaaaaaaaaaaaagggagagagagaagtaggagccttggaggcccaggactttagatttcattctgagggttatgggaagagattggagagttacaggcaaagtggtgatatgcccaaatttatgctttggaaaaattccttttgcctctctatagaaaacagattgtaatggagaaagaatggaagcagaaagaccgggtaggagacttttgcagcgtgtaagtcagaaatggtggcttggataaagatgttgaattaatggttcagtgctgaattagtgttgggggatttggatcccccaacaactctgcaccacaggggcagggtagcattgtggttaagagaaccaggtgaagagtcaggctatctggtttgacttaatagccatgtgaccttgacaagtttctttacctccctgtgcctggtttttgctattcctaaaatgggaacaatgatagtacattcctcctaggattgctgtgtagattaaatgaggaaataataattgtaaaatgctcagaagatgcatcaatagtgctgttttggtatcatcatcactgccttcatcacaactattactctcatcaccctcagtagccacattttatagatgagaaaacttagagggtggttttgaaatcagaatatacgtttcttgattttgaatccattgttctttctgcaatgtaatctgtaatacgagctcccagagaaaaatttctatagatctgaatatctgtagctcacagcccagttttaaatacctatgactatttaaataacattgagaagaaaatgataaataaggctagctgaatcccagggcataggagagaagtagcctgtggctctctccccacacaccttgtgccatcagaaattcaagttccctgagttttgaagaagggtattgcacacctaagccaaaagcattagtatgcgcgtggtggtacatttaggaggatagaactgaatattttgagaaccttgtaagatactgaatctctttagaggccattctactcttcattacttgtgttaaatagggccatatacataatataaataaatgaaatccatggattatccccagaccttttctggtcagccttttggtgaaggcaacaaccagactaccacacttgagtttctttttctccacctctctctgcctttgcttagccccttctggtggcataagcaacagaataggtaaggatcaaagagcaagagagacaaaattagaagcagggagttggatagcctccctgctggctttgcccctggttcctctactcccctggtgcctcccctcaccagagactgaaggcaggctgtttgtccattgcagaatgtgagcatttgatccgccatatgttggtgttagatcccaataagcgcctctccatggagcagatctgcaagcacaagtggatgaagctaggggacgccgatcccaactttgacagggtgagctgggaaccgctgctgcaggggactcctctgaaagctgctgcagcctcctttgcatgtgattgtaatcaggccataacctgaaaggcggacactgggaacaaactattatgtaacactaaagcagcacgtgaagcaagcaagaaggaatgtaaaaccagttaaactgctggagaatagtgatcatggttccctaccatgtgtccccaaattatcgtctgtttttggcttttgagatagcacagcctgcagttctgcagcttacctaccatggggatgtcgccttcctcttgtcttagtgtgctcaattcagtggcttctgtagcatgcttttatttaaaccactatggccatgccaggtatgccagggagctcaggaaacagtgagttgttgtctgtttacagctgatcactcagggctctcttccttagactttgtctgaggccaaaaatatcccaagccagagggcatggaacaggttggtcattatatatgctgtgccacatttgatgtggttaattggggggttgacagcttcctcctttttatgttacagttaatagctgaatgccaacaactaaaggaagaaagacaggtggaccccctgaatgaggatgtcctcttggccatggaggacatgggactggacaaagaacagacactgcaggtatctccgaaggagtggagaacaaagtgggatgtagcagttcctctaacctgctttttccatttttcgccttctcgggaacttgggccttttttttcctcctgtttttcttcctctgccccttcctgggccttggaaagaaggaaagaaggtgctttggctaatgttattactgaaagggttctggtcatcaacatgccatttcaccagggttttgtactcttttcccttctctcttggtagtcattaagatcagatgcctatgatcactatagtgcaatctacagcctgctgtgtgatcgacataagagacataaaaccctgcgtctcggagcacttcctagcatgccccgagccctggcctttcaagcaccagtcaatatccaggtgggcaataactccagtgacctagttcaggacaagtaacaccaggggggtaaaggttagctgttgctcactaaccctaagtcgagagtttcttgctcttccttacctctgtctcctcccatttgtcatctcttcctttgtcagaggccaatcaaagatctgaaccttttttgatggagaggagggatgagcaacaatagttgtgccttttgtttttttgaagaaatagcaaatcatgaggcgatgctatcctcttcacaggatgcttccttgttgtgacttctaagggccgatgaaccaaaaactttagtaatcagggaaacatagactttagcaatcaagactacttggaaagactcattatttctctctagtgttaaaggtatgcgtgtatatgtatgtactgctttccaggcggagcaggcaggtactgctatgaacatcagcgttccccaggtgcagctgatcaacccagagaaccaaattgtggaggcaagtagcaacctgtgggagctgtcagctgaaaccactttctttgccatatccttgcttcccttccttctgatttctaactcgatggtgtttccctccacctcagccggatgggacactgaatttggacagtgatgagggtgaagagccttcccctgaagcattggtgcgctatttgtcaatgaggaggcacacagtgggtgtggctgacccacggtgagtatccggccaacagccctcactaacactggggcaaagaattgtcacctgactttcagtgtctaccatggcacatttcctactacattgtatccccagaggagatctaatccagtggccaagtggacaaatgatatgatgtaacttatgtatgtagacaattaaaatttaaatgaataaggatccaaaatccaataacaacagtttcccaaagtgttttcccaaaatagtctttcatgatgttccctgctgcctgcacactggaaaaaatggactgaaggccagctcgccccatttttgttccacggttgaagactctcaacattaaaatagccttacctcttttctggattttttctttgctgagtaggaagagaaggttgtgggaagaattctcctgagaggtcaaatcagggcaaagctggttttcttataaatatctcttttcttccagtgaatttccaaaaaagactcccatgcctgctgatgtgcttgctttatgtctcttgttctcagcctatgatcaaataggcaataggggaacattctggctccacagactgagatagctttaaaggggtggagccctgagtcgctctgttagtggaaagatgtcttactttaaagtatgctgtaaaacctatcattgtagcaagatagccctgtacatctagtacttatctgtcctatcagcactgacaagagtaattgcattctttccctggtgaatcagttgctacttcaggcagccattatcttagtggatggcccatgttctccagaaacttggtgttcacctccaggatttgaaaacctgaactggactggtgccactatttcctcttggctcagagctgttggttttacatgaatggccaataaagaatagcaatccttcgtcccaaatagtaaaggagcagagagttaaattccacactttaggcttttgctttgctttaggatcttaaagagaaacataaattcaggaagaaaataaaataagttgtactgaacatagcaatgccatcagttttgggatataagcacttttgagtaagaatgttaactaaacttctctgtcattctgttttgtatcagcacggaagttatggaagatctgcagaagctcctacctggctttcctggagtcaacccccaggctccattcctgcaggtggcccctaatgtgaacttcatgcacaacctgttgcctatgcaaaacttgcaaccaaccgggcaacttgagtacaaggtacctagacatggaagagggctggctccagaagaaacaaacttgagcttcctttgagaggctatgaggcaccttccctaggacttaagggtttacttatagagaaagatgatttatcttgcaaagtagctcgggtgagcgggaagcgtcctctagtctctgtcatgacccatggctcccttaatttccatagatgagtggcttgcccctttctccccgccttcccctcatctcatggtccgtcctccccactctgttcctggcaggagcagtctctcctacagccgcccacgctacagctgttgaatggaatgggcccccttggccggagggcatcagatggaggagccaacatccaactgcatgcccagcagctgctgaagcgcccacggggaccctctccgcttgtcaccatgacaccagtgagtagcagcacagagcccaattcactgtctcagaggcttttgataaaaaggttgtgagcctggggttgggaacccagggccaacctacatgtctgaatttcctttttctccaaacttaggatgctccagcccattttcttcaggccagtagagttttccacactttatttttggcgaacttacttacttagccaagttatttctacattgaactccactcctggagagctttttcctcaatgggcgctcacaggtaccctggttaagtccagctgcactcctgccagcttggggcaggtagcagcctaactcagagccttctcccaggcaacctttccctgccagaaggccaaagtgcccttaaattaattggtttctagactggcttccaaaattgccttttcactaatgctttctccattgataaacacacctcacatgtttggcataacctggatcacttgatgatttgctcccacagctttagccgagtcagttatcttagtcacatgtccttcatatgatagtcacattcagagattttttttctcccttgggttctgtttattttcctgtcataggtcattcattcattcatttattcattcaatctcatagtaccataagattgggtagtaaatatatccatcacccttggagatgttgtaagggcagtgctgctttgaggacccttttccctcctttaatccatcatgggttaatcccttgtaaaatatagtaaaagtgaaacattagaacagtgaaaatttaaacacatataaaatacaaggcattttttattgagttcaacagacaaaattactctgttaaattgctaaaagtgtctctttatttatttttttaaattgctaaaagtttctgaaagccttttgttgatttctgtacttaccttatcatgaattggtaacaaaacagtttgtgggcatgggtccatgggccacactttcagtaatgaaagaattatatatcatagcccttgccatcactgacaagatcaacatatgtgaagtatttgactaatagtacaagatcatatgtgattaagtaccacagtaataacatggaaaattaggtggcagaggcattcagagatgggcaagacaggtttggaaggatcatggtcagctttatgggacgtggggtgacttactgtgtctactgtaactgtttttgccaaggtcgctaacaagttcttgttgataaattcagtggacatttttaaccttttatctttttggacgtcccaactgtattaatcactgttgacttcttttttccttgaaatattttctgttcttggtgtctgtggcaccacattccctgtgttttcccccacctctccttttcacatttcctttctgcttgttccttgaggttggcaaaacccagagttttatcctaggccctattcccatgtcctttgatgtactctctctggatgagtttgtccactcctgtaatttcagttactctctgattctccagcccagaatgctcctctgagttctacacatacgtgtacatgactgcctatgggatagatttagttggttattccacaagtattcacaactttaattcagcatgtcccaaatgaacttaccatgactctgtaaaacctgctcctcctcttgggtgacagtgaatggcactgtcattctccgggttacacaagctagggatgtgaattttatctttaactcttgtctttcttatttgccatatcaagtcagttgtccagtgcctgtgaatgaaacatcctctccactttcctttccttaactcaggtcactgtcatccattgtgtagatgaacaccacggcatcctaactgacttctttgcttccagtcatgtcccctgatccctgccaccagcccttttcacactgcagctagagtaagctggcttttgcaaatataaatctttataacatcatgcccctgcttaaaatcctttagtgattcaccactgttcttcctcaaacttcttagtgtgttattcaagaccatttgtcactggccacagcgttcctctcctgcctcatctacagccacttcctgcctcaccctgttcactccacccttgtagaactgtgggaagggatccaggaaccctgggagctttccgacaaaattattccaggagtgttttgttttgttttgttttgtaattagccattttgtaaaatactcttttataataattgaagtgtgatttttgttctagtgactggggcatggtgatgatgtgggcacccaggctatgggtagctagcaaggatgcagatgggaaagtcacagtgatacaagcattgtggtggttctcatttcactcacatgttttggcgagtaacaactattttaaagcagtgaattgatactacacaattgtatcttatgtaccaaaatgtaatttcagtaattcactatgctttcctggagttaagacatttaaactccggaaatcacattaatatgaaacaacaggtcaagtcctagacatttcaggtaaacaatcttctactgtattttcgggtcctcaaacacctacaggccttctcttttcttctgcctggaaacctgtaactcctgtccctctttgcctgaccagctcctgtgcatccttcaggttcctgctaggtgctacctcctccaggatgccttccttaattcccaaacacccccattagaagacttgatcatgctattttgtaattgtttacttgtctctatcctctactagactgtaaaatgagggcaaggtctatgtctgtaaattcacattttatcctgtaacagtaagcatttggctatttgttagattaataaatgaatgaatgaagataaataagaggaagaaattctaattagtattacctaagcaaggtaaaaatggaaaaataggtatatgaaaatcctgtataacccaggagtctagaaaagttctgtaaataagaaagttaacagaaagtcctgccccaagcccagttactagagtaagaggcatgacagaataagctgccaccttgagcttttccttcctgtctctcttcaggcagtgccagcagttacccctgtggacgaggagagctcagacggggagccagaccaggaagctgtgcagaggtaatgtgacatctggcagtgcttgcagaagcccctgggcaggctcccctgcaaccagcgaaaggtcacctctgcccaaggaggtggtagagtgcagcttcaacatttgtgtggtctctttgctcaagccagatggcatgttccaccccacatggaagtaacagaagactacccagaaaatgtcatttctgtaagcaccattggaagtcccctaagtgacagcaataaccataagaactttttctttcctccctccttcttccttgtcccctgccttcatattgcaactctgatagtattcacaaggcacaaagcctgctcgtacctgccaagaactgtttactgaaaaggaattggagatgtgggatgacagtgatcctagctagtctggccatggacctctggcatggacttttcctttccaggagaatgaatacctcttgtactgtttgctgtgtgcttcttccacccccttgtaccaacaaagagatattgaaaaagagaatatgggattcgggccagggacagatgcaaatatccattgtttacagaaccttgttgagagatgcctaactcacagagaacggcagtgaccatcaggcatgctgtactgttcatttggcctcagttccgttagccctggtccttagctccatgcatgcccccttgtgggagttgattttcttattatccggggagggggtttcaccagaatccagcatgtattttcccagaaatacaggtgttcttcaagattatatgttttttcctttgagggaagttgaaataaaatggttttcatgggcttttggggaactttgggtgtctttatccaatggttattaaaacattaatggcttactctttggcaagttcacataacactgattactctacagtctgttaactgattttagctgaaaggggcaagatagttaagaatgaaatgagaccattttttaagaacctgccagttgctggctaggactctcatcctatccccagtagctctgtgtgagagctgctattcagaaagcagctggtcctatgtggaaagaaaaccatggcaaacaggggtgttggcaggtgggccagctccttctacagcttggccaatagaaggaaaattctggtaacttttttttttccttgatgctgttgtttctatagtttgctgataagagggtatataaggttacaaatgggccctactgggtcatgaagaaatgagaaatcaggaaatttactgcctttctaccttaaaagagacagcaatattttatcttctttgtcttagactttccttcctccaggtctaccttctttcttctttagaccaacatttcaagggtataatgcccatcagttttgatgtaataaaaaaggtgtagtgcctcttttattcatgcctccagaagagcagcagcggtggaggaagtcatccaccagacaaagagggacaatatcttattgatggtattaactaagtgctgggtctgaaagatcttccgaataaaagccatcagtttgggaactcttcgtcttgtgagactcttctgtttttattttttgccttgctttttccctccctaactaaacatttcatgtggttttatttcttcatcctccacagaatgttggttccccaaggacaacatcagtttttcttctctgatgattgagttatagtcaccaagcgagagggaaagggtggttttggaattcatttatcctcaaatggaaggatcagttttctgtgacctgtagtgaagaaagtctcaaacctggggcctgtgagatcgagagacatgcacagagtccttctgaatatctccccaggttcatctctaggaatagtccttagggctcatttcctctgacttgtattttggaaatttggagggaaaagatgaataaattaacatggagaaaataaattcttctaccgagtagaatgaagcaaggaaaagtgatctcatctttgtgagctagatctactttctctcttctcttcaatggctattcttaggttcaaaattcagccacttcattgtcaagccaacttctgttggccagttagacgtgtctcacttccatccaggcagggatctgtttgccatcaagccttcgtgagctctggcactatttcattgagtgctttggattaacttctaatgcttcttgtggaggaatattcctgtctgtcttttttactatgaaatgtgctcctgcttgttgcaggtacttggcaaataggtccaaaagacatacactggccatgaccaaccctacagctgagatcccaccggacctacaacggcagctaggacagcagcctttccgttcccgggtctggcctcctcacctggtacctgatcagcatcggtgagtagccacatgagctgtgcgagctccttgaggctcatcggacaggcacccttctgattagtctcacagcgacggtgactagcatcgtggctttaaatagaagccagctgtcatcctgaactcacatcttctcagctccttgcagtaagcaatgcacagggcaaaggttttttactgcgccctggagcaatgcgagattcctctctcccattaccttgcagacctgtttattgtctgcatttgattcccatgattctagatgttgattcatagataaaattgaacttgagacctgcaagaaagtgaaactctcagaaggccacctggaaacaggaagatttttagccatatcgatagacttgacctttaataatccatcaccttcaaaagaatgagcatttcatatcgtgttaccattgaaccgccagcctggaaatgaagacaaagccccttctgaatagtagagcagagatcctcttgagcgatgtatttaagaggtcattctttcaatattctgatggcaaaaatcttttgctaggttcggttatggttataatccattctcttgaagaaataaaagcaagtttaaccttcctgaccaagaaaacttcattgactccaagtaagcctggaagcagctgcggaatgacactttgctagttgaagaagatgattatcttctgtgactatcttgatgactaaaaatctcagtcttggccactccgaagctatccccaagctcatggcccacacgttcaaagccaccaccagttactagagcgtattttatttctgtcttttggggaggacactgaaaagcagccttgggaaggttgaaaagcaatcagattccaaggaaactaggtttatatatgtggtgttatgaaatcttgcagccagcttgcactggcaagcttgacacattttttttactgaggctggttacccatttggcatcaacataatcagcagaggcaagtgaactctgagcagagtgggacataattagtgccacgttggaaccctaaaagaaggaagataagctttcataaatgactatgagtaacttggtaaaaatggtctgtcaggagtagcaagaatgacaattctcaaataaaactctgatggcacagaaagacaggctttttctaatgaaagtctctcaggacttacagtgttcgtacacactaaagagcactttgaggccaggcacggtggttcacgcctgcaatcccagcactttgggaggccgaggcgggtggatcacaaggtcaggagttcgagaccagcctggccaatatggtgaaaccccatctctactaaaaatacaaaaattagccgggtgtggcggtgggcgtctgtagtcccagctactcgggaagctaaggcaggagaattgcttgaacccgggaggcagacgttgcagtgagccgagatcatgccactgcactccagcctgggcaacagagtgagactccgtctcaataaataaataaataaagagcactttgagtgattactggagacctgccttctcctcccctatacgtttcctgtgatttctcataacttcaagctctacactggtatctaatacaccctttattccttcttttctccttgtctccttcttcccttcctccacagcctgacacttaatgtttcagcccttgtctgagtctgttgtttagctgaagtcctttaggtatccttgttgaatgctaggtgttcctcaggaggtcttcttatgaggggaacatgaagatcgtcacatttccagagtcaggctttatcacagaccctatattctgttgacatttgttactcaaggaggtccacactggaccacagctctgtctgtgtgatatccaccctgcctagagtcattgtcaaggccttgcctgctggaaatctatctgctgtctgttttcatgtgaacctttttggtgttttgagggttgcctgtggccaagcctatttgaattggaagaaaatgatgttttatgagtggcaaattgcataagatggggcatttgtgcaaacccagcatgtcttgatgggatcactatacaaatatgcagcaaaagagattaaagccagtcttcaggggaaatgagaaactttccaaggctataaaacatggaatacgggtggcctgcatgggttcttgaattcctttcattttctggaggaaatgattaaagaacagtatatatagctatccttctggggtagaagagatgaagttcaacatggaaacagaagagtggtctaatcaaccttttcatttctggaaatgtgtaatttaaggttaaaaatgttttaaaaagtgtaactaaaaaatttttttaaactaacacaagatagattttatccaggtgggaaaccaagtccctccttgaagagtatagtgtgggagtatcagcctaatgcgaggccatcctgaatttgagtgtgattgcaaataaaaataaaatcaagcacaattgatacttatcagtgcttctcaaatgagcaactgcatcagaaccgttcctctgaggttactgtgctggactgacctgggtatcagtctcttcacaacctgagcttctgaaaaagtcatgaaatacctggacctgggattttctgtgatgggagagaattatttttgtgcagaaagactgtattgctacttgaagaacatggctttctgaggggatcagaaacatgtccatttcagaaaacattgaaagcataggaatcaaattttaggagaaaatagtacttacttgcttctacttcaacctgaagtagaaacagaaatgacaagttataaggaaatgcttctcaacacagccttcatgatccctgttcctggattgtggcccgccaaattcatttgttttttgtgttgctgaaccaaatacatgttcgtgctcatttcattagctcactgctgggtcaagcctcaggtagagtctgaaacaaaagccatcattagcaaagacagggtaaaaggctttcacctgctgccagaactctctggatacctctgcacggtcattagattcctcctggtcccgcgctgtctgcattgtatttgaactcgcttgttaacctgcttcctgagctgtggttctgcttcagtcccaaatgaatcactggcaaggtagcacatcatttcatccaaagttcagtgtaatggcatctctgccctggacatgaaaccctgatcctttccatctgctactggaatgctgctgccttggcagtcttttatctgcttacctcagcccataaacatctctttctgatcatcaggtcacaagagtaggtgttagcttctaaccccgatgctgtcttaggcattccttatcaatagcttgttctttctttctgtaagattctggctgtgttccagttgagcagtggggtctttgaaggtaatccatatgattcctctttcattaggaggttgggtgagtgctgctgctctgagaagttgattttcacagtaggtgaccttatttgttgaccaggtacgtgcaggatctcaaggcccacattccttaagaatttgttgtctccatcccaggatcagaagtcttcattttcccccaccccaatcgccaccttctattttctgtcacagaacctatgagttctaggccagacctttgaccacaaaactgactgttgtttccctctggccatacggagatcattgctcagggaaaactttggctcaaatggtgaatttaaggtttctaaaggcactagatagacatatgattataaaagcaagagcttctgtacagtctggcctggaggatattgagaagcttttctctctggcctagtgtatttataagaactggatgtacttgatctcgggacctcaccaggcttggaaagtaagccaaccgaaggtaagtagaaatggaagatgtacacctggagccctctaaagggaagcaggctagggaaacgactgatgtctggaaatggcatgaaagtggcataatatgcagggctacctgggcagccagccgtctttatgttcatctggaacagcagtccctgtgtgatttggtcaaagcccctgagtcctagcctctaaccttctcttcccatatattcagctctacctacaaggactccaacactctgcacctccctacggagcgtttctcccctgtgcgccggttctcagatggggctgcgagcatccaggccttcaaagctcacctggaaaaaatgggcaacaacagcagcatcaaacagctgcagcaggtaatggaagaggtggcaggcatccctggaggagcatgggtgacagaggccaggattgcaggaggactggggtggtaaacgtaccccttttatgtcagcaacattgcagttttataggttaaaaaagtatagctttctgggccgggcgcagtggatcccgcctataatcccagcactttgggaggccaacgtgggaggattgcttgagccctgaagttctagaccagcctaggcaacgtggcaaaccctttctcccccaaaagattaaaaattagcatagtcccagctactcctgaggctgagatgggaggatcacttgaacctgggaggtagaggttgtagtaagctaagatcacacccctgcactccatcctggcaacagaacgagactctgtcttaaaagaaaaagaaagtatagctttctaatgcactttctttactttgtgttatgtacagccctccccaggatcaaacttccttcccctgtgaagggactaaatttttctcctgtctctagttcattggaaaggaatttctgggcttgggtttctgtgggaaccaccagagaaggtgctactttttttttttttttttgagaccaagtcttgctctgtcacccaggctggagtgcagtggcacaatctcagctcactgcatcgtccgcctcctgggttctagagattctcctgcctcagcatcctgggtagctgggactacaggcgtgcaccaccatgccagctaatttttgtatttttagtagagacagggtttcaccatgttgaccaggctatgtctcgaacttctgacctcaggtgatccgcccgtctcggcctcccaaagtgctaggattacaggcgtgagccaccttgcgcgcctggcactctgcgcatgatttaggatgctgggtcttgattaaacctgctgtacattgttaccacctggcattctctccaggtggtatggaacggcactctcagaggaaggaaatgtacctctatatgtttctgtactataaagattctataaagagccaatttcctttctgccttcctgatgaccaagcttccaatggcgtgtgctttgtacacagatttcacattggacacttgtactcatacaaaggccatccttgatgttttccattcattcatacagaacaggatgtgaatctatttagtgcaccagatacttaggtaaatgagttaattgctcatcaaggacactgttctcttgcggctctttctgcccatgagagcttggaggcagatctgcatctgctgaaatcactgcatgaggcgggtctggctgcatcccatctgtattaactactttcccttcaggagtgtgagcagctgcagaagatgtacggggggcagattgatgaaagaaccctggagaagacccagcagcagcatatgttataccagcaggagcagcaccatcaaattctccagcaacaaattcaagtaggccctcactctttgctttctccaacttgtttggagtttgctttcaggctgatttgcctgtgcattttggaggagaccactcagtgcaaagtggatttgaggtctgtttatggttgacatgtttgagtaaaggtaatcagaccttctggtgaacaacaaaagcataaatctgagacacagatagttctttctgtttcttcccttcctgagaatagctctgagtaatcttcaagctcacaataatttttttcctttccccatatatgttttaggactctatctgtcctcctcagccatctccacctcttcaggctgcatgtgaaaatcagccagccctccttacccatcagctccagaggtatgagtcattttgtgttgtgcctaagccattgtctcgatagcctggtacccttggcttgactcactgggagatatggactgacttgagcattcatcttgcaagaatctatttgaaaaggagagaaaccactgtaaatttcaggagccttcttgaaatcccaacttcctgtgccacttcatttccttagccccatgagcaaagtaatctgatatctaatacaggagccagacataggcccacaatgaactctgccattttggctgagttcttttcaaacaagatgtagataggttttaaatacactgtggtggatggcttatgtatatttttctaacatgaggcttatcaaagtaaaaaaaaatagtttccactgatatatgttgtatggctgaaacttaagattgtactgtcaccttaggaagcttctttgtgtatctcttttgttatttttaaggttaaggattcagccttcaagcccaccccccaaccaccccaacaaccatctcttcaggcagcccagtaatagtcctccccccatgagcagtgccatgatccagcctcacggtgagtggagaggttcagaccaaacagttcattttatgccacatgggaaaaaatgatggtctcagttttgagcaccataaaccatttgaaaggcagaataacatagtattcaggggtatggactctagagccaagctgctttggtttgcatcctggttccatcagtttcttagctgtaaacccttgggtaagttaacttgacttcttgaattagtccatttcacactgctctaaagaactgactgagactgggtaattgataaaggaaagaggtttaattgactcacagttccacatggctggggaggcctcagaaaacttacaaccatggcagaaggagaagcaaggctcatcttccatggtggcaggagagagattgcacaggggaaagcgccagaaacttatcagacaaccagatctcaagaattccctcattatcatgagaacagcatggaggaaactgccccgtgatccagtcgcctcccaccaggtccctcccttgacacatggggactacacttcaagatgtgggtacacacagagccaaaccatattacttctcaaatgtcaactgaggataattatggtacagtatgtagatatacgtaaaacacttggaacagtctctggcacaaaatagttctcaataaaggtttactattattaatatttttaacaaaacctccagccctaccaaataaaaagcagctaccagaaccttccttatagacatgcctccgtttggctgtctactatacacgtgggcccctctcttgtgggtgtacagatgggagtgaagataagtataatgtgactgtgagtcttcagaggtcagccgtcttaggatctcttgagtaacactccacgagctacgtccctagtcagtctccctaggatccttgagaagagtctgaattggcctctaggctcttcctacttaaagtggggtcccccagccaccaatattgggagaaaaagtaagatctcaggtcgtattccagacctgttagagtctgttttttttttttttgagatggagtctccccctgtcacccaggctggagtgcagtggtatgatctcggctcactgcaacctccacctccgggttcaaatgattctcctgcctcagcctcccaagtagctgggattacaggcgcccgccaccacacccagctaatttttgtatttttagtagagacagggtttcgccatggtggccaggctggtctcgaactcctgacctcatgatccgcccacctcggcctcccaagtgctgggattacaggtgtgagccaccacgcccggcctagagtctgcatttttaaccagatgccaggccatttgtgtgcatgtgaaagttcaagaagcactgcctagatccgagttaccccatgtaatccatggaccagcttttaagggaacttgttggaaacacaaattcttaggggcccatcctgacctactgaatcagagtttgaaacagaattatatagataggacccaggaatcttctgtttaacaagttctccagacttgtcctatgctcagtgcagtttgagaagcactgttctagctggtatgtcgtctgagtattctcattagctctcattacttctggctggctggtggcctgggcacttggtcactctgaggttcctttctctccaggggctgcatcttcttcccagtttcaaggcttaccttcccgcagtgcaatctttcagcagcaacctgagaactgttcctctcctcccaacgtggcactaacctgcttgggtatgcagcagcctgctcagtcacagcaggtcaccatccaagtccaagagcctgttgacatgctcagcaacatgccaggcacagctgcaggctccagtgggcgcggcatctccatcagccccagtgctggtcagatgcagatgcagcaccgtaccaacctgatggccaccctcagctatgggcaccgtcccttgtccaagcagctgagtgctgacagtgcagaggctcacaggtaagaccgcctaacgtcacccagccatctatgcatgggatccaggtgggaggaagccccttagcagagtgagagaaaaggagggaaggagaatgggtctgactaggctgtgctcttgtttcacgctttctaaaatcaggatgctgggtttggaatgaacttgtcagctttttattgacccagggttaaaattctaatgagactgaggtggaaaatgggaaagctaccttattatttgctaccttattatttgcttgcaaagaagaaaatggcctgttagaggaatgtataaaaattccagttccccttttcttgaagggagcatcttgaagttgcttccttcaaaatgagctagatctattacccacgcagtgccctcagtcccttggaggttactggacaagccagtaatggaataaatagggacaatgcatacatctgccacttctctgtcacaccacagttctctgtaccagtgggttctccctactgaggaggaggagctgttcccaggaagtctagtacttgttacatggatgtctggtactcccttttgtgtctgcagcttgaacgtgaatcggttctcccctgctaactacgaccaggcgcatttacacccccatctgttttcggaccagtcccggggttcccccagcagctacagcccttcaacaggagtggggttctctccaacccaagccctgaaagtccctccacttgaccaattccccaccttccctcccagtgcacatcagcagccgccacactataccacgtcggcactacagcaggccctgctgtctcccacgccgccagactatacaagacaccagcaggtaccccacatccttcaaggactgctttctccccggcattcgctcaccggccactcggacatccggctgcccccaacagagtttgcacagctcattaaaaggcagcagcaacaacggcagcagcagcagcaacagcagcaacagcaagaataccaggaactgttcaggcacatgaaccaaggggatgcggggagtctggctcccagccttgggggacagagcatgacagagcgccaggctttatcttatcaaaatgctgactcttatcaccatcacaccagcccccagcatctgctacaaatcagggcacaagaatgtgtctcacaggcttcctcacccaccccgccccacgggtatgctcaccagccggcactgatgcattcagagagcatggaggaggactgctcgtgtgagggggccaaggatggcttccaagacagtaagagttcaagtacattgaccaaaggttgccatgacagccctctgctcttgagtaccggtggacctggggaccctgaatctttgctaggaactgtgagtcatgcccaagaattggggatacatccctatggtcatcagccaactgctgcattcagtaaaaataaggtgcccagcagaggtaagtgtctcctcacagtggaagtcctgggccagtctgccctaatcaactgactcagtaatgttatcttttttcagctagtattctgtgttcctaagaaaaaaagaatttctgagcttcacgaccttcttggggagaagcatgtaggaagtgggtattggtgggcaaggggtccattttcaaaatcaaaggaccatgatacaaaattaacacttagtcaataagatagatgatccatttcccttattcataccacagtttcttggaatccagaaattcctgactgccatccaaacagctaactttaaacttgtgcaatagaaaaaaagtcagcccaacataatttagtgtaaatagtgtgggaacaagagtcagagcaccttaattctgctcttgcagctatcataaatacgataactttgtcatttaatccctctgattctgattttcctcatctgtgaagaaggtgttggaggaacaatggagtatcttacggtgtatctgtggagatgaaaacatgtatatatgtgtttgtttctacataatgtttgcatgagagagagaggcacattcagatcatctgaaatgtttgagttcagtgcataaatgtgaggtattattactctggtcgttttattagtgagctaaatgcagaatattacagcatcataagggcccccattatcatttcattttgtaccactttataattaatgagtatattcattatcattctgaaggagatcaggattgcaattagtaagttatacttagaaaatatagttccattagcatcacggcattcatcctagacaaaatcaggaatcttgcaatttaccactcctcaccattgccatccaagggaataaaaagcaatttatctgtaaactgtacaaccctgagactgagcagtttcttccatccttccctccccggaactacctgcatctcctgccctgtcatttaaagtcagtgctgaaaactcagccccagggggaattcggtcctgcagcacagagcagtagagaaggccttgctgtaaagcggtgtctgtgaaaacgccttggtggtgccaggttgtactcattatgcgctcttaggggggaattgttgcctgaaatgccaattcaatcctgaccttttgaacagatgggtgtcatccagctgagagattggctccagtgagatgtactgtgttcacctgtggctgctgtattcttagtagacataggagggtgggagctttcagaaccagatcataggtggaatggttaacagacctgagggtgtttaggattgggaggaaaaactaagagaaacatcacgcttgttagatggaagaagggattagatttttctgggttcatattatggggcagaaccaagatcaagatagaagttgcagcaaatttcaacaccctgtggaagacctttataagaactctccagaacaggctgccttagcagcctgggagctttctaacagaggtgggataatggtatggggatgttgtggaaaagattcccctgcaaatggaagcttccagcagattagcacactatagttggcatgaaaaggagatgagctcacgtttctttttttttttttttttgagacggagtcttgctctgtcacccaggctggagtgcagtggtgcgatctcagctcactgcaagctctgcctacaatgctcacgccattctcctgcctcagcctcccgagtagctgggactacatgtgcccgccaccacgcccggctaattttttgtatttttagtagagacagggtttcaccgtgttagccaggatggtctcgatctcctgacctcgtgatccgcacgccttggcctcccaaagtgctgggattacaggcatgagccaccgcgcccggctgagctcacatgtgccaggcaccaaatgctgttcacatacggattcatttaatccttacaacaaccctacaaccctagaataaccaactcttattcccatttaccagtgaaacagcggaggcacagagattaagtaacttgtccccaaagtcaagaggtagtcaggggcagctgaacataagagtactcacactagctgtcactgacacgagagatgctcaccgagcaagtcccgggtgtgcagggcactgaggaaggagcatagctgcagcaaacagtgctgctgccctccacccctgccccaggctgagttaccgtgtactttcaatacttcctgaaatgtttttcttcaaaaattattttctctagtttctctttaccttccttcctgtgtgacttgtgtgtgtagaaagtctggagagcataattccccattgtcccctgattgtcagaggaccccttcttcggcaggcacgctagtctgttgagtacccactgttggtgcaagtgctgtgggcgcaccagaggagggagagattacttcaatccaaggaacaacgtaggtttccagcaataagtagcctgtgggttgggtcctggtggatgaagaaggtttgccatttggatctagaggagaagcaagagaaaagaacaatgggtgagactgtctcaaggaattttccaaggacagcagcaggcttggctggtttgaagtacagtgtacatgaaggcattagtagaagctaaggacagaggttttctaaaatgcatcgtctagattcagctgtactgtgaaaaaaactcaagttttttttttttttttttttttttttggcagagtctcacactgtcacccatgctggagtgcagtggcacgatctcggctcactgcaacctacccctcctgggttcaagcgattctcctgcctcagcctcctaagtagctaggattacaggtgtgcactaccgcacccggctaatttttttttgtagagacggggtttcaccatgttggccaggctggtcttgaactcctgacttcaagtgatccaaccacctcggcctcacaaagtgctgggattacaggcatgagccaccatgcctggctttcaggtttcttttaaaaactccagagcttacatttttactttactgaaaaaatcatcagataatttgctgttcacttctgtcacgaaaggcttataatgctgtgcccccaccactctgcaggcaagtgggggagctcactcttctcaacctttttgccaggaaggaatgcctgctgtttcttttaatggtccctccatctcaactgtgttgcacaagactctactgtaggtgctgtgagaatgcagagatgaaaggataacctgtcctcagggagcttctactctactaggggatgtaaaacaagctcataaacagctttgctatgaagtgctaggtactgagtgctgcaagaagtatcactgagaagagcagagctagtgtgatcttcttagcatttcttaagggtagatgaacagggattgttggtgttatttagttactttttgagtcagggtcttgctctgtcacctaggctagagtgcagtggtgcaaccacggttcactgcagcctcgacctcctgggctcaagcagtcctcccacctcaacctcctgagcagctgggactacaggcgcgtgccactacacccagctaattttttttttcctttggtatagatggggtcttgctatgtcgccggggctgatcttgaactcctgggctcaaacaatcctcccttcttggcctcccaaaatgctggtattacaggcatgagccaccacacccagccatattggtattagtaaaggaaaattagatgccatcatatcagtgtccatggttacctatttccttgatggcgatttgccaccagccagtatgaggccaggcactgtgagagcactaagcaggcagcatgccaaaggtttcttcccaatttgtagaagtgtcaggatttcacatgccccatgctgtccgtaatctccctgcctgccaccctagaaggaaaaacaaggtttgtctttcttctatagtggtacacacacttgatctttttgactttgcaaataaacacagcagcataaccaatctacaccatgagattaccaactggaactcacaaagaaaaccacatcctcttctctgagctcagtcagcctcagctttattactcaggcctcatagagcagtaaaatgctgacagagtgggaggggttaccccagaacctttaaggggagtatgcagtcacgttattgctcccattttctctcaaaacccagtaagtgagtcaggacgagtcaacattgacagattcaatagagaattgtgcaggttgccccaaagttccccgggaaggtgggtggcgtgcattgtgtccatttgtgcacttttccccttgtgtgatcggacgatcatcccacctctgcactctcttagctttagtttgataaatattcgagcatgtagctcttgggaaccatctttcctccatgactttggtagctgctgaattggcataaagggttgccaaagatttgatcctgaatgtcatgttccttgggcagtgggttagtctgtttgtaccccccaaaatggtcgatagggtcttatttatagagtgtcacaaaggacttctagactcagggtcagcattcttaccaaaaatcagacttgacttatttggtcttttacagttgattaaagactctttcacatgtgttgtcttttcgagcccccaaacaaccgtcatttttcagatcaggaaccttgaggagaagctgaaagatttgccaacactttgctggtgagggagctgggtcctgacttcaagttttctgatcccctggtcatgtattttttcctttacgcctccttgcccactctgcaccctccaagcacagctgccaagtgaaagatgctagcccttccaggtctttgacctactgatgatactgaaacttgagcagacagagccctggggtatcccctgactcctattaatactctttttcatctggcttttaactgacatttgtctgtcctgaatcagaggcttctcctggaaattaaagtttccctgagtcatttgttcatttacatatgggtatattgtccctcataattctgcaagcagggttctgtgattaaatcaatttccttgtttgtttttgtcagctgactcagcacgtccttatgcactcagaaataacatctctaaactgaatataaatcatgctagactttattgagcctttacagtgtagtaacctctatgaagcactccacacccatggagtcagtccagttgtacagataactaagacccagcaaagcaagataacttgcccgagctcctgctcctcaggaagcagctaagccaggattcacggccaactcttcctgaccccagaacttgtgctcatgacccttgtgctcaactccagcttggctgagggatgagctctgggctgggagtcaggaaggccccctacatgatttgtcaggtggttgcttgctctgtcttggtgcctacaggcatcagacctgaaggcggggaagacagcagacaaggcagagcccaaaggagggtgggtgttttggtttgcagaggccccattctcagggataaaaacaagtctgagagagggaaggaaaagagccttaaaagacacagcaaacaaaccaaaacactgaggcctccagaagaggcaggaaggctccaaccaggactatatacattttgttagctttgctgtttcctcatggttagtaatgatgttttaaaaatctttaaacaggagagcgctcatgtttgtccttgcggagagcaaagagatgcaactgatgagatttgcatccaactatataatcaggcttaaaggaaaaaagcaccccgaggaattgagtggatgatgttagttatcaaagaagacaatataggtttttgaaaaagtaagaagcggctgctcgcattgcttcttggcaaagcagacagaatcaccatttcctcactcccacacaaccatgttgccccacttcctgccagtggtttttggttggccctggcgccaacatgcgagcagtgcccactgagaggaattgggcagagtgggtaggacgggcgggctaatcccacagagcaagtcctggtgtaggttttcttttatcttctctctgctggcttttagctttctgtagcaaaatagttggcttctggctgttccttttacctctttgctcagagaactttcaaaagatttctcacttgccatcatctttggtagctgggaagctccctcctctaatttttctccagaatgtcttgcattactagcaatgggcatgtcagttagctcccctccctttccatcctgcctctgcccctaagtcccagcctaaccttaatcattatagaaaaccattgaaatacagagacctgaaatcctttacccaacattcaagaagtatgctttactttcattatttaaatagatcattggaatggcacagttagcattacagctgtgtttgctattaagagcttttgttttaaacttagtcccaccaagagtcagttcatccaagataagctcagtagtttccaagaagctttaactcagaaaaccaaccaagcaaacacaacttattttcaagtcccaggcttttaaagactgaagtcaaaagtgctaccaggaggatcctgtcaacataggtgtggctttgatagtcttcttgactatccttgatcaagaagaagtactcattcctttttctctccaattctagtccatagaatggtatgctctgacaggatagtaacccatattaagagagtatttatttttattattcttttttgagatagagtctcactctgttgcccaggctggagtgcagtggcatggtcttggctcactgcaatctctgccttctgagttcaagcaattcccctgcctcagcctcctgagtagctgggactacaggtgcacaccaccacacccagctaatttttgtaattttagtagaggtggggtttcaccatgttggccaggctggtctcaaactcctgacctcaggtgatccacccgccccggcctcccaaaatgctgggattacacgcacccggcctaaagagcatttactgacatcagtgaaagagatcataatactgggtataggacaatgttctagaacactgaagattcacagacatacatgagatatagttcttgcctgcaaagaatttatagtctaatgtgaatgattaagtacataattgaacatggtaccaaggataatgttagagcaatcagagacaaagtcttttgaagtttaaaggaagagatgatctatttctgtttgaaaggaaaagtttaataaaaacaatagcatatgataatggatgtagaatgatgagttgctttggattggcaggagtgaaggcagaagaatcagttatttgcagatagaaggaacagtgagggcaaatgcatagaattgtgcatagatggggaacagttaagtggtcccatttgactagagcttagaatgtatggagaggggaatatgagacactgattggaagatagcccagggcagtgttgtaaaatgaaagtgaatggactacagaacggttggtctttgtagggtagtagtaggggattggttatgaggctagcataataatccaggcaagaggtaatcaggtttccatgagattggcaacaaagggactgaagtgaccagcattgcagagttagattcagcaccaggagtaaggaatcaatagtggccccaagagcttatgcctggaagatttggaaaatgaggcatcaaaacgacaatgtctgaaggagtagcaggttatgggggaagtggatgggtttggaattggacatggtaagtgttacatgctggttagatatccagggaaagatacctagtaagtagctggaagtatggatctggggcttaaaggagcacttcagtaattctttacataaaggcagtacagccatgaaaatagatgatgttgccagagtaagtgtggggagagagaaggtcaaggacaaaaatgtggagagtacttgcttagaaagggtggaggggccatcaaaggagtcagaagcagcagttagagaagtagaaagaggagagtagcagcgtggtacactgaggtcaccgggggaggagagaggacgcagccagccacagaacagatgcatcctctagggctagagggtcctgaaagctccgagagtaattctcatgtgcatttaggtttgggaatagatcactgttaattcaacagagaaatgaaagaagagaaggttcggtggggtccagccatgccctgttacgtggaattttttccctaagggtgtggtcccctcccctacagctcgtcttttggagggctggtccaggctcctctaagccatgacgccggctgaggatcagcggttggtgtacatgatctcctcagccttgcccattgtcccttgcaagacatttcttggatgggagtttccagtgctgggagaagttccgccccactgactctattctgctgtgtctcctcagagcctgtcatagggaactgcatggatagaagttctccaggacaagcagtggagctgccggatcacaatgggctcgggtacccagcacgcccctccgtccatgagcaccacaggccccgggccctccagagacaccacacgatccagaacagcgacgatgcttatgtatgttggtcccacctgctgcacagaggtggatcctcccagtcccagccttgaaacagagtatagtgatgtggggtagcctctcttggccgctctcctcagtcagcattcagcctttctggaaacggtggggagcatttctttttttttcttttttgagatggagtctcactctgtcgcccaggcgggaggacagtggcgcgatatcagctcactgcaacttctacctccccagttcaagtgacttttgtgcctcagcttcctgagtagctgggactacaggtgcctgccaccacacctggctaatttttgtatttttagtaggcatggggttttaccatgttggctaggctggtctcgaattcctgagctcaggcaattcgcctaccttaagagcattttctttgagtcaccctaacagaccaaaccttaattcaagtagaatctatgctccaaattttagaccaaagaatcagaaatagttgccatctgttccctgtagttttggttattaaacctcttctcagtctaaactcaggccccagcaaatgagcccataggcttctggttatttttcagcagctacattgagcttactcagatcaggggagctggtgggcctcagcaaagttttgttttcctagggtggtgctagtctagtagctagccacatgtggctattcaaatctaaaccaattaaaattaaaaacaatttaaaattcagttcctcagtcacaccagttacactttattttttattattattattttttgagacagagtcttgctctgtcacccaggttggagtgcagtggcgcaatctcggctcactgcaagctccgcctcccgggttcacgccattctcctgcctcaacctcccgagtagctgggactacaggcgcccgccacccttttttgtatttttagtagagctaaatttttttagcccagctaatttttcgtatttttagtagagacggggtttcaccgtgttagccaggatggtctcgatctcctgacctcatgatccaccagcctcagcctcccaaagtgctgggattacaggcatgagccaccgtgcccagcccagtcacactttaagtgctcagtagccacttgtggctactggttaccatattggacaggacagagaacatttccatcactgcagagtgtgactggacggtgctgtcctaagacaaagtcccagtggagatggggataggtcagaaacctggttttagaaggccatgtaggtatcaagatgtcaccaccagctgagatttgccacatccgccccaccctcagcccccccactgggcagagccaagcagcttcccacactgtcgctgtggagcaccccctttgggtggtgctttagaggaaggagtctggagtggggccccgggctgtcttttgcctgggctccttcagaaggaccagctgtctctaggggttgcctgagagtggtgtcttgtgtgcttatttcttctcttaactgttttctgcaggtacagctggataacttgccaggaatgagtctcgtggctgggaaagcacttagctctgcccggatgtcggatgcagttctcagtcagtcttcgctcatgggcagccagcagtttcaggatggggaaaatgagggtgaggagccttatgcatggggcactccagagaagttcctggaggggcctccctccatcttccgtaactgctcctctcttcgtaggaagagctcatggggaggtagagccacagcatcccacaggttctggacacagcccctttccccactggtcttccctgagtgtgggtgtgtaaaggaggtgtggcttctggccagatggcacagggctctcccattcctgtctctcatctctgtgatgatatgccttcaatcactttttccagttctgcttagagggcatcaggtcctaatggcacatttctacctcttcttggagccagtcaagggagggtgtcataacaaataataggcgtaggccttgggcggggcaggtctgccaccagtcccaaggctgtccttttcaggctctgcaggtgaggcacttggctttctggaccccgagatcctcatctgtaaagtggcaaaaacgatagagcctttatcctacattgtgccctgagggctggctggcttagtgagtatcaagtgcttagcacagtgtctggaagacagacagtgcccaggaatgggtgcctgcaggcagtaaaattattctccctttcactctttaagaggtgatcctttctgaaggagtcctctatcttctctcacactacagtagttgatcttacctaaggatgggaaagggtaaaggaaaagggaaaaaagcagaacaggtagaggagaatataggaagaatcttggcccccgcccatcgtcactcaacaccttgagggcctgctgtgagctagaattcagggctgggagtcaggctgtgggatgctcgacaggttgccttcaattcctcctctctctcccccttgctctcctagtcccccagttccctgccaacctcatacgttctttttggtcttgcagaatgtggggcaagcctgggaggtcatgagcacccagacctgagtgatggcagccagcatttaaactcctcttgctatccatctacgtgtattacagacattctgctcagctacaagcaccccgaagtctccttcagcatggagcaggcaggcgtgtaacaagaaacagagagtgagtgtcaccctggccagagccaaaccagccctgtggcccagtgcctgctcccaatcccatcaggagcttcagcccatgtgttgtggtggccagtgcagtcgacagtaccacgcctcccctcgtggccttcacagtttcttgcttttcattaacgacgctgctagttttagggcgcgaggtaggggtgggggtgtgcagaagaaatgctaaacacagtctcttggttcggttatgggaataagacacaagactcgccgtgtgttacaggtgctctagccttcatagcgacagaagtgagctacggctccagaggatgcaggtgacctccggtcagcataatgaggaaaggaggaagtccttaaactcagtcctaaaagacaaaacctggcaggaaaatatgtccagccatattttttaaggccatacagaagcaagtggcaggatattccagattagggaaatgtgtgatgagaggcccatggtagaaagaatggggaaattggcttgtttggctggagtaatgcaaagagtacacagcaggcaccattggttgtatctggaaaatccttgacagaagaggcctgatgaaagggaagccacttggcaaatccacatcagagcctcagtatggcaagctacctgaacacctgagggaaagtaaacccgttgcattttttaaaaggttttaaatggaatatttgagcctttctcttttcaaactaattctcctctgtgtctgctttattccaggttttgtgtacagcttgggaatgaaaaggttgattgtaaacccacagtatctagcagcgttgtgccaaattgcccttgtgtttctctccacccaaaatatcacagctgctttcctcacatttggttcatccgtgtgctgttcttttgggttctgagagggttttgccatgtttgcttgtatgaccaagtcaccaaggaaataaacaggaaggaaatccatgttctccatcttttgtgaaagtatatttgagttggtggttttttgttttgtttgggggtttgtgttttgttttgtttttggtatgttttcttccagaggtgatatactttcttttttttcttcctttcttttttttctttcgttccttttttgaaacaggagagcaaagcagttagagttcagaggccagcggcctcagggccactccctccctagccttcatcagcagagcaccctccatccccctgcattgctcttctgtgaaagcaaatactaaaggatgccatcctctggaatcctaatggcaggcaaagggagagaggaagggtgacggcttctggcacttagaaaacaaaaagaacaaaaaaagagaaacccccaagcctggaacgcagagaggtctttactgctgggatccacggaaaacatgtctgtcctagccaagatcatatgaagagtttggcacggaggctgagaatgacctggcatagatggtttgccagttaggatgtctcaatttgagcctttgcttttggtggataactcagctcccctcttgtaacctggaaagttggttgcctttatcatcctgctggttttatccatggactgaacacccaacagcagtgcactatgctttctatggcatctttcattctcattttatattgtgctataaaaaggattgtttctccatatatatattatatatgtgtgtatatatataatataatatatgtgtatatatatattatatatataatatataatataatatattatatatatattatatatataatatatatataaaatatatatatatatgctctcctctttcagcctctttgtcacagggaagaagtgtaggaggttgccttgggccctgcctctctcctaacctcctcttccccactgggtaccctcagcccctatattttaattcttgatcatgtagaaattgtttttggtaaatgttgatattattgttattatcattattaataaataaagagaaaaggaatttttgtttaaatgagaaatgtttaaccagattctgttctatttgaattgtgacttgcaccttttgttcaaagtatttcctttaggcattgtaattgtgaacagctcttacttgtgccagtgacagatgcagtggtctcctttccccagttgaagcagtgcatacgcagtagctattatttgtgttatctttatttctcttcattgttagaaaccaaagtcttctctgctggctggggctgagagagggtctgggttatctccttctgatcttcaaaacaagagagagaccttgaatacactgactcttccaccctttttttttctgggaaaggagagcaagaggtcccgagtcccctcctagtctttcatcctgaatttgcacagaggaaagcgggtgcccggcatggccatcctgatgttgctggcgggatccccatgcaccttgtccttctccactgatactggcagctcggctcctggacccaagatcccttgagtggaattctgcagtgcaagagcccttcgtgggagctgtcccatgtttccatggtccccagtctcccctccacttggtggggtcaccaactactcaccagaagggggcttaccaagaaagccctaaaaagctgttgacttatctgcgcttgttccaactcttatgcccccaacctgccctaccaccaccacgcgctcagcctgatgtgtttacatggtactgtatgtatgggagagcagactgcaccctccagcaacaacagatgaaagccagtgagcctactaaccgtgccatcttgcaaactacactttaaaaaaaactcattgctttgtattgtagtaaccaatatgtgcagtatacgttgaatgtatatgaacatactttcctatttctgttctttgaaaatgtcagaaatatttttttctttctcattttatgttgaactaaaaaggattaaaaaaaaaatctccagactcaagttgctaa

SEQ ID NO: 1257 - DNA, 21902 bp, Homo sapiens
gtagcaggccgggggcgggccccgctggttgctcggttacagcgcgtctctgcgctccggacaaaactctccggcgtttgcagcccacttcccgcgcacttggctgtgccattgaggcgtcaaagagtgtgggcgcctgtggtcgaacccgctacggactagctttgtggtgtcagcctttgtgacccggaattgctcctgtcaaatgaggatcttcccagtagtgttttgcgaggattaggtgtaaatataatgcctgaccatagtaaaagcgctcagaaagtattaactatcaccgccatccgggttgaaaaaggtgtgagcgcagggtacagaaatgctggctccaggtttgacctccggggcgagagatgagacaccagactagggaacttcctctactcgcctctacgtctacctgggcgcgccggaggcgtcggcaaggaggcgggggcggggcgcggaggcgggaccggggcgccgggggcgggggcggtaggcggaggcggggctggggcgccgggggcgggggtgggaggcggaggcggggccggggcgccgggggcggggcgagtccggaggactccttggactgcgcggaacatggcgttctggggttggcgcgccgcggcagccctccggctgtggggccgggtagttgaacgggtcgaggccgggggaggcgtggggccgtttcaggcctgcggctgtcggctggtgcttggcggcagggacgatgtgagtgcggggctgagaggcagccatggggcccgcggtgagcccttggacccggcgcgccccttgcagaggcctcccagacccgaggtgcccagggcattccggaggcagccgagggcagcagctcccagtttcttcttttcgaggtattttgggcaaggacaagcacttcttgcgtgttcgttgtcgacacctcgcccactctttctcaccttgccgtgtttcctttgcggcatgtctgggagtttacgtgcgttccaacaccggggcctccgtctttatgctgatctgtggacgtcacttatgggggttttgtcgtttatttcaccattccctcattgaaatacgttctaacctttagttattgtgcatcatgctgtggtgaataaccttgttggcacctcactgtttgcataaattcctagtactgggattgctaggtccaaaagtatatgcatttaacgctttaatgatccctcataaatgttgtgcggttaatactcccactggcatgtgatcgtacccgtctccatagtaattgcatctaagaactgaggctacataggaaaaaatcttaaggtccatggttgttaggtatcagatgccctataatggatgaatatttaagtaaataatggcacattgacttgctgtctgacacaactgctgaaaatgttggtgaaaagtgagtctcgaagtggtagctcacacttgtaataccagcactttcggaggctgagacggggatcgctcgaggccaggagttcaagagcagcctgggcaacataacgagacccccatctctaccaaaaatttaaaaattagccgggcatggtggcgcaagcctgttgtcccagttactcctgagactaaggcaagaggatcccttgagtccaggagttcaaggctgcagtgagctatgattgagccactgcactccagcctgggtgacagagcaagactcttatctacctgtgggaaaaaaaaaagaaaaaagtttaatagatcctgaagagttggccgggcgcggtagctcacgcctgtaatcccagcactttgggaggatgagacgggtggataacgaggtcaggagttcgagaccagctgggccaacatggtgaaaccccatttctactgaaattacaaaaattagccgggcgtggtggcgggcgcctgtaatcctagctactcaggaggcggaggcaggagaatcacttgaacccggaaggcagaggttgcagtgagccgagatggcaccattgcactccagcccgggcgaaagagcaaaaactccgtctcaaaaaaaaacaaagatcccgaagagtcagtcgttcatccaagaagccctgactgagctcttattctgtgccagactctgttctaggtgctatggatggagcagggaccaggacctacaaacacgtggagcgcattctaatatctgtgatactctgcaaaactgttaaaacaaatccttgcggccgggcgcggtggctcacgcctgtaattccagcactttggaaggccgagacgggcggatcacgaggtcaggagatcgagaccatcctggctaacacagtgaaaccccgtctttactaaaaatacaaggaaattagccaggcgtggtggcgggtgcctgtagtcccagctactcgggaggctgaggcaggagaatggcgtgaacctgggaggcggagcttgcagtgagccgagatcgcgacactgcactccagcctgggcaacagagcgagactccgtctcaaaacaaaacaaaacaaaacaaaacaaaaatccttgctaccactggccctaaagcaggaggcatagggctgcgtgtgaggagtagtccattgcatgggcttcctccagtttggctttggatttttgagctctctgaatttgttgtttgtgtcctttgcacagtgtccctcccaggttgcacccatgcctgcccctcagggtcccccactcccagtgaatttcacaccatgcagcatgtactttaagccatacatcttacgtatgttccagacatttggtaaaacgccgtttatgtgtttttcagtgactcacaaacattttatttacgtaaatgaggaatgtactcaggcacccttcgtgataccttgccctcagcaggcactcaacagcaataataactttcattccttttgtgcttctcttaacagttcgtgtttagtaggagcacagtagctgtttggggaacgaccttaagtgaatagatgtctgaaatgctgtgtgaagtggggcgcttaataggtggtgagatggttttagaaccagggttttccctctttgcttcttgactccttaaccagttttcattaggagacccctttggaggtttgcagtcagtcagagttgagtgcctactgagtgtactgaattatgaaatgagcacagttcccattaacctgaattttttgctcccaagtaagtcttgatttctgatttatgactgctttttgttgtaccccaatagtcgtctaagaaaggtgattattttgagaggcctggggagacacacatgctcattctcgagggtggcggtggtgcagagggcagagccatgctcgttcttgctatcctgagattggttgctatctgtttcctttgctgctgtgtttttttctgtcagtattaaaggtggaagaaggtccatatctttttctgtgggtgcttcaagtgttgttggaagtggaggcagcagtgacaaggggaagctttccctgcaggatgtagctgagctgattcgggccagagcctgccagagggtggtggtcatggtgggggccggcatcagcacacccagtggcattccagacttcaggtactgcccacagtcccacctgccttctgcgctcccctcccctgactcctgccctccccactgcccagtttattccacttccctgtcctcttccaaaggcctcagagcctttcttctctccctgcagatcgccggggagtggcctgtacagcaacctccagcagtacgatctcccgtaccccgaggccatttttgaactcccattcttctttcacaaccccaagccctttttcactttggccaaggagctgtaccctggaaactacaagcccaacgtcactcactactttctccggctgcttcatgacaaggggctgcttctgcggctctacacgcagaacatcgatgggcttgagagaggtgagccctctgtgagtcgcacacattctttttctcccacggaggctcgggtgcctgtttctcccagggaggctcgggtgcctgtttctcacaggggatgctcgggtgcctgtttctggggacggccaaaacctatcgcttatgcttcttccttgggactttttttgagccaactagttagggctttgttcccaaggaaaatgtcctctgggtgtttaaaggccactgcttgttctcctgcatacctgcagagctgtgtattttgggcagaagttgacattgttttgccaatctggtgtgatgatctctttttttcttctctcttttaagaagtgtattatggaatttttttgagcacacacaaagagagcaatgtaacgaaccgtcctgtcctcatcaccagcacacagccagttcttcctgcgtcctcaccaccttcttccaaatccccagattattttgaagcaaatctctcacatcatgaatttaatctagaaataatctataaacacatgaatggatagctctagagaatactttaaaaacaactccggccgggtgccggattacaggtgtgggatcacacctgtaatcccagcattttgggaggccgaggcaggtagatcacctgaggtcgggagttcgagaccagcctggccaacgtggcaaaaccccgtctctactaaaaatacaaaaaattagccaggcgtggtggtgtgtgcctgtaatcccaggtactcgggaggctgagacaggagaatctcttgaacccagcaggcggaggttgcagtgagccgagatcgtgccacttcactccagcctgggcgacagagggagattctgtctcaaaaaaataaataaaaataaaaataattaaaaaataaaaacaactctgatagtgattcacactgaagaatcactagtaattccttaatatggtcacacttagtctgtggtgatttcttgaccgtatccatatggtgcccaaaccagcgattcacaggttgtgccaacttctggccgtgcacctaacggaagcacttggtggggccttttccttacgtgcagtgatgcagacaggtgctgggacagtcagctctccgggagccaggctcccggagagactgctgatgtgttgtcagttaaaaagaggtggcaccttggctccaggaatgtgtttccttgccagaaggatcccctgacttggaaccacagaggcagcagcggatgccccatgttggtgggctcttctcccagaggtgcagcagggcaggccttgtgggaaggtgggagctcctggctgtgagattcagcactgctgagttagggcagcgacagggacttgggaagcctcctgcagctgggaccctggctgtgccaccgcagcctttcagaaccagttaatactaacacaactttcataagaagtcactttttgtctgtttctaccaagcaattcttttggaatttatgatatttatatcctcattttaacttggtatctgtagaatagaagatatgttcctggatattagatataaatttttgagacagggtcttggctctgttgcccaggctagagtgcagtggcatgatcatagctcactatagcctgaactcttgggccgaagtgatccttttgcctcagcctctggaatagctgggactacgggcatgcactaccatgcctggctaattaaaaaaattttttaagacaagtctcactatgttgctgaggctggtctcaaactcctggcctcaagtgatcctcctgccttggccttccaaagcactgggattacaggcatgagccactgcacccagcctggtattaggtgtaatttttttttttttttttgagacagaatctcgctctcttacccaaactggagtgcggtggcacgacctcagctcactgcaacttccacctcccgggttcaagcgattctcctgtctcagcctccccgagtagctggcactacaggtgcctgccaccacatctggctaatttttgtatttttagtagaggtacggtttcaccatgatggccaggccggtcttgaactcctagcctcaaatgatctgcccacctcggcctcccaaagtgctgggattacaggtgtgggccactgtgcccggctggatataattttatttgagcttttatcaaatggtttttcgtactgagttttgacaggctttgttttaaccgtgatttggctccagctaggtgcccctttgctcccctgccttattctggttgatggcgcatgtaggtgatacgggcatgaaaaccaggcttgaggacatcacaaccccaaggggctgtgcctccttccaggagtcctgccaagcccagaagttgtgctcttggccttgcgtgctcatctcggaggcggcagcaacacttcgctttggcttgaatttcagtgtcgggcatccctgcctcaaagctggttgaagctcatggaacctttgcctctgccacctgcacagtctgccaaagacccttcccaggggaggacattcgggtgagttatcctgctgttggttgtccttctgcagtttgctgttggggtgatctggaaaagtggtattttataagcattgtctcgaaaggacagttgaacaataatagtgtgaaacattttatttgtaaattagaaaatcaatacatgcttgtaaaaaaatttaagacaatatagaaatatgtagggaaaatgaatctcccttcagccaattccagctgcccactttttttttttttttttgagattgagtctcactctgtcgcccaggctggagtgcagtgggcgatctcggctcactgcaacctccgtctcccggattcaaggaattcttctgcctcagcctcctaagtagctgggattacaggcgtgagccaccacgcccggcaatcagatggccttttgtgccgagcttatttcctgaaaatgtttctcgctccttcgccttgtagcttgtgttagtatttcatcctgtttcatggctaaatgttccactgatgtatgcaccacagttggtttgtttgtacatggatgggtgtttgggttgtcccacctttctgctcttgtgtatagttctgctgtggagcatatgcaagtattcgtttgagagtccttgttttttattcttttgagtatgatacctacaagtattgctgggtaactccacgtttagctatatttatttatttattttttgagacacagtcttacactgtcacccaggctggagtgcaatggcgcgatttcggctcaatacaacctctgcctcccgggttcaagcgattctcctgcctcagcctcctgagaagctgggattacaggtgcctgccaccatgcccagctaatgttttttgtatttctagtagagatggggtttcaccatgttggccaggctgctcttgcattcctgacctcaggtggttcacccgcctcggcctcccaaagtgctaagattacaggcgtgagccaccatgccctgcccatgtttaacttttttgtttgtttgttttgagacggagtctagctcttatcaccaggctggagtgcagtggcgcaatctcggctcactgtaccatccgcctcctgggttcaagcgattctcctgcctcagcttcctgagtagctgggactacaggcacacaccaccacgcccggctaatttttgtatttagtagagtagtttcaccatgttggccaggatgtctcgatctcttgacctcgtgatccgcctgcctctttctcccaaagtgtgggattacaggcgagagccactgcgcccggcccgttttaactttttgaggaacgaatatactgttatctgcagaagctggaccattttacattccaccaacagtgggcaagggtttcatcttttccacatcccaacacttactttccattttttaattacagctatcccagtgggtgggaggtggtaacccactgtagcactgattggcattttcctaatgattcatgatatcaaacatctttccatgtgctttttggccatttgtatatctttggagattgaagtcctttgcgcattgtttaattgtgttgtcttttttattgttaagagagtcctttatatattctggaagctagatccttatcagagacatgatttgcaaatattttctgtcattctgtaggttgtcttttttactttgttgatgtcttttgatgcatagaagttttgattttgatgaaatctagtttgtctatttattttctcactcttttggaatcatatctgagaaatggtattgttttactcctgttttcttataagagttttatagtttaaagcttttacatttagttctttgatccattttgagttaatttttgtgtgcgctgtaaggtagggatccagcttcattttcttttatgtggatatgtaattgttccagcaccatttgtttaaaaaaactgtggtcttggcattgttgttgaaaatcagttggccataggtgtatgggttatttctagagtctcaattctattccattgttatctgtatatccttgtgcctgcactataatgttttggttactgtagctttgtagtaagttttgaaattaggaagtgtgagtccagcacatagtagaaacttgatatatacgtattattgttttggtcaactcattcattgaatgaccaatttattcaacaaatagtttagtctcctcagtgccaggccctttgctgggttctgtggatgtgaatagaaattaaaataaggtggagtcatccaacagttacaactgggtgccatacgaattttactataaatatgtactggacactacactgactcagctgtaggaacagagtaggctgggaagcacctttgagatgaggccgtctggatgtaagagtctgtttctggcagcagagacctggagtgtgggaggcctgcttgctctgttagggtttgaactgtatcctgacgatcatgggaggcattggaggatttttaggcaggaaaatgatgtgaagggatttgcatttaaaagagattatttgggactgggcacagtggctcacgcctgtaattccagcactttgggaggcctagacaggcgggtcacctgaggtgggaagcttgagagcagcctgccaaaatggtgaaatcccatctctactaaaaatacaaaaattagccaggtgtggtggtgcacctgtaatcccagctactcaggaggctgaggcagaagaattgcttgaacctgggaggggaggttgctgtgagctgagatcgcaccactgcactccagcctgggtgacagagtgagactccatctcaaaacaaaataaataaataaataagagaataaaatagataatttgggcaacaggttgatgttaattccccacctttgttcttctccttcagtactgtgttggctggtctgaatcttttggcttttcatataaatttctgaaactgttgctatctgttctctgcctgttttatttttgttgttgttgtttggattttttgtttttttgagatagagtcttgctctgttgcccaggctggagtgcagtggtatgatctcagctcattgcaacctccccctctcaggttcaagcgattctcttgcctcatcctcctgagtagctgggattgcaggcatgcgccaccatgcccagctaatttttgtatttttagtagagatggggtttcactatgttggtgaggctggtgtcgaactcctgacctcatgatccacccgcctcggcctcccaaagtgctgggatgacaggcatgagccaccgtgtctggcctctctgcctgttttttaagacttttgtctttggagttttgcggtttctccactgtggttttccatatgaattttcttttatttcttctgcttaaaatttgtaggccagttggtcatggtggctcacgcccgtaatcccagtactttgggaggccgggtgggtggatcgcctgaggtcaggagtttgagaccagcctgaccaacatggagaaaccccatatctactaaaaatacaaaattagccgggcgtgatggtgcatgcctataatctcagatactcgggaggctgaggcaggcgaattgcttgaaccagggaggcggaggttgcggtgagctgagattaggccattgcactccagcctgggaaacaagagcgaaactccatctcaaaaaaaaaaaaataataataataattgtaggccttccttaagaaaaataaaataaaattctaggctgggcgcggtggctcctgcctgtaatcccagtactttgggaagctgaggcgggtggatcacctgagttaggagtttgagaccagcctggccaacatggtgaaaccccgtctctactaaaaatacaaagatgagccatttgtggtggcacccatctgtaatcccagctactcgggaggctgaggcaggagaattgctggaacccaggaggcagaagttgtagtgaaccgagatcatgccactgcactccagcctgggtgacagagcgagatgccatctcaaaaaaataaaatataaaataaaattctaagccctgcaaccaactgaatggagccctccccttggtcaagggaaccccagagaaaccttggaagcttgagttcctggccgtagcaggagaggaggtcagacgcgcctcactgtacccctccctccccagccaccattaggcttcttcactaagggctaaacagaaaccagcccttttcaaagactctacactgctaatgtggattactggtttatcttcccagatacagattaaagacaagatgagattaatggttccttcacccttccctgagaggtctgcttagttctcttcctctgtttccttctatcttaggtaaaatgtacatttactgggcacttactgaagtctcacaagtacgtaaccactcacctcacagccaccctccctctttgaaggaccacatgtaattactaaacctcctgagaacctcttgggacagaaacaagcacagatgtgccgtgactcatgtttttcctgtgggcaccctcaggctggctcagtagccctcacttgcttgagatcctgaatctgcgggttggcgtctttcatggttgctggatcatactctgccgttatctcttcggatatgagttgcccctagcccactatctggcccctctctttagggacctctgattgaacatacattagaccttctctctcctgctgttcctgatcactcttctgtcctgtaattgctgcttcttgtgctgcattctgggtaatttcttctggtcttttttccagtttactaatattgtattctgttataaggtccttccattgagtgtttctttctttcttttttcccaaacagcaactcaaaacagacattgagttttaattttggttcctgtactttttatttctagaagttctatttggttatttttcaagtctgctacattattacataattttttaataattttatatctttaatagatagttttttgttttgttttgttttgttttgttttttgagacagagtctcgctttgttgcccaggctggagtgcagtggtgcaatctcagctcacagcaacctccgcctcccaggttcaagtgattcccctgcctcagcctcccaagtagctgggattacaggcacgcatcaccacgcctggctaattttttgtgttttagtagagacagggtttcaccatgttggccaagacagtctcgatctcctgacctcgtgatctgcccacctcggcctcccgaagtcctgggattacagagctgagccactgcgcctggcctttgatagatatttcaagttcatcttttttttttgcttccttaatttttttttttgctataccccatgcctccaagataacagttttttctttttaatttaaatataatacagttttactgtgtatccaagaatatctgaaatctttcgtgggtctctttcttttgtcttttgtatctgttgctttttgctgggctgagcctgcttaaaacaagccccgttagctgtaaaggtttaccttagaaagtcaggtgtcttcctctgtaactctctcccttttccatctgctccaaggcatttatttatattaatcttgacgcaaagggaagttgtgtccacttcaccttggccagtaaggaagcagtgtttggcagatgttgttactcctaataatgccagccagtgagtgaagctgacctgaatgcctcccagggctgaggcaatggcatgatcaccgaagctcaaaccagagacagtttcacctttctgactgaatagtgttcggtgtaggccaaatgcctgcagactactgtttgaggactggtgtggtctaccaggtgtttccttagcgcctggatgtctctggctgccatcccagggatagagcatggtgttagatacgctagatgcctgccgaagtaattatgggtgaaacatatgatgtccaagatttgcttttaaaggctccaatacctcctcccagattccggagggctgtgaaacaattagctatgaaaactggtaattcctgaagctgggtacatgggggttcatgatccctctctcaccttttttgggggagaatgtttgagactttaataagaacttgttgccttttccttttacagggtgttgcaggcatcttcctcaggcctgttttctctgttttccaggctgacgtgatggcagacagggttccccgctgcccggtctgcaccggcgttgtgaagcccgacattgtgttctttggggagccgctgccccagaggttcttgctgcatgtggttgatttccccatggcagatctgctgctcatccttgggacctccctggaggtttgtcagcaggcctgtgcagggaggaggctggagggcaggggaagggaggggtacaggagtcatctcatgggctgtcggcaggcctgtgcagggaggagtctggagggcaggggaagggaggggtacaggagtcacctcatgggctgtcggcaggcctgtgcagggaggaggctggagggcaggggaagggaggggtacaggagtcatctcatgggctgtcggcaggcctgtgcagggaggaggctggagggcaggggaagggaggggtacaggagtcatctcatgggcccttccagggctggtgccactttgggaaggtgaatggattcagctggggttccaggctgagggagcagcagcctgtgcaggagacaggaaggtgggaagctgctgggctttggaggtggtataggtgtgggtggggcaccacgtgtgaggagaagggagaaggatgggggtgtgggggcgaggtggaggggcagggcctcccaggtcagatcaggaatactgatgctgcagtgggaggagtgataaatccacagggactggcccggggacgtagctgcacccttggggtcagggaggcctttggggagtggagagtggagcaagcagtgccaggaggctggtcctggagaaggtggagctgtggtcgcctgagggatggcgaggagggggactggactcgcagtctgtgatgttttggggacgtgagaaggaggcgtctggcttggtctgtaaggtcagggcacttgctggtgaggcgtgatttgggagggaggatgcccagctcggttctgtgtgtgtctgaggtgtcgggaaacatgccctggatgtgttcaagcagctgttctgcgtctgcgtctgcagctcaggaaattcctaaaagctgtgatgagagcaagaaatgagaccatgaagtcagtgtgtgcgtgactggatgtaggcaccgaggacagaagggccagaaagacctgtgctcagaggggcccagggcagccacaggggcccagagcatgtgtttgttcaggcattcattgtgtgctgggccctgctccagtgctttggacatacacggtcagatgtcagtgtaagaagttatatagtttgttaggagatgattgatgttatgagaaagataacaagtaggatagaaaggctagaagggttgggaaccagctgcagtgtcaagtcaggcaggtggagttggatctaagagtttaccgaggtgaggagggtctggcaggggacactgcacaggtgacaagcagcaaggagggtggggcgaagtcagcattgatggccacggggctggagcagagaagaaggtggggcacaagtgtcatctcatgggaggctggcgccacctcagaaggtgaatgggttcagcttgggttccaggccagagtctgaagttgagaggactccgttgggtgctgggctgtgagcccaccatgggggcaagactgggagcagcagacccagcagggcccttgtaggtaatcaccggctggcactggctgggggccaggtaaagccagcagaggctgaggggtgctggagtctgggtgtgtgtgaacgcagagtgggtacgctggcacagtgcatgggaggccgtggattcccaaggaccccagggctgtggctggagcagctggaaagacggagccgccgcttcctgagatggagaagcctggtaggtgggtttgggggagctcaggaactcagccttgtttccacggatttgaggatgtgctgcggactggaggtgttgagcaggtggacatgagtctggagtccaggaaggcccagaggcaggagctggggtgctggagtgagcagacaggagagcccagggtgtggacagacatgagaatgccatgctaggcctaggatggagggacagacacaggaggagcagtcagaggggccatggtggtcagcacagtgtgggctgagaccagctgaccgtgctggccaccaggtgtggacacttgggccaccagccatctttattgttgaagtgaaatgaaaatggcctttttcctgattataagtgtatcatgtgtgtctttgaaaagattcgtacattatataaagatataaagcaaaggatcaactttttaatcccaccaactgttagcattttattctgtgtcctctcagctttcttttttttgtacaaatgcatacgtacagatggtaattttaaactaaaagttggacagcactgtacattctattctgcagcctgctgttttcacgtaacaatgtgagtccatggagatgtgctgcgttgttaatgccaacagtttcccttacacggatatgaggtcccaactgagaaacccatgtctgtaaggctggtgccatcatgaactgaatgagctggtgtcacgcacagactctatctcatgtgctttgtggacgaaatgttaatgtgtttgactgtggagtaccactccagatcccctttaggtgtgacataacgtgggatgtaaaccatatgatcttttctaaaatctcaaaaattctgaaacatattcagccacaagagctttaacatagattttgtggatttaatacaaaatttatgtaagcaatttcttactgatggacaatgataataaatagtatataatttttacattaaaagtaatgctgggccaggcaccgtggctcacacctgttatcccagcactctgggaggccaaggcaggaagattgcctgaagctaggcatttgagaccagcctgggcagtatagtcagacctcgtctctacaaaaaataaaaagatagccaggcatggtctgtgtagttgcagctatttgagaggctgaggaaggaggattgcttgagcccaggaatttgaggttatagtgaactatgatcatgccactgcattccagcctgggtaacagaatgagatcccgtgctgtagtgaatatccctgtgtatcatccttatctactcatgcaagtactcctgaagggtaaatgctgtagtgaatatccctgtgtatcatccttatctacccatgcaagtactctggaagggtaaatgctgataaatactgagaacttgccttccggtgaatatccctgtgtgtcatccttatctacccatgcaagtactcctgaagggtaaatgctgtagtgaatatccctgtgtatcatccttatctacccatgcaagtactctggaagggtaaatgctgataaatactgagaacttgccttccggtgaatatccctgtgtgtcatccttatctacccatgcaagtactcctgaagggtaaatgctgtggtgaatatccctgtgtatcatccttatctacccatgcaagaactcctgaagggtaaatgctgataaatattgagaacttgccttccagaaagatgtaacaattacactgccacaaactgtgtttttatgtagccattttatcacatcctcaccaaaaccaaaatcacacaaatcaaattggttaaaaaatgcatgtgtgtgtgtggaggggggtgcggattttgcctttctgtagtaaagaatgaagttcatcttttcatgtttattgccagttgtgtttcttctctttggattgtatatttgtacctcttgaccatttttcattgggtcattataaattagcaatataaattagttttaattttagtataaattaaataatataattacattttaatgttaatataaacttctttcttttttttttttttttttttgagacagagtcttgctctgtctcccaggctggaggttcagtggcgcgatctcggctcactgcaacctccacctcccaggctcaagccattctcctgcctcaacctcccgagtagctcggattataggtgcgtgccaccacgcccagctaagttttgtatttttagtagagacgtggtttcactatgttggccaggctggtcttgaactcctgacctcagctgatctgcccgcctcggcctcccaaagtgctgggattataggtgtgaaccaccatgcccagctgttaatataaatttcattataaattagcattataaattagttcataaattatatgtttataaatgagtttatcaattagcaatataaactattgtcatatgttgtaaatatttttgcagtttatgatgatgagaggtttttaaaaattttaaattttctacatagtagttttatgtagataccgagataatagtatttacatagtcagatctgtcattttcctttgccttatctgacttcagtttttacgcctagaacgttcttccctatccttacttgtaaatccttagttttcttcaagaactgttttgtttacattgaaacctttaatccatttgaatttttttcagtgggaggtaggaatggagtattttcctcccagataatgagccagttttaatgccatttattaatgtatccatttttttaccttgttcctcttaaaagaagctttgagagctgtatgaagaagcctgatggcaccgagctaggcctctctagaggctgggtggggaagaccatggagagacgtaacagtaactcctgctcgggggcaccagctcgtctgggtgcccgatgctggtggtggctgtcagagcaagcagggctagccagaggagatggacgagtctgtgctgttgtccctctgcgtcatgctgggagacagcgaggtggggaggacagggagaacagaacgtgctcacaaagaggaggcaggaaggttggatccctgatgagccttggaacggaggtggggaaaagcaaggatgtgtggaaacagcaagaagtgggagagagagagagaggcggaggggagaaaaccgtcacggaggccaagcggcaggagctcagctgaagaaatgagattggtggtgggttttccctatatcgcaggctctgactgccaatctgctgctcctccaaggcctcggtggctgtggcatgaaacatcctgaggagcttgtaaagtggacactgtgcccctcacgtttggcccatttttcaggtggagccttttgccagcttgaccgaggccgtgcggagctcagttccccgactgctcatcaaccgggacttggtggggcccttggcttggcatcctcgcagcagggacgtggcccagctgggggacgtggttcacggcgtggaaagcctagtggagcttctgggctggacagaagagatgcgggaccttgtgcagcgggaaactgggaaggtacagactgctgaggaggaccatccaaggggctgcccttctcactgctctagggtatggtccacctgatatggagccccgttggttaacacagtaacagtaatagctgatgatgctgtgaatcctgcaccaggcactacctggacctgactgggtgttactttcaatacctccatttagagatgaggaaacagatgctaacaggccaagcagggacacggtccagacactcagggctgatgagtctgtattcttaacagactataggcgttaccttcactccctaaaataaagcagccaacagtgtccctctaaggcctggtatgtgattctaagatgatacgggttaaagaactttgagaagctaaagttctctgcatctatgtgggatgaaggctacatgagtgatgcttttcggaagtaattggtatgagagccattgatcaattataatccgctgaggaaagccaaagagccttgatgctttctaagagatttcaaaccgcctataaacaagtgaagttacagaaaatgcagtttcccataagaatcatgtagcatgtgtagccttgatattaagggttttcaatgggaggtggtagcattaagcatttaaagtccagtgtcatgattacaggcaggtgtaacactgtccaaaggggatttcaccagtgtattagtctgttctctggctgctcataaaggcatacctgagactgggtaatttataaaggaaagaggtttaatggactcacagttccatatggctgtgggggcctcacaatcatagtggaaggcaaagcaggagcaaagtactgtcttacaaggtggcaggcaagaggacgtgtgcgggggaactgccctttataaaactatcagatcttgtgagacttattcactatcagaagaagagtgtgggaaagacccgcccccatgattcagttacttccacttggccccacccttgacacatggggatgattacaattcaaggtgagatttgggtggggacacagccaaaccatatcaactacaatatatcacagttgatgctcctcttgccttccaaggcagatgtcttaggaaatcctgatcctttttccttgtccacagctgtggctgcctcatggctcagggccatggggtcagcactctcctcacctccaccagtccaagacctccaacctctggttgcaggctgattttttaccaatcatggtcacttcattatggaggcagggaacccagctaacaatgaggcttaaacgctgagaggcgagtgcctcctggccagctcacaaggcagcggagatcttagatcagcccagcaggcttttttgagggatccttttcctgctccaacttcatattttcttttttttgtaatggagtttcactcttgttgcccaagctggagtgcaatggcacgattttggctcactgcagccctgcctcctgggttcaagtgattctcctgcctcagcctcctgagcagctgggattacaggcatgtgccaccatgcctggctaatttctgtacttttattagagatgggatttcatcatgttagtcaggctggtctcaaactcctgacctcgggtgatccacctgcctcagcctcccaaagtgctgggattataggcatgagccagcaggcccggcccaacttcctgttttcatagaaaagcagattgtaactctggtagctcctgtggagttttggaagtggcttaataggatttgaactgtataatctagtttcagagaaatgtatgtaaaatgggttatgatttcattttctgttttttacagcattactatccaaggggttacttttccaaatagtgaatgcttttaagcacatgagcatcagtacatattgatttgggtactttaagacccatagaatgaggctctccatttagccaccctgttctgcccaggcctgctgggatcctcttagcccagcacagcagcagcagtatttgcagaaagcagcttgttttgtgaaatattttgcatgtctgcagctagagctgtttgaacagagatctgctggcctgcctgggtgtgtaaacagatagctgataccctctgtcttctgtattccagcttgatggaccagacaaataggatgatggctgcccccacacaataaatggtaacataggagacatccacatcccaattctgacaagacctcatgcctgaagacagcttgggcaggtgaaaccagaatatgtgaactgagtggacacccgaggctgccactggaatgtcttctcaggccatgagctgcagtgactggtagggctgtgtttacagtcagggccaccccgtcacatatacaaaggagctgcctgcctgtttgctgtgttgaactcttcactctgctgaagctcctaatggaaaaagctttcttctgactgtgaccctcttgaactgaatcagaccaactggaatcccagaccgagtctgctttctgtgcctagttgaacggcaagctcggcatctgttggttacaagatccagacttgggccgagcggtccccagccctcttcatgttccgaagtgtagtcttgaggccctggtgccgcacttctagcatgttggtctcctttagtggggctatttttaatgagagaaaatctgttctttccagcatgaaatacatttagtctcctcaaagggactgcaggtgttgacatgagttggaaagggaaccctgggatacgtggcgtcccctctattggaacagtctgaggactgaaggcatttgtccctggatttattggagacggcccagctcctccctctgaaggtggtcacattctgttgactctccatactcagcctctcctccagaaacagatctgttccagaacattccagcactttctatctggcctccttgtccccacactacgcccccccaccctcgccagggcttcctctagtgacactgttagagctaatctctgagacagggaaggcattactcacttaaaacccaggctgagtcctggccacctgctggattgtgacataggaggtggaatccactgaactgctacttctgcacaggctccttctcctggggctgtacccaggcccagccctgatggctcaccctgtcaggcaccagctgctccctcctgggctctcacccacctgcacatcctccttcctagcatcacattacctgcgtgtttccccagacaaaagcacttcccattcttgaaccttgcctaccctgggctgagctgacggcaatagatttaatgacagtgactcccaggaagggggtcctgtgactttgcgccttaataagaacaaaaggtggaattggtgacctaggaaaactgttgaattctaaaaagaatgaagttagtttctaaccctagttaatgttccttttttattttttgagtcttgccctgtcactcagggtggagtgcggtgttatgatctcagctcactgcaacttccgcctcccgggtttaagcgattctcctgggtagctgggattacaggtgtgtcccaccacacctagcacatgggcatatttgtaatagagacaaggttttgctatgttggccaggctggtctcgaactcctggcttcaagtgatccacccacctcggcctcccaaagtgctgggattacaggcatgagccactgtgcctggcccctttatttgataatttacacatacatttttgtccaaaactcttctttatttcaagatgatgtttctgtggctatgtgtggtatgtggtataaatctcaatctatggtca

SEQ ID NO: 1258 - DNA, 10635 bp, Homo sapiens
gttccggggcggggcttacttcgcagcgactacttgccgcacttccgggctgccaggcagctgctgtggctccaggatgatggagacagagcgacttggtgagggggaggggagggaaatggaacggagtagccgatatggaatgaactttgacccctgacttttgacctttccccgtagtgctaccccctccagatcccctggacctaccccttcgggccgtggagctcggatgcacggggcactgggagctgctgaacttgcctggagctccagagagtagcgtgagtgacttttgaccctaacctttgacccgcattgagtccaaacctccttcaccctcctcacagtaggatctagcttaaccttgttcatctgtgcctgtactcctgtccatcccagcctgaaggggtgctggacagattacagcccagtgtacctgcagtacatgtgaggacagagcagaaagggctggggatatttttgctttgagagctgctctttcaaatgtggcatttctccgtggagctcccttctgtatccaagcaccagggcacttggtgactgagatgataggctttgagcctccaacctttcatccttaggtctgggacccctttttctaaaatcagtgagtctccaatttcagtgtgcttcatgattagccagggagctttttaaaaatgcacattcctaggtccagcctccatgtttctgaaatccaaaatctgccccaggtaattcagtagcaggtagtttttggccaagcctgattgtcctagtctgtttgacacatctgccatttctgatctgaacacaagtcccatcatctcttttgtctgcattttatcctctttccttacctaatgcctctcatcttgcccttgtttcagcttccccatggcctccctccttgtgccccagatctgcagcaagaagcagaacagttgtttctgtcatccccagcctggctgcctctgcatggtgtggagcactcagcccggtgaggagtctggaggggcttagactagggtgatgggttcctgaaggaagctgggacagaggaagaaagaagacccaaaagttactatttttctctccagaaaatggcagaggaagacggatccctggtctcttttggctgtcctgggagccccagtcccatccgacctacaggcccaaagacacccaaccacaggccagatactgggttacaaagaggtaggaggtcaggggtcatgagaaacagttggggagaaggggaggtggtcagagacaagctcagcctcattggggctctgatctcttgccttaggtcttgctggagaacacaaatctctcggctacaacctccttgtctcttcgccggcctccagggccagcctcccagtccttatggggaaatccaactcagtatcccttctggccaggtgactcttgtggagatgggatggtagaagagggtgtctttaatctccagggaagggttccccacctatctcgtattaccctcatcccatgaatccctgtctgtcctgtctcttcccaggggggatggatgaacccaccataacagatctgaacacacgggaggaggctgaggaggagatagactttgagaaaggtaaggtggggctctgagtctgagccttgaggaggaagagcccaggctatcactgggctactgctagccctcccatgtttttgagaaaattagaaaaagatattctgtccataacaacctttactgtcatctgctgggaaatttctacaacaacctttactgtcatctgttgggaaagtgtcatagcaaacatccctatctacagcatctgtcctgtaaatggtatcttttaggtttatataatgtacacaatttgttcaccagtgtgcagtgacctgatttcatgtccctatcctacagatcttcttactattccacctggtttcaagaaaggcatggactttgcaccaaaaggttagttttagtttttgagtggggtgtaggagaagtcatgtccttctcctaaggaacagagatggacatgacaaggttgaccttgttggcttgctcctcagattgtccaactccagctcctggactactaagccttagctgtatgttggagcctctggatttgggtgggggtgacgaggatgagaatgaggcagtgggacagccaggaggtcccagaggggacactgtttcagcctctccctgcagtgctcccctggcccgagcaagcagcttggaagacctagtgttgaaggttggtggttctgtgtagtggaggcaagaaagagccttgccaccaggatgtgggctggctaggatgggtctgaggggaagaaagggacatcttttgggaggagtgctaattgagagccctctggttgtatctttatcactgctacccctgactcttccaggaagcgtccacagctgtatccaccccagaggccccagagcctccatctcaggagcagtgggccatccctgtggacgccacctcccctgttggtgatttctatcgcctcattccccagccagccttccaggtactttggccccatcttcacacgctcctctacctctttctgggtcacactcccagccgaccccttgtctcctctattggccagaggtcagatccatcccaggccagtcttggtactcagtcccagcctcggctggctccggccttcatccgcccgccctgcgtgctccatgagcaggaggcagcaaggccccgctcctttcttcagctcctgtctatttctctctcccatagtgggcatttgagccagatgtgtttcagaaacaggccatcctgcacttggaacggcatgactctgtctttgtcgcagctcacacatctgcaggaaaaacagttgtggctgaatatgccattgccctggcccagaaacacatgacacggtatgagttcctttgccaacctcccccttcaccagccagccccattttctcctgcatcctttgaaaatctcatctcttcccccacctctctagctcatcctttaagtgagaggttcagggctaagactgagacaagagcccagagagaaatgaaaagacatggtggggagaaagtttagaagaatgacctgggttagtttaggaaggggttggggacagaatttttctggggttatatcatgcaggagaatgtaagggcagtttgggtgaagaagaggagcacctgagcttctggggcatgcttccacgagggctccatgtgggagaggaagtgcgggccatgagtctgcggagggactggctaacttcatgctctcttcccagcaccatctacacttcgcccatcaaggccctgagcaaccagaagttccgggacttccgaaacacattcggggatgtggggctgctcaccggggatgtacagctgcatccggaggcctcctgcctcatcatgaccacagagatccttcggtgagagatggacactcaatacaggggagttttggctgggaagatgtggccgttgtggagagtgtgctgtctgaggagggggtggagacgagccactggggagtcaatccttggcctcttctccccagctccatgctgtacagtggctcagatgttattcgggacctggagtgggtcatctttgatgaggttcactatatcaacgatgtcgaggtaagggccatgggctccccagaacccggcagtcctctcctttgggaccagttgagcgtctcccttattccacacactcagggccccttactgctttctttacccccatatggaatcctgtgcctctttatgggcagaagggcggcccctgccctcatgtgacctcccttccctctctgtgcccagcgtggggtcgtgtgggaggaggtgcttatcatgctacctgaccacgtttctatcatccttctgagtgccaccgtccccaacgcccttgagtttgctgactggattgggtgagacgtgtgtcccgggttgcctgggtgaagggggctacagtactccttgattcgggtgggggactaagtctaccacagcaaggagagcggtcaggccttaggggtgatgctggggaacatgtcccacctggtggctgtgggatcccctttgggtccagattactttgcatgttgaaatgggatgagatgttgggggatagccttccattctgggtctcagaaaagactgggtaaagttggaggggtagggaagggggtggggatgtgggttccttcccacgttcccacccctgacctgcttccctctcctttcttcaggcggctgaagcgtcgtcagatctatgtgattagcactgtaacccgccccgtgcccctggagcactatcttttcacagggaacagctccaagacccagggggagctctttttgttgctggactcccgaggagccttccatacaaaagggtaagcctcgagatgggggaaagagttagggctgggcccccagctggacattgtggctacccctccctgtgccccaggtactatgcagctgtggaggccaagaaggagagaatgagcaaacacgcccagacctttggggccaagcagcccacacatcaggggggccctgcacaggtgagaactgggagggttttgtacctgccagcacctgtttttcctcctatcttttttttccccttgtcccccaggggttttgacttgagctttgagcactgccccagttaacactagctcacctctcattggttcaggaactcaacctctgctccttccccttccccttccttctccaggaccgcggagtgtacctgtccctcctggcctccctccgcacacgtgcccagttgcccgtggtggtgttcaccttctcccggggccgctgtgatgagcaggcctcaggcctcacctcccttgacctcaccaccagttcggagaagagcgagatccacctcttcctgcagcgctgccttgctcgcctccgtggctctgaccgccagctgccccaggtgcgtctgtgtgcgtctgtgtgcgtgcatgcacacatttggcagactggtggggatagggtgttccgagactccatccctgaccatgggcctcctcccaccaaaggtcctgcacatgtcagagctcctgaatcgcggcctgggtgtgcaccatagcggcatcctgcccatcctcaaggagatcgtggagatgctcttcagccgtggcctggtcaaggtgcatgtggtggtggaaagggactcctcagggtgcttgttgcccacttaggggctgcccagagggcagaggggcagaggtttaggcaggccagtgctgtggttaagaatctgggctctggattcagactacctgggtttgaatcccaggtacaccatgtattcacagtatcatcctggaccaattatttaaccttcctgaactttaggtttcccatcttaaaatggggatgcataagatatgaatacgtaggtctcagaaaagaaacccaggaagctagcaagcattcgaaaagttattagtaatcagaaatatacaaattgaagtactcacaagatacgactttacagctattagactggtaaaatttaggaaactagttcatgccgagtgttgccagagatataggaggttgtagggttctgggaatcctttacgggatgcctagccagtttggaatgcacgctggcactatttagacaaaataactatattggccgggcatggtggctcacacctgtaatcccagcactttgggaggctgaggtgggtggatcacaaggtcaagagatcgagaccatcctggccaacatggtgaaaccctgtctctactaaaaatacaaaaattagctgggcatggtggcaggtgcctgtagtcccagctacttgggaggctgaggcaggagaattgcttgaacccaggaggcagagattgcagtgagccaagatagcaccgctgcactccagcctgggcaacagagggagactccatctcaaaacaaaaacaaacaaagaaacaaacaaaaactatatcatactctgagcttatatttcattcctgggtatatatcacaaagaaattctcaccctggtctgtgagagaacatgtacacccatcctttgtttgtggtggcatggtgttggtagtaccagggtgcccttcactgggagagagggaaggttagtgtgggggatgcacccatagagtgttctgcagcagttggaagcagtgggttagatgtggccacaggaacatggacagatgttgaaacactaggtggagaaaaagaagcaaaaaaaaatcagatatataaccactttttatatgaattataaactacaagctcacaaaagaagacatgttctataagatcatatttatataaaaagatatttgttggatacattggaatgattgcagtcagggatgggaatgggatatgaaggtaaaagttaagaaatagaaataagtagctacataagtaaaatgaggaaaacaataatacctgccctatagatttgcctggagagttcagtgagatcccataagtaacaactgggatggtgccttatgcctacaaagtaaggtgggcttggccagggctgggggtgtgtgtatgtagagcctttgctgatcctttctgttctcctctgtcccaggtcttgtttgccacagagacctttgccatgggagtaaacatgcctgctcgtacagtagtgtttgactccatgcgcaaacacgatggctccaccttccgggacctgctccctggggagtatgtgcagatggcaggccgggcagggcggaggggcctggaccccacaggcaccgttatcctgctctgcaagggccgagtgcccgagatggcagacctgcaccgcatgatgatggtgagcgggccagcatgctcggcagggccccagctccaggaccttgctggattctgtcttcgattctcctctcttctttttcttcttccttttttttttggagacagggtcttgctctgttacctaggctggagtgcagtggcacaatctcgggtcaccgcaacctctgccttccaggctcaagggatcctcccacctcagcctcccaagtaggtgggattccaggcacatgccacacaggcctggctaattttttttttttttttatgctttgtagagatgaggttttgctatgttgcacaggttggtcttgaacttctgggctcaagcagtctgtctgcctcagcttcccaaagtactgggattataggtgtgggccacagcgcccaacttcctccgacttttttgttttgcctgggagaagctgaggtaggagtgagtgaatccaaggatgagattggagcccatctcttccagttttctcccatgtgaatatggagctagatggggcctttgagtccatttatttcagtttgctcccttatgttacagaagaggtgagcaagtggtttgtccaaggccccatggttgcagagctaggaccggatctgacgggagtaggcccagtccagaagactggctggggttcagtaggtcccaccctgatctcagtgacttctgtgacctgactccaggggaagccgtcccagctgcagtcccagttccgcctcacgtacactatgatcctcaacttgctgcgagtggatgccctcagggtggaggacatgatgaagaggagcttctctgagtttccctcccgcaaagacagcaaggtaaggagcctggggtaaccagtgtgtggagcaggaggttggccaaagacaggctgggaataggtaggcatccagaggccagtgtgttgagggtggggagtgtgacagattgggcctggagactcccctttcacagcttcccctgctcccacccaaggcccatgaacaggccctggctgaactgaccaagaggctgggagctttggaggagcctgacatgactggccaactggtcgacctgcctgaatattacagctggggggaggaactgacagagacccagcacatgatccaggtgagcaagtgtgagtgctgaggaggtgataggagaagggaagagaagatcgtgttactctaggtgctactaaacttagtccaagtgtctgtccctgtgatgcctcctcccatctgtcctttgctcttcagcgacgcatcatggagtctgtgaacgggctgaagtctctctcagcaggaagggtggtggttgtgaagaatcaggagcatcacaacgcattgggagtgatcctacaggtgagggtgatgggaatttggactccagagggtgggagggagcaagccctctctccattttccccacttggccagggcaggttgcgtcatcatagggccctcattttcccctcttgccctccttttcaccctctcccttcccatcaccacatcatgctcactccttcctcccaccaccccaagaagtctgctctgatcgcttgacttggttgcccctctctactggtgagctctgcatggttgcttcctgattcctgcccaagggtgggtatctggtctctgcctttgatgtctactcatcacacccccctctcctggcctctctgaccacccccaggtctcctcgaactccaccagcagagtattcacaaccctggtcttgtgtgataagcccttgtcccaggacccacaggacagggggccagccactgcagaggtgccctatccagatgacctcgtgggattcaagctgttcctgcctgaaggtgagagtgtggcagatgtctgttttctgccagcagtataagcaggatgcctgggtccatggcaatgtctgccctgctctccccttttcacagggccttgtgaccacaccgtggtcaagctccagccaggagatatggctgccatcaccaccaaggtgctccgggtgaatggggagaagatcttggaggacttcagcaagaggcagcagccaaaattcaagtcagagatgctagggaggcccttctcctccagaggggcacgtagaggcagggaggggcagtggtctgggagtttcctccagcctgagggagaccatgaagtggtggggttgtagtgagggggctcccccagcctaagggagactgtgaagtggaggttgtagtaagagggcttccacagcctgagggaggcttctgggggagagaagatcttaccccagatcttaagatctgctccctcttcaggaaggatcctccccttgcagccgtgaccactgctgtccaggaactgctgcgtctggctcaggcccacccagccggacctcccaccctcgaccctgtcaatgacctgcagctcaaagatatgtcagttgtagagggtgggctccgggcccggaagctggaggagctgatccagggggctcagtgtgtacacagcccccgttttcctgcccaggtaggaccctgggtggtaactcccaagctgggagtaggggcttttcctctgtggtcccctgtagactgaccgcccccatctcagcccttgtcctcagtgcacccctgctaaggggcaaggagaaggctgacgggtggctctctgcagtacctgaagctgcgggagcgaatgcagatacagaaggagatggagcggctgcgcttcctactgtcggatcagtcattgctgctgcttcctgagtaccatcagcgagtagaggtgggtggggcagtggttggggcaggggggctaggggacagcagtgtgtccaatgcccaccctttttcttgcaggtgctccgaaccctgggttatgtggacgaggcgggcactgtgaagctggcagggcgggtggcttgtgccatgagcagccatgagttgctcctcactgagctcatgtttgacaatgcactgagcaccctgcggcctgaggagattgctgccttgctctctggcctggtctgccagagccctggggacgctggggatcagctcccaaacaccctcaagcaggtaggggacaccacccctttctccctgccagggctgtggcattcctgaccttcaccttcaggtagtcccccaggtgaccccctccagccctgtaagtgccccaaggatggaaaatggctgccttcttgatctggtccttccctgtcctggagcaggaaggcaggccttaacctctccttctttcctgcagggaatagaacgtgtccgggctgtggccaagcggattggtgaggtccaggtggcttgtggcctgaaccagacggtggaggaatttgtgggggagctgaattttgggctggttgaggttgtatatgagtgggcccggggcatggtgagtacctgaggtttgggattttgcagacggctggctggggagaacctgcccaggctgagtgcatccagtcctcaccctactttccccacagcccttctccgagttggcagggctctcagggacccctgagggcctggtggtccgctgcattcagcgcctggctgagatgtgtcgctcactgcggggggcagcccgcctggtaggagagcctgtgctgggtgccaagatggagacagcggctaccttgctacggcgggacatcgtatttgcggccagcctctacacccagtgaatgccccatgtaaaaacatgatgataaaacagcaaa

SEQ ID NO: 1259 - DNA, 61680 bp, Homo sapiens
agtcccgtggcgtcggcgggagcggcgcagcgcgggccgggccgggacggggactgtcggctgcaggcggccatgcccaccaacttcaccgtggtgcccgtggaggctcacgccgacggcggcggggacgagactgccgagcggacggaggctccgggcacccccgagggccccgagcccgagcgccccagcccgggtgagcgcggccgcacctggccggacaaaggccgagcgccccgagcgcgggtctgggcccggcatccgggagcggaggcgggcggcggggccgggggtacaggaggcgccccttcccgcgcccccaccgcctgttctcggtcccccacgagggcccccaccccacgttagtggcagcgctagggggcgaggggccctgccagggctcccggtacggtcagctcgggtgggaccgggggcagaggtgtggacgccgctgctggtagccatggaaacggggaggggctggagcgcgcctccggagggagcccgggcccctgggtggtccctagtgggacaggggtggcggtggagacccgggcggttcgggagccggggcgtcctgcgtcccccgcgctctcccttcccctgcgccgcggccgtccggtaacactagcccgggccggcccgtcctgcccccgcctgaccctggaggagccgcccaccccccagaggcggaacaggaaggactgcgccctggctggggagggggcagccaccggggccttgctcaggccgcgtcctccgtgttcccgtcccccgttccgggaatctggaggtttctagcactttcactttctctagggggtggggacggggctggggagagaatcccccagccctgttccctccatcctggctccaaatcccagttactccccggatctcagccccctctagaaaccggaggctcttaggcccttccatccggagtctctgagaaggtgtccggactcagtccagcccccaccccgcgtgctggcagtgcccgcatgtgcccgggtctcatgcagtgggtggcagcctccctgctccctggcagtggaaggaaggtgaggtctgtccagggacaagtccggtgccagaccccagatccttcctaacccaccatcccgggcaggaaaggccagacatcccctccaggcagtttaggaacccggagacacgggtggggacccaccgtgaaggcagtggcctggtggcctggggtgcgtcatcagggtccccgtggcgggcgaagagtggtctcagcttcctctgcacagaggccagcccagatcttggaagtggtcaggcggggcgccaggctcaacaccaggtgaagtgctaactaagcagggtccgtgagtccaagccccttctctccagtcaccaccgtggaggcaggaagcaccaaggagtgtgggccctggcgtggtctttctgtgtgagctttgtagcaacgcccccggaacgcactcagaaggagcctcttcttgtctggccggccccttctcaaggctgatcaggttcacttttgtctttagactgtaagtgtcatttgcttttaagccagagagaattttgtgcttgttcgttttcttgtctcttctactctcaaggctgttgagcagtgccctgggcctgtgtctgcccagcaggaagtggccctggctgagcgctgcccatgtcgctgcccgcgcactcaggtcctgctacgggcgtgtcaggaggctccctggccttcatgaaattgagaacgggagggcatgggccaggtgtgggcttctggacacttttgagggtggccctgtggtgtgagctgaacttgggagatttctccgaactggcagagaacttgcacctggcgcttttgtgctggacccgcttcctacttccacagaaagggcccggtgcccagccactgccaggctgtaacgggcacgcagctgcccttcggaatccacttgatcacatcctgatcttcagcccacagaggtgcggcgaggagtcccgtgatgggcacggagcctggggaaggaggcacaggctttgctttttggtggtggttgggggcgggggtcctgcagaagccggagcccctcccaaaggccttctgtgtggggtccacaccacaaggtcacaggccaggtccaaaactgtccggccacagagttaccagcacccaagctcttcctgactccattgccgttcccctgaacggtctgtggaggtactggagcttctgggctggcgcctgggtgacggcgaagcaagtttggggggcctggtgggctgatcctaggcactgccaggtgggcgtggagagggcgtcctgagccaccccaacttgaggagcaggggccttggtgtccccagcctgggttggggggttctggggaaagaggggtagatgctgctgcccgggctgcctggctcgacccagagcccagcaaggccgcgtctgcccagcctggctccaggggccttctgtccccgacccctgcagcttccctgctgcttctggtggagcctctgcgggaggcgtcctgtcccggggatgggcactgtgccctcagcacttcttgggacggagcttttattcttatgtgaaatacctcgtcttgaaatgagaaggacgtgttaaccctcagtttctcagtggggtggttttttgagagtaggaggtgggaggacactgctgggggccggctgcgtctcgtccgacttcagggtagagtgggttttgtaactgacttgggggagcccacccttcctccgtgaccacatcagggtagactcactccttcccaggttgtaggggtgcgtccagaggcctcggagaccctgggaggggtgggaaaggagggctggccagtgccccggcctgtctggaaggtgcagcgtgcagagcctctgtcaaggtcccacaggccctggccacccactgtctaggagggacttccactcgtctggggctccctgggctgggagagggtgggtcctgccttgtacccccaggtctcccaccctcagctggggctctcccaggtttgccgggagcttcttcctggcttgggcgccacttccctctttgggttccgtttctgagattttccactgtggctgagctcgtgtcggttgtccaggggcggtcctgcctccctctgcccctggccgctgacagaggcccggttgcgtggtcagtggcctgcccgtccctcctgctccaactacctaccgtgtccgtgttgggagccccctcccaaaatctgaggacagctagagctgccgctttgtcctgggccgtcctcgcctgtcgggtgctgggtgccatgctctgcactgcccttgggaatggcgagacggtgcacgccggtcgtgctgatctggggtcccctttggggatgcagggacttgggggatcacgcattagatagggggaccacacacagagcgtccaggttctgtcctgccgagtagggacagagagctctcgttgtgcccagatttcaggagggcgttcccgacacggacatgggaggcagtcggagcaggagggacaggcaggctgttgaccccgcggctgtgcccgggagcccctgcagcagctgggcactgcgttgcgggaacggaaggtcatgggtatgtggtgagcaggcagggaggctacaagacatgcattttgtgtatcgagttccctttttaaaaccaaaggaaacaagatacacaggaacgccgtggctgctgggcatccaggccggggcctgtgcttcctcctgcgcctgacatactcccaggctgtctcccggcaagaggctctccttagcaggcatgcggtaaagcatggtgctttaggtcagctggccgggtccatgtgtgcgggcacctatgtgccttgtgagcgtgcaggtgtatccacgtgtgagccatgtgcttgcactgtgtatatgtgcacatatatgtacacacgtgtgcatacatgtgtactgtgctcttgcacagctgtgtgctgtgggcatgctcacgtgtgtgtgtgtatgtgtgtgtttgtatgctgtggcaggtagagaggggctggggcttcctccacagcagagggtcacgcggtgttgggtgttgggtatccgttccctccccctggtctaggcccatcagtgagtggtgaggggctccctctcctggtgtggcctcgtgttcaggtctgaacctgctcctgggcctctgatcatatgaggagacctttgcctcgtggactcaggttcatggtttcctcttctgcaaagctccccaggcttctctgagtgggcgaggccaaacggattccacggtggttttctgtctagcgttggacaccagatccccttcttagagtgcgtggctttctcagtgcctctcccgtggtctggatggctgtcgggaaggtggtgccaaggggagggccaggtgctcaggcctgggtgcagggcggctggtcggggccgaagtcacacaggtttgctggggatcggtgaatgtcggagaccttgccaggtggtggctggagtcaagcagaggcacctgagggaccctgagggtgagttgggggctgtcctcccctcatgcccggcagtgagtgggccgtggagtgaggccacctctgtcagggcctctgccctttggacgtggggccacgtcctacacagctccctggacctgacccagggattcccagatggcccaggctcctgcatgggggatgggtggcctttgtaaagcacagaaagcgacccaggtgggcctcaatcacttgagaggtttatttgccgaggttaaggctacgcctaacacagaaccacggggaactcctgtggtccggcttttcttctcaaagaaggctgagaacttgaatattcagagagtaaagcgtgagtattaggggaagaaagaaagagaaagaagagggagggcagataagaggcaggcagcgtttgatcagcgttcactgaacccgtgtgttacacatgggggtaaaggaagaacccctcacggctcacgcttagtgactctgcacatttaccttcgacacagtcagtacagggtgggcgaagcagtgaggtgtgcgtttgcctccggcgagcagagcagcaactcctggttctgtccttggtcccacacccgtgaggatgagctgtcatttccaccgtcagtgtgagtttcatcacaactgctttagtgtaaggatcctgtgggtcctaaaatatgagggaggcctgcagctttctacacaggaagaaaatggaaggcagcttgcgtgacccggttcccagcctgactcttgcctgtggcttagtgtgtttgggtcccgagatcctgttttcctttcataccttggaccagggagccttcccagggctgctgtccttgggcactgcagacacatcccgacgtggcaccgctgggcacagcactgggagtggaggtcagcccagggtgaccccccagctgtgaagggcacgagtggagccgacaccccagggatggatggcgtctgtgaggccagctggctgcccggagggctctcctgttaccatccctgttggaatatgaattttctttttttttttttttttttttttgagacagagttcactctgtcacccaggctggagtgcagtggcacagactcagctcactgcaacctctgcctcccaggttcaagcgattctcgtgcctcagcctcccgagtagcggggaccacaggcacgcaccaccgcgcctggctaagttttatatttatagtgcagatggggttttgccatgttggccaagctggttttgaactcctggcctctagtggtctgcccacttcggcctcccggagtgctgggattacaggagtgagccaccatatctggccagaatatgaattttctaagctgtgccttagaccgaggtctggagggcaaagtttgatgtttgacgttaagtattaaccacagttcctggctgggtgcttttgatttcaaccggctccatcagctgagtgtttctgagggtggatcccagagtcattttgtgacggccgtgtggtgggtggggcaggagtccctgggtgctggggagtgtgaggcccgccagggccttgaggggtagacctccccctcccactgtggggcatgggaaccccgtggagcccagtggggctgggcgtggacggcattcaggagtggaccagctggtcttcagggcagtgggctgggctgggggtgtctggggcctggtgagcagctggctgggggccctcctggtaactgacatggggggctggtctcctttggccttccttctcagatgctggggaagtgctgcccagggacaagggcagagcacaaagggttaatacctttcctttatgaagaaaggggaaactcccttttgggggcagaggcctgttctgtgcagataaacctctggcttcagcgcagcagcctgaacgatgagctcctgaacgatgagctgcctggctggccatgctgtccaggccctgcctcttcccctgtttgtggccgctgactccccaagggtcctggagcctctggccgggagtgccggggggcaggcccacggcagggtcccctttggctggtgggtgactgcaggacctcatccctgtggggagggtccttttggctggtgggcgactgcaggacctcatccctgcagggagggtcccctttggctggtgggtgactgcaggacctcatccctgcggggagggtccttttgactggtgggtgactgcaggacctaacccctgcggggagggttccctttggctggtgggtgactgcaggacctcatccctgcggggagggtcccctttggctggtgggtgactgcaggacctcatccctgcggggagggtccttttgactggtgggtgactgcaggacctcatccctgcggggagggtcccctttggctggtgggtgactgcaggacctcatccctgcggggaggctcctctttggctggtgggtgactgcaggacctcattccttcggggagggtccttttgactggtgggtgactgcaggacctcacccctgcggggagggtcccttttggctggtgggtgactgcaggacctcacccctgcggggaggggcgtgtgctgccgttgcaggggtctcggggtccgagtggtgcttgcggccctgggctgtgacgtgggcccccatcctgccagcccgtgcctgtttccgctctccccttgggcggtgtctttttgaggaaacagttgtggggaggagagtgctgcttctgaatcacgtgtggacctggggtggtttgtttcctgcgttctggggttttcttgggcagcaccccacacgcaccccacacgcaccccccggtgggcctcggctctgtggggagtggtcctggggtccgggatgagagtgggccccgcccaggcctgtgttgacccctggagtcagattgccatccactgtagtggttacagtggctctgggaagtttgggggctgggacctgagcccaaggctggccatggatagccgcacgcagcatgcccgtgtgcttggttggcatgcctggtttgtgtgtctgccatggcctggagctgtcctcatggtggggtagccccgctggccctcccagcgttcctgtccatttaagtcccgtgcacaggggatgtccaccttgcagacgtgcagccgggaggaggttgttaaagtgatccttgaacatttgctctgtgcctcagtttcccttggcaggagccagcctgtcacgagggtggcggtggctgtgacctctcatctccttggctctgtctgcagacctctggcgccagcgggtcgggcctgggctttcagggaggctcagagacgccctgggcagtcactggggagggattgagtggagtggaaatcggaggagggaagtgcgccaggccaggcccctcctgggtcccctccatgccgccaagggtccccgaccgcagcccagaggcagcctgtaacaggagccgccctgggagggcctggcaggtgcgctgggggccctgcctctcccgccttccttcatctctgctcctgcaggctgcctgggccccgagtctctggaactaggggaccccacggcccctccatggctcagacgtcactctggctgctgagggaggaggctggaccaggaccagcaaacagccacgtgacagagggttcgggaagtgagttcacccgaggccaccttcccgcgagcaggcgtgtcctttagatggaagggctgtagtcccagtgcatgcctgtgtcctgggcaccccgccccgtgggtcgtgcagtctgggggctgtagcccctgggactttgtgcagatgtgtgtgctgcaggtatgtgtgtgtgtacacgtgtatgtgcgggtgttggtgtgtgtatgtgactgcgggtatgggtatgcacatgtgaggacaggtgcgtgtgcaggtttgcgaggtgagtgttgtgtgtatgaatgaggggggaagcgtgtgagtatgggtatggagagtgtcttccgtgtgagcaagtttgcgtgtgcacgtggaagtgcctgtctgtgcatgtgtacacatgcatgtctctgtgcatgtgagtgtatattttctgtggcgtgtgttcatgtgtgtctggccatagcttgccaggaccttccagccaggcttccttgcttccagtgcctctgacggtgagctgggatctcccggcgctctcctggtttacaggatactggcggtggtgtctgcacagactgttgggatgaggtcacttcgggaatgggtgatgaagggcctgtttttccctcagaaggcagcgctgctttagccagaaacttgtgctggaagcctgagagcttgcctgaagccccccgtgtcccagcctgaacactgggccgttctcatcctgtgccccttgagagcctcagtttctagattttaggggcccacacagcacaaactgtgaggggcagagggagggcaagggccaggggtcgtcagctggcgttcggatcctggaacctaaacacactttatttcagtgcccggcaccttcacagggagcccagcctccaggcagtggggttgggagtgttcctgggtcctcgcgccttcacagggaactcagcctccaggcagtggggttgggtggggggtgctcctgggtccattcagtctcgggctgtccccagaggccacgtgagctgatgccactgggtcaccaggtgggactcattctgctgtgagtcccctgtggctccaggggagggtggcctgctggacccaggggacacacagagccaggcctgagaacctcctcgagtgcagggagccgggaagcctggacttgcttgtcccctgccccaggcccggcgcctctctgtgtgcacaggtccggtgccacccgccactgctctgcagggctgggtagctggacggaccacccacgctggagggcaggaaggggcggaggctgtcggacctggcttcagcttcacagcccctcctgcctgtcagctgcttccggctgaggctgagtctaagaggacgttcctagagccctttgcggagaatggctgtaaaatcccaaaacgcgggaggaagagggggagggatgagccactgagaaagggaggaggttgtgcctggagatagggaggctgatggaggcattgtgatctcagaggggattagggccgattagggaggtgagccagcttctccctgcagaaactacccatgaacgcacttcccaggcctggatcgggatgggtcagggatctgacacacacactctcactgcctctctggctggaggggctgcccctcctctggccgggacactcgtgtgtctggtctttgcccttccacctgcagccgcctccttccctctcggggtggggacacagcctggttggacaagcccaggaggctgttccccaagggcccagcccatcaggatctgcttactgaccacagggtctgcattcactttgttgataaggtgtctggaaaactaacctagagtgaaaaacagaccggaggttgcctctgtggctggggggcttggcagggagggagctggggaagtggtgggaggctcttggtaggtccggtgagcaggggcaggcctttgttaatgctcagcagatagacgttctcttgcccaggcggctgcagccagagaaaactcagcaaagcggctccggagggccacaaggctgcttagtgtcggggggtggaggggggtcggggcagtggtggccactgtgtgccatgacatgcatcagaccagggctgtgtggggcggatctgtgcgtggacagctagcacccatagggctgcacagggtgtctgcccacttgcttacctggggtcgtttttataataaaatgaagaggtagaaaaaataagacgagaaaaaactgacttgtggccagttcttcaggccagggcttgacctcgccgccttcatggctgaggaggagggcagcattggtcagcctggtgttgctggttctccaccagcggctgtcggcctttgctggctattgggagggctcctccaaggtctcagggacccaccagaggctgtggttctggggcctggacccaggtcgggcctgctggccagacgctgtcagtcccgggcacgtctgcttggggcaggttctgttgagaccctggcccctggggataggtcagcctggtgcatggggttcatgaaggcaccagacaagctgtgagcagagctgctgctggaactgctttaaacctggagggacgggcaccggtgacagtgaccaaggccctgtcccagtgcaggtgggcagggcagtccacccagtgccagctgcttagggccgctcggggcaggtgagcgaggaggggcctctggggagagggcgctgaaacaggctgttcccaggtacgaggcgggccgaggccggggctgttcccagagctgggaagatgttgggatggacggagcaggagggcagcgcacacagctgtgggggagctggccatgggtgcggggctcagctcgtcgagggctcctggtgggtggtcaccatgcagagccacatccctgcaggctcatgtttcactgcctcttcccgggtgtgcttttctgtcccaggacacatccgggatccaacgtgacagacaccaagttcccacgctgcctcgggctcctcttggctgtgacggtttctcggactttctttttttgacgactgtggcagttttggggagtcctggtcctttttagagaatgcccctcagttgggaggtgtctggtgttttctctcgtggttagcctgcagctgagtgtttcggggaggaagaccccagaggacaggcgccctccctgcatgcggcgtctgggcacacgcgtcaacagcacttggcgcggtctccccgagggcgccgtcttcctcctctgttacccacgagcgcagctcaccttcctttcccgccccagccaggcttctggagcctcgtttggttttggttcccactgtcggatccgcagatgggcttgcctttggggcctgctgtgctgtggagtaacccagggcacctgggggctgctgcgagaccatcgagcctttgaaaggctgtggaaagatagatgacaggcggctgcgggtggcccaggggccaggcggcctttacatgggcttctttcccagtgactctggccgggtcctgtggatttttaattccgacggcgtgtctgcagaatggagcaccgtacaagcctcatcaggcggcgcggagggtaccagcccctgccgtcccggtgccgcccgagggtgagggacattcgtggatgattcacgggcttcgtgagctatttgcagacacccgcctgagtctcctttaaggggaaattcctgagcggctgcctcgctcttctcttccgaggcgtgtgggagcccagcccggccgggtaggaggagagggttgaaatgccatgccttcttcttctcgccctggatgctactggctgaagtagcctccttttaaagccttatgagtcgcttttttcagtgataacagtaacggtcatgcgccctcaggttgcgaagtggggcgggccaggcctgggggaccccggaattcccctgcgcactcctgccccgtacacccgccggaggggaccgtggtggttgtgaaggggccgttcctatcgctggttttaaggtgtcccgagttttgctgcacttggttttggggagaccatgagcttggcgcaaactgagattcccgagtcagcctttctaagctgtggtgggcaggccacggctgtgatgtacaatgtgaaaggagccggcctttacagggcttctgtgaggtgagttcagcatttcagcccttaaatgtggagataagtcagaaacgggttcgtcttcgggaggagggaggggaggcgagttttgtggaggtcggtaccatggctcattctgtgtcctggccggaactgggatcaatcctctgacccgctgaggatgcctgccgtcccccggaggaggtggactgggtcgggccctgccgtcccccggaggaggtggactgggtcggggctgggttgatgtccgtgccccagaggaggtggaccgggtcgggccctgctgtcccccggaggaggtggactgggtcggggctgggttgatgtctgtgccccagaggaggtggaccgggttgggttctgccgtccaccggaggaggtggaccgggtccgggttaggttgatgtctgtaccctgctcctgcctcagggcacgtggtatctgggtgctgctctttggcccatggggtggggtttggctggggagacctgatctgggttgttgggccatccctcgcccccgcttcaccctgcttggcagaggccactggtgcatggcgcctgggcaggggcaccaccgggacctgccctgagggttagacactgtgggccacctggcaaggaccctgcccatctcaccttcctgcaccgcacgcccaggctttcccctgtgtccgtttgtcctctcagccttccggtcatcatgaatgtgcagaatgacaagggaggaggtgctatcccaggcgagtggctctatccccaaaacacaggcagggctcggccagaggaaaactcactgcccttcacagcagccaggactgccgatgtccaagtccaggccagggagcgcaagggacgcggctgggtgagcagagggttagagggtggctgggtgagcagagggttagaggggggctgggtgtgcagagggttagaggggggctgggtgagcagagggttagaggggggctgggtgtgcagagggttagaggggggcctgggtgtgcagagggttagaagggggctgggtgagcagagggttagaagggggctgggtgagcagagggttagaggggggctgggtgtgcagagggttagaagggggcttggtgagcagagggttagaggggggctgggtgtgcagagggttagaggggggcctgggtgtgcagagggttagaagggggctgggtgagcagagggttagaagggggctgggtgtgcagagggttagaggggggcctgggcatgcagagggttagaagggggctgggtgagcagagggttagaagggggctgggtgagcagagggttagaagggggctgggtgtgcagagggttagaggggggctgggtgagcagagggttagaggggggctgggcttgcagagggttgtgggggcctgggcgtgcagagggttagaggggggctgggtgtgcagagggttagaggggggctgggtgtgcagagggttagaggggggctgggcgtgcagagggttagaggggggctgggcttgcagagggttgtgggggctgggcttgcagagggttagaggggggctgggtgtgcagagggttggagggggcggctgggtgtgcagaaggttagagagggcattggatttttaacgaagggtctcttgactgggatggcattgagcccatgacgtccccgggacgcactcttggttcaggtctgacctggctgttttaaccagatagaaacgtttgtgggcactcccaagtgggcacttccatcctgctgagagcacgcttgctgtggcctccgtagagaccaagcgacactcttctcaagaaagtgaggggagatgcgttctctttaaaggcttgaaggttgtaatcatgctctgaggctgcttttggtgacaacatgctggtggctgaacacacgctcacatgttcagtgcagtccccacctgggaggaccagccacaccctgcttttctgtattccgtcccccttttctgtgcgtcctcgcgttctggactcatcgtctgtgttactttaataagcagcagaaggacagagtcgtgcctcgctggccccacacgcagggctttgtcgtgaggccgctggcgcacagccctgcacagtcagacgcagggatctcgggtgtgaccctgtggtggttacatcgttatgttttctaagtttaatgaatttctcgatattaatccaacttgagcaagttgtttctagtgcttttttccaactgcataggttgcctgtggggagcttgtgtgtgtgtttttcggggtgttcttggggcctgataggcgttgccatcttcccaagtgggctgcgcagaggagacgctgcggtgagcaggggttgcttctgctgggagtgttggaggcgacgggaaggatgttggtccccttggtttgagcgaatgtgcttgctgtgtacacgtttttcctacttgtacagttcgtaggagttcagataaacagtggttgcttgctgaacgcagacatagttacatgctaagacctcaaccaccagtaaacctgtgctttccagaagggatgtaggccgggcagcggagccccaagctgcactcctggtggagaagggcaggcagggctgagcctccggagccacgcacccttcctgcggggaagagaaacttgagcccaagcagctgtgactttgtccaaggttgtctgtggggttggctgcgtgggagggagaacccgaaaccctcgggtctctccctccctccctccttccttccctcccttcctccctccctcctttcttccttccctccctccctcccttcatccctccctccctccttccctccctccctccttccttccctcccttccctccttccttccctccctccttccttccctccctccccccctccctcctttccttcctccctccttccttccctcccttcccccctccctcctttccttcctccctccttccttccctcccttcccccctccctcctttcttccttccctccctccctctaagaatagctgcaccaggctcctggtccttcatcttccattgactccagaaagtgtcgccagtcaccactgatctctctgtaaacagttggccgttgtgtccagaaaaagggcctgagcaggaatccactgaaaccattgaagaggagtggggaagggccctggatgggactcatcttggaaagacacctataattgatgggaaagacatttagacatattttcttagttgaaagtatgtgtaatttttcttttaacctgatttccatgtaattttagatttcagaaaggttgcaagaccagtgtggagaacgcccatctgcccttggcctccgttgcccaaatgccaacctcctgccatgttggctgtgtccctcctgcctcctgccctgccccaggtctccgtctttcactcccacgtttgtttctgaactgttgggagtaagcagctgacgtggtgcctctcacaggcgtatttcctaaaagcaagcacgtttctttcagaatctctgcagtgcagtcaccagaatcagggagttaatgatcacacacgagagatctttttcagatctcaccaactggcccaatcacggtctctagaaaaagaagtctgaggttgtgcgtgcatttgaccgtctctgtcacctggagcttcctctgagttgtctccctgacgtttttgaggggtggggccgctgctccgtggcactggcctctctgtggtgtgccccatggtctaggcatctgcagtcactcatggtcgcaccaaggacctgcacaccctgaaggctgtgctttccgccccaggcaccctactgggagcacgtgctgcccgcctgcccccagacggcgatgccctctttgctggcacggctggaacccaccactcctgcggctggtgcctgtcagccagccagggtggccgccagtgggctctggcacatctgaaatgtcccatagagaatgcccaccctcccagctggggttgtttggtgcagtgatgaggtcttggcctgccctcctccggccacctcgcatcctgccttgaccgtttcttctgcaccctcagggtcccacaccattctgtgcagggctagggtggactgggcaaggatgggccgagcacccctaggaagggtcccggcttggtcgttcccagtctggggagctggtgtgcagcacatggggcagagggccctgagggccctggggtgcgtgggtggctatggtttgatgcccttcagctcctcaccgtgcctggctggggcatgtgcatttgcagaccctgttctgaccatgggctgctcaggggtcccgggcaggctgtggtctctgcagtggcctgtgccgagttccttgtgttgctgtgacagtcccccaggtcaggtgattcatgaacacagaaacttctcagagttcttgaggctgaaagtcttagaccaaggcctgggcaggtttggggtctggcgagggccctaggttccctgccgtgtcctcccatggagggtgggagggcgacagctctgctgctgaggcctgggggtagggactttcatccccttccacacctcaccacctcctacgggccccacctcctaccggccccgcctcctaccggccccccgcctcctaccgcccccacctcctaccgaccctatcttctaacaccgtcacatgggccatcgggcctcaacctgccagggagcctcaagtcctcctccccaccaattcccttgctcatgctctcgggcagctgctaggattaccccctggttcgaagcctgggctcagccccatggaggggtcgccggcccagccttcctgaaagactcaggaggggctcatttacctagagagcctgtgggcggcgtcctcaacagggaacagtgggaagtcctctgtgtccctccgaaatggcggattaagcagcaaggctaggaggtgccaccccgacttttaagagtgagaattttgcccacatttggctgaatgagagattttcaacgccagagggaggtacccttgccctgggctgaacagctcacttgccgaggctttcaggggctttgtcttcaatgatgatgtgtgtgggggatagcgtatgccctggagctagcgtgtgttctggggatagcttgtgtcctagggatagcttgtgttctggggatagcttgcgcattggggctagcatgtgtcctgggactagcgtgcaccctgggaaatgcccctttctttggaacacagatgtgtggaaggaaggagagtgtgtgagaagtatcacccttagccatggtttagaggtgacagctggtggggaccagagccctccgtgcaagatctgtagttggccttctgtgcttgcttttagttccttctaagctgactctgaattgtttttccctcactaggagatggaaatccaagagaaaacagcccattcctcaacaatgtcgaggtggaacaagagagcttctttgaagggaagaacatggcacttttcgaggtaactttactttttagaagaagaaggtgccagggccgttgctttgatgtggaaaagtaaaggagcccctgggggcccccaggccggggcctcccacaggactggacaccacgtggaaggaactggggcctccctgtcctgaaggctgtggcgggggcccagtcccgcacttgagctgggacgtgctcctcggctggtgccttctgggctccttcctggatctagggtgctccggccccacgggaacccctctgagctgctgagtgctggacaccctggggtccctgccatgggtgggtggccccactcagtgaggcctggagccctggcctcggactcagacctgccacacaggtgtccaggcctctctggcttgcttcagacccaggggctgaggacccggggagggcctgagctccacaccctgaacacggggagggaggtcggggggcccacggcgaggtgcgggccgcctgtgaccatgtccacgccgcgcaggaggagatggacagtaaccccatggtgtcctcgctgctcaacaagctggccaactacaccaacctgagccagggcgtggtggagcacgaggaggacgaggagagccggcggcgggaggccaaggtactgccaccctgcccgtgcccgcccagtccccgccccgtgtgtcccggcagggttagatcacgccggcaaggcagttgcttgtcagaagagctgccctgagctctggtatcatggccacgtccagccctttcttcctgggagggctcgatggtgcctgccctgcagctcctgtccaggcctcttccctctccaccgtccggggaagcgtgacacccccatgcatctgggtggccgggttccctgtcgagaaatgaacttggggtgttttgttcgttctgcgggagcggccccatcccctgctgtggagaggagtctgaatggtgccgagaggccgggacgtggccccttccagagggtgctgtggcctcggtgctcccaggggccgccctccttttcatttcctgtccaggacacttagcctggtagcattttccctgcagttttattccctgaggatttgtttccaggaatccgtcctaggaaacgaggggggtgcagtggggaaaggtttcccttgagtggtttctgtgggtgacgaggtgtggaaaccccttgagcatcctcgggagggttctgccgtcctgtacagacgggttgcctgagagccaccctgaggcctgaggccctgaggtgacgctcacaggcgagaaagaccctggacccgtgttgggggagatcttaggtcctcgctgtgggggtgcggcgggtggctcagtttcttctcaactccctctgctttttaaatcttctttcaaatatgtctgtgttgctctagaataagatacaaaaaacaaaaaaaaataatccaccggaagaaaccaagcagcgcaggccctgctctgaagccgggcgacggcctcccccagtcttgacacaaaattgtcatttcccgagtcagccccgagcctgtgcccccctccttcggcagacagctaagggcatacgttggctttttagggtgatttttaaattcccctattattttccttaactttctaactctaaaaataccatcaggagatccctatcttctcagaagggagggttttgtagtgccaggtagaggccagtgagcaggaaggaaggaggtgctgagccaggcgcccccaggtccagggagggtgggcccccctgctgcgtgtgacctccaccaagtggggcgtccgtcggccggctccttgccctcccctgcatcctcccagcctgggctctgcgctttgcgtcgacgccacccctgagtgcctcctgccagcgtccagtgttctgctgacctgggtcccacacagcagtcgggaagtcaggccgctcaagatgtctctttccttccttttactgtaaacacagcggaattaatactgcatttccaaaatacttgaagacatttggttttgtttttgagaagcctcaatctggggttgaagtaaccggagacgagggacgtgaccgtgagaccaccttggggtggggcctggcctgatgagggccctcagccctggctgttgtcccaggacagggtagtggcctcttcagaagctgcatctctggacctctttctggttcccctgctgggtccttcccggctcggggagcttgtggccgccccccctgtctgtagctcggccagcccttggggtgggaccatcactgctgcacgtggacgctgcggaattgggtgttgccaggctcagcactcagcacctttctgcacgtggatggtgtggaactgggcattgccgggctcagcactcagcacctttctgcacgtggacgctgcggaactgggtattgccgtgccgcacgtggacgccgcggaattgggtggtggtgtgccgggctcagcactcagtacctttccgcacgtggacgctgtggaactgggtattgccgggctcagcactcagcacctttctggggtttcacgcatgctgggcactaccttgaggcctcatgggctcaggctggtactctggcaccaaaactcaggagccacaggccttccctgtctgtccgcctgtgtgctggagtttgtgtcctagggagatgttggctttctccagggagcaggtgtcttcccacgggcctggtccgagtgctccgggaacaggctttagctccagctcggctgggctcaggcaccactggcctggacatccagctccaacccctctgcctgatggagcccagcctgccatgaggtgcccatagagagcacaccccagcttctctcaccctacttggtactgagacatgactgaaacgtccaggcaggtgtgtttgttcatggcacactgtgggccagggcccaggaggttcccacctggaaggctctccctggccctccctggcaaccctacccccaggctggtggctctcaggcctctgtccctcagggacaatatgcaggtaccccaggctgatgctgcctgcgtttcagtcgtggagggaccagggcccgtgaccccagcaggcctgttgtttgacggtggcgggtttcagttggcagtgactccttcggctcccttaggggaccgtggctcggcccctggggtggaagggcaggggccgcccctggtcctctttgccaggctcagaggctcatccccagcagacctgctcccattgaggagccttttcaagggcccaggcatctccagcctcccgcgcctgaaattgggtcaggttgagccttaaaagttgcctttaggcgcgaaccaagaggccaaggccggccatgcccttccgtgaggagtcaggatcccccgcctttggccgagaaccagcttctgactcgcctgtcacggggctgcgggatttgaggctgagcctggagggcaggggcccctgtgtggaccgcgtctctgcctggagctctgcctgtcggctcctgcgttagctgaagcctcgctgggaagtcacagcaacaattgtccctggagccttgctgtcacctctgccctgggctctcagttttatccaatgagaatgtcccaaagccggttctccaccatccgccaccgcttctctcgtttgcaccaagaacaaagcatacccagatttggagggcccagcagcggcccccagccccgtcaccctctcctctccagggcccccgtcagaagcaagtcgctcccctgttgcttcccacctagggctcagggaaccaagtgaatcccccaggctctcagatccagggcttcccacgctccgagctgctcttacattatttttcccagggtcctaaagttggtggagccctagagccctgccctggccccagccttggccagtctgtgggaggcgttccggcacggtgaccccagaagccaccctgtttgcttttgtgatgtggtgttcagcgtgctctccctgggagctgcccctcacctggtcccctgttcccatcctccccaggcctgggctgtgtgaaccccaggatcgaagccccgcacggggcctgttctgatccacattgtggccactgttcacaggaagtgtcttcaaataaaaccttcccccttttccgtattgaccttgagacgttttcctgttaaaacgtcaccttgtgctggcaccagccgtcctccaggtctgagccacgtgcctctgctcatggcgggagtggggctgagcaggcagtggggatggagctgaaacttctaccccagcctggcccgtcccgagtggagctggggagctgcctggcaggcgctggcctgctcctggctgtgctgctgacccttgcccatgtgggttttctcagggcacagggtgtgtccccctctctggcacaggtgtctgaagcaggctgcctgctccgtgctggggcaggcggggtggcccccacgtggatatctgaacctttgctgttatctcgtggtgacctccgtgcccggttaagatgtgtcagtttctgcccagggccgacgctgagctgtggattttttttttttttttttttagctttatgggcagcagccgtctcatccctccgctggctctgcttccattcctgaagtctcaggctctcccagggtgtcagatctcaggccctgagccatccagggaacggagccgggggccctctcgttctccctcttgttttttccataacttttccagtgtaacaggtttccctccgtcggggaggcacagcggagcagctgcatcttggttctctgccaaccatgtggttctgctcccctcccctaagccctcattccgggatggtcaggggtcctgtcctgggcctctctctgaacctccatctgttctgggaaggactcctgccccctcctgcccccacggccgctttgcctgcccagggcctgagtgcagcctggggagggggctccctctgggtgtggggtacgagcccctgggacacgctatgctctgtcgcaggctccgcgcatgggcaccttcatcggcgtctacctgccgtgcctgcagaacatcctgggcgtcatcctcttcctgcgcctgacgtggatcgtgggggtggctggtgtcctggagtccttcctcatcgtggccatgtgctgcacatgtgtgagtctcccccggccaggtgtggctgtgccttcgggcggtggcagctggacagtagggctctccccagatgccgtctcccctggccgctgtggttgtgccttcgggcggtggcagccggacagtagggccctccccagacgcccgtgtagacgtcgttcagcgccgtctcctccacgagagccgggcagctgcggggatgagatgccacactgtccggggttagtgctggcgtgttgactggcgtgctggcacctcatttacccgtgtctgcggacaggcatctcagccagtggtgggtgtcatggggcggcacccgggggctgaggcttccaagggaagggacaccctgtgttttgatgacatcacctccagtttggaaggaccttgggcactttcaggggtcgctgtcataggggaaggggtgggaaccaggacacgcatgcctggtgcccgggagcctccaggtcctgtttcctagccactccattgagatggagagccctggagttgggggctggcattcggcgggagccgggtcatagaccctgacttgggagtgttgcgatgccggcaggctgttggaaaactctcctcagatggctgcctgtctttttgcagacaatgctgaccgccatttccatgagtgcgatcgctaccaacggtgtggtcccaggtaaggggtgcccgccagccgcggccctgagtcctgttagaggagtctgtgttttgccgcacggcaaccgcgaggaggccgcttggcgaggccgggccgggggctgcctgggggtctcagccgggccttctgcgtgttctccactggctcctctggcgtttgagccgtgaggtcacggctgtttggttttcttccccattttgctgcgtggtgaccgtctcttgccagggtaggcagtgcccaccaggcagcgggctggggagggggaggcacgggcgattccagtggctcctgtagcccagcgtgtgccataggctgagttcttggaacctgtatctcacgagggaaggtgaagacaaaacactgccctgaccttgttaattagtaataagttaattacaatacataataactaaataactagtgaaccgagatgatattaattagtaataagttaattacaatacgtaataactagtaaactgagatgatactgttaattagtaataaacgaattacgatacgaaataactagtgaacggagacgctgccacgtctgcttctgagtgcatgtgtgctgcgcgtgttaacggctgggcttgctcagcaccaggtcctcacgcagctggtccccatccccacgggggcatcgcttggtgctcagcggacttccccggcctcaggagagcacgagggccttcaccaggggtctccctccgcagccaagggaccagtctctgcttcacgatggccgcgtccattaggaccccttccacatgccacacgcactgctcagagcagggagagctgtgttctccaggcagccctggggttgcgcccggctttcccgccagtgatagcgtgcgtggttcacagtacacgagacgactcctgaacatcctagtttctcttttgcctttttcataagcaaaacttagtggaagtgggggctggggctgccactgatgtacgcgggactttttctgggacctgctggggcctcctgctccccagagagccttatccctgatctcacctggtcctcatgtccatgagagcgcgtgctcttggtgtggaacgtgtgccgagcctcgggaggggagagttcaccgtggaagcgtctccatgtgctgctttgcgggtggacgagggtctacacgctgccttcgcagagacaggccctcctttgcccgtgaatggcagcgcagaccgcacctcgggtccgagtccaagtgcgcccctgacccgcggctgccgcctttgtctccgcagctggcgggtcctactacatgatatcgcgctcgctgggacccgagtttggaggcgctgtcggcctctgcttctacctgggcacgacgtttgcaggggccatgtatattttggggaccatcgagatttttctggtaagtgtgctgctttggaagggttcccaccccacagtctgtggcaggatgccaaggggccctgcctgacccactctgtggcacacacagcacactgagccatcctgaccccactgccctggctgcccctgggctctcctgggctctggccatggcggaagccactgggcagcgtccactcagcagcgacctgtgtcccccttgagcaccattgctgccctccgtgaggcgtgcctggcatgagctgggtagacatctggactgtagatctgagccccgcgtaggtgcagtcctgcagtcggagctgttttaggagcagggctggaactcggcttagaagaaccttttgccaggatcccagcctcttctctgcctgatctgggcacttggccgagggtcccagagcccagcaatgtacaaccaggtgatgtcatcaccttctcaaaacaggcatgctcaaagcatgtcccacatcacctgagcacagctgagagctgtggcctgagttccttggtcctcgtggggacgggaaccgcccttctctggccgacgggtgctgtccttcctgctgaggttctgaaacccgctgtccctgcagggcttcagagacgctcacctgagcccctgtccccagtctttctgcccctccctctgctgccagacctggttcctggcctcctgggttcctgaagagagccacatggccaagaaggttctgaaacctttcagtggggtcgcacccacacccgtcccaacccgagtcccctggccatgtccctccatctttccacctgccccgggtgccgtggctgccgcactcccaggatcccctttggtgggggtgggtgccatgccctccatgcctgctgcaccccagtcctgtcctggtcttgagggagctgagcagcactgtctcacgtctccgtcccttcccttgaatctgggcagaacagaggttgccccccgccggcgtggtcagaccctgtgtgtgtccaggacgtccagccggggtgggccgagctctctgggcagcagtcacattcctcttagcagaaggtgtttcttttgagtgcggacatgcggatgccccgggtcctgaagttgctttactctaaggctcccgggtggttcctgggaaacgttcaggcccctggctgtccatggcctgtgcgctgacccccgcgggctccgtccctcgcctgtgcgctgacccccgcgggctccgtccctcgcctgtgcgctgacccccgcgggctccgtcccttgcctgtgcgctgacccccgcgggctccgtccagcacggatgcgtcccgatggccccggcacctgttgggaggaggcccctgtgtggcgctgggggcttgcgggagggacgggcactggggagttgtgtccggggacggcctcccgaccggccttgttcccacagacgtacatctccccgggtgcggccatcttccaggcggaggctgcaggtggcgaggcggccgccatgctgcacaacatgcgtgtgtacggcacgtgcacgctcgtgctcatggccctggtggtcttcgtgggcgtcaagtatgtcaacaagctggcgctggtcttcctggcctgcgtcgtgctgtccatcctggccatctatgccggcgtcatcaagtctgccttcgaccccccggacatcccgtgagtctcggggcctctgagccgtgggtgggtgtggggctggggccaggtcccatgggctctgcccgcctctcgtccatcatccttgacgccgagctccccgcaaggggtgggctgggtgtgaccgtggcgggaacccccgtgggctcgttctggggattacaggaaacccaacggtgaggtgggccgaggtaccctcgtggccgggtctgagcatgaagaccctcctcagtggcaggagggctggtgaggggtctggcaggtttcaggggtggccggtggccctgagcacggtcaggtgcagtgagcgtcatgggtgtggccctggctgctgctggggcctgggtgtcttctccctcccagaggtgcttggaggggctcttttcttgtccttttggaggagcagctgggaggcggcccagggtcctggaacatgggagtggccaccagagcccgcagggagcaggtccagaaagggccagcagccaagccccttgaggctcccgcggttttgccgtctctgcgtggagggagcccctgaaggaacagcctcatagaggcctcaaaacagagggaggcagaacagctgcaaccccacaagcccgttttagggaagcacagctgccctccccctcggggacccgtcctgagaccccctgccgatgcttgacgctacggccctgtgtagactgttttccacgtacaggcctggcttatacgtcgggggcggcactcctgtgctcttggccgttggcacgtggcacgagggtggcttgaactcagacactgagattgtgacagctgacccggccaggacgccgccgagggcctcggggagggagcggctgcagcgtggctgtgctggcgcggggggaggttgctgggttccacctcactactcggcaccgcgcggtggaaaacgtgtgaattgtttacgtctagaacgcttcatttagcacgtttggaccacgggtggccgaaccatggatgaggggacggctgtacagtacagcgttcctgctgcagcctggcctggtccccggtccctggtccccagtccccggtccccagtgtgatccctggcccttgcattcctgctgcagcctggcctgggcccggtccctggcgtgatctgtggccttcctgtcttgggaggtgcagggtgccaggagccactcgcgggcgacaccatgggtgcccgttgggggagctgggtggggcagtaaaagccacttcggtggcagcacacgtgccgtgcctccctgtcccgcccagggtctgcctcctggggaaccgcacgctgtcacggcgcagcttcgatgcctgcgtcaaggcctacggcatccacaacaactcagccacctccgcgctctggggcctcttctgcaacggctcccagcccagcgccgcctgtgacgagtacttcatccagaacaacgtcaccgaaatccagggcatcccgggcgcggccagtggtgtcttcctgggtgaggctcacagggctgcagctggagctggggggtggcgggggcagcaggcgctggccctggtggctgctctcgccttagagtcactctcagggccccaattcctcctgcctggccgagccccttcccagctgctgctgatgagcctgggggtccctgtacacacccctggcagagccatagaagccaaacacggtgtggcagggagacagcctccgtcatggtcagcaagctggtcttaatgctatggatttattttcatgacctcctggcagcatgtatggggaacttgctgtgttaagaagggagtggtagctgggcggtaacttccccctctgtgtatccttctctgatgagaggctgcctcggacctgccccagggggttgagggaaaaggacccctggcagggtacacgagacctgctccagaacccgagacgggaagcccggactttccagaacccgagacgggaagcccaggctttccagaacccaagacaggaagcccaggctttccagagccctagagaggaagcccaggctttccagaaccctagagaggaagcccggactttccagaacccgagacgggaagcctggacttcccagaacccgagatggggaagcccggactttccagaaccctagagaggaagcccaggctttccagaacccaagacgggaagcctggactttccagaacctgagacgggaagcccaggctttccagaacctgagatgggaagcccggactttccagaaccctagagaggaagcccaggctttccagaacccgagacgggaagcccaggctttccagaacccgagacgggaagcccaggctttccagaacccgagacgggaagcctggactttccagaacccgagacgggaagcccaggctttccagaacccaagacgggaagcctggactttccagaacctgagacgggaagcccaggctttccagaacccaagacgggaagcctggactttccagaacctgagatgggaagcccaggctttccagaacccgagatgggaagcccggactttccagaaccctagagaggaagcccaggctttccagaacccgagacggggaagcccggactttccagaaccctagagaggaagcccaggctttccagaaccctagagaggaagcccggactttccagaacccgagacaggaagcccggactttccagaacctgagacgggaagcccggacttccccagaacccgagacggggaagcccggactttccagaaccctagagaggaagcccaggctttccagaacccaagatgggaagcccaggctttccagaacccgagacgggaagcctggactttccagaacccgagacgggaagcctggactttccagaacccgagacgggaagcccggactttccagaaccctagagaggaagcccaggctttccagaacccgagacggggaagcccggactttccagaaccctagagaggaagcccaggctttccagaaccctagagaggaagcccggactttccagaacccgagacgggaagcccggactttccagaacctgagacgggaagcccggacttccccagaacccgagacggggaagcccggactttccagaaccctagagaggaagcccaggctttccagaacccaagatgggaagcccaggctttccagaacccgagacgggaagcctggactttccagaacccgagacgggaagcccaggctttccaggagtatgttgttccccacatgaggcttctctttagtgctgaccttccctccgtagacgcagacaggcagctttcccagaggtaccatctcgaaagcgtgtttgaattggagcctgcttgcggcgcacaagctgtgacccttcccctccggccaccagtggcacctgccggggagtgggcggccccatggcgggggcactgcacagaaggtgccagaaacccatgggatcttccttgcccggcagagaacctgtggagtacgtacgcgcacgcgggggcgtttgtggagaagaaaggtgtgccctcggtgcccgtggcagaggagagccgtgccagcgcactgccctacgtgctcaccgacatcgcggcctccttcaccctgctggttggcatctacttcccttccgtgaccggtgagcccgctgctccaggcttccccttctctttctttctctccctctcttttttgaggcaaggtcttgctctgtcacccaggctggagggcagtggtgtgatcacggctcactgcagcctcaactcctagacacaaatattcctcccacctgagtctcccaagcagctgggaccccaggcacccagtaccacgcccggctaatatctgtattttttgtagaggggggcagccgggaccccaggcacacggtaccacgcccggttaatgtctgtattttttgtagacgggggtctccccacgttgctcaggctggtctcaaactcctgagctcaagccatcctcagcctcccaaagtgctgggattacagacgtcttgagccaccacgcctggcttccttctttctcttcctttgtctttgtccatttctctgtctctgtcattctctcctccggcactctttctctctccccctacccttttccctctctctctgtctgtctctctctctctctctgtctccctcttcttccctccctccctctctctctctctgtctgtctgtctgtctctctctctgtctctctctctgtagtgtgttccttcctgcccctgcttatcttgcctgtttggctcaggggaagtggctgaggtctctgccctgcgtcctgatggatttgtgagaagcctgtctgctgctctcccaggcagccctgtgtcaggagaagctgttgtagggttgctgggaacacctggcaggctgttaggagacacctaggagtggcctcagtgtgagctcagaggccggggacctcggccctctgtgtcctcctcaaacagtgggccttgttccggcggtgggtggggcccttggttgttccccagggggtggggccaggccccgtgctcttcgagtcgcacacacacgcccccggctgtctccactcggccttcttgtcgggacgcccctgacaggcgctggctgcttgtgcagcctgcagctgcccttctggtcccttctggtccctcccacgtctgctcccggacttcatctcagcacatccgaaagccctggagcccagggtcagctgcagggcctggccacagcgctggcttctcgtgtttcccttgcctccactgaaggtgggcccgtcttgctatggagggggtgatctgccgggggtcctctccctgtacctccgctccagcctcccccgtccgtctgagtgcgctccgcgccgtgggtggagggcgtgggggcagagcctctgcgtggctcctggtgtctccgcgccgtgggtggagggcgtgggggcagagcctctgcgtggctcctggtgtctccgcgccgcgggtggagggcgtgggggtagagcctctgcgtggctccgggtgtctctgagccgcgggtggagggcgtgggggcagagcctctgcgtggctccgggtgtctccgcggcactggattgtgggctctgctgcctcccaggccaccccgagcaatgggtgcttcaggctgcgccttggatgggaccgagccaggcgtgaagtggcccccaccgacccggcttcccagagctttgtaggagccgattgtgtggaaacatccccggccgtggctccctagagcaaggtggtgccacagcgggaggggtcgcagcgtctgctggcctggctggctgggctgagtcgttctaggatctcattcccaaagtccttaggtcctgggggcctgtgagccattgctcagcaccgtctctgggctgacccttggccatgggattaacacaggctccagagaagccctgggtgtggggggcgtgggggtcagtgacggggtcggttctcgtcctcggatccaggggagcagtagacgtgggtgctcatccgcgtgcctgggcccgcatcccctcagccgcagtattgcagcgtgggctggcggagcttggactgcagcctcggctgcagctcacgctcggggtctccccagagaccgcctttccagctttctgggcaggggctgccatcacatggcactgactcctcagatgggtctttgcagcattttccatgttcacaggtatcatggcgggttcaaaccggtccggggacctcaaggatgcacagaagtccatccccacggggaccatcctggccatagtgacgacgtctttcatctgtatccttggaggggtgcaggcgagggttccagcctctgcctggggggaggcccccatgccctccccggctcagcatcataccctcggccaccagcatgtgacttcccaggttaggctgtgctctcaccacgtcatcctccctgggagacggggcaagggctgctgtcaggaccctggcttcttcaccactgtgtgatgcgatcgtagagaaaacagaagcagtcaccctgccgcgtgtggacagtgatgcgcagcggtgtgtggggtgtgccgccggcaggctgggcccgcggggcctctggcttctcaatcccaaggctgcctctttccagccgagcattgtcccctcagcatggtcccctgccaatccctggcggtcaagcaccaggccaggtgtgtgtccaccaccccagggccccgttctgtggcgctggacagagccccaggagggtgcgctgaggacacgggggacaggacgtgcccgggatgggatgggatgcagaacggtccccgcccacctggatcctgcggcccgctggccagtgcatctccccacccaccccaccccaccccaccccaccccccgtacctgaggaccctgcacccacggacctgcctttccttgacgagggctgtggatctctcctgcattgtgctgtttggggcctgcattgaaggcgtggtcttacgagataagtacgtttccacctgcagttttcgtgcaaagcctgtagtcttcaagggttttcctgaggatgaattcggctttgaaattacatcgccctaggacttcatgtccgcgtgcagagctgaaggcgtcctggtcccagggttgggatcccttggtctgatgtgtcgtctcttccgctggagcctagggcctggggaaccgttcagagccaactccaagccctgatgcggctgggggcgcaggcccttcctggggaggccacaggggtgtggacgggtgaggcttggccctgggagatccctcagccctgctggcaagtggagaagtagtggggtcccaggcaggtcatcactgaccctgcatcctcatggggtgtgcgtgtctggcagccccaaggccccgggggtcctgggtggtccctgactgaagctgatgccaggctgggtcttccctgctcccaagagcgaccctgaggtgagcaggaccccctcccccgctgaagaccctccagagcattctggccatgctgggcagagcctggtggaggtttcagccaacggggactggaggccgggcctcagctttccaaggagtcgcccccactgcactgggcccctcgctctgggtgggagaagacattttgtctgactcaggctcacttctgaaagccgcccgcccgcctgcccgcctgcctgcaggttcggggaggccctgcaggggaacctggtcatcggcatgctggcctggccctccccctgggtcatcgtcatcggctccttcttctccacctgcggtgccggcctgcagagcctcacgggggcaccgcgcctactgcaggccattgcccgtgacggcatcgtccccttcctgcaggtgagtcccgcaccctcgtcggggggaccctggaaggtcagggtcgggggctctcctcccctgcgggatcctcacagtgccgtgtgtgggacgcatgcccgcggcttggaccccatggtggtcattctgcccctggccactgcacagagcatgggagtggtgggaggtgggtggtgggcagaggcaattctagccctcctgcctgcaggtccctccgagctcggccccgggtgtgtcaggagcggctgtgagggcccacagccacgtgtccagaggtgcctggtctgttgtctggtcagaagccctctgcctgcctgccacatctttctctgtgtggctgagctcttcagcccgtgggaggtggcgtcaccagccacctgcagccagtgtgtgtggctgctctgaggattgcacggacgcccgcatgggtcctgtccgtgtgctgtgcccagagctgccgattgtggctcctcctgctacctgggcccaggggcagctgtgggaaggtcgtggatggcagagccatccttgcccgtcgctggtccctcggcagggtgccgacccgcagggcctttgtgtggttgcatcttcagtcccagccgggcctagggcatggtgtccaggaaggggacaggcacacaggccccgtgggcctcagcttctgggaggtgagggtggcctgatgagaaaggtcaccacagggtctggggaaccgcgagtgccctggagacgctggtcctgtgttgtgtggtcggggaaactgaggcgggggggcaggctggggccacacaggttgcaggcaagccgggcgtaggcacagctctgaagcctcctgggctgcagccctttgtcagggcttcttcccaggccagccgcgtgatgtcccggggacctactgtgaaaggcgtttctgctggtctgtgtctttaagattcatctgggctagacctgaccagcctgcagcttctctcctaaaagggtggtgtcatctgccccatcttcctgcccttctccctgcaggtgtttggccacgggaaggccaacggggagcccacgtgggcgctgctgctgacagtcctcatctgcgagactggcatcctcatcgcctctctggacagcgtggccccgatcctctccatgtgagcccccacaggacggggacctggggatgggtgtatgggcctggagcgtggggcagtgtggatgggaggtcctgctcaggacaagcagtagacaggcatggccagctgtgggcagtcaggatcctgccgggaagggagttgcgccggggaagacaagtacacaggcctccaggcagccgcccgctggggtcagccagggacagtgtggctggacagacggctgctggggaagggacgatggcccatctcttgatggaccaggtggtcacaggatggctggaacctgagggggcctgattcggaatcagtctgagtcagctcacgtgcagagacagacatggggagacaaggcgcaggtgggagggacagtgacaagggtggtctcccaggtggcagtgactgggggctcaggggggcccagtgggcccgtatcagtggccggccgtccctgcaggttcttcctcatgtgctacctgttcgtgaacctggcctgcgccgtgcagaccctgctacgtacccccaactggcgtccacgcttcaagttctaccactggtgaggccactcagcacgggcgtgaggagccccacaggctgggacactgggtgcctctgccactggtgaggccgctcagcacaggcgtcaggagccccacaggctgggacactgggtgcctctacaaggccagctgctctgggcctgaagaccccagcgcgtccttgactgttcctttgcggagtaagcccctgcgcagctgatgagactgcacctgaggaaggcctctggttacgaggatgcccaggtgtctgcatgtgccttgtacctcccgtggtcagcccagccttcccaggcttggggcgtagcccatcagggctgtgggtcttcttaactcccctccccaggaatcaggcgctgggtggacgcttcagccccttgttgcatgcacagccgaggtgctgtgtgcacgctgggagctggagctatgtactgggttttggagtgacagctcccacaggggcccagggagccacgtcacccctcagaggtggttgagtacagccatggtcgtcaggcgtcagtgactgttttcctagtgttaacagagagttttactgagggaggggcagtgtccgtgtggtggtggctgaggtgtgggggctgcatggcgttgggccgccccgagccacttgccccgcccccaggaccctgtcctttctgggtatgagcctgtgcctggcgctgatgttcatctgctcctggtactacgcgctgtccgccatgctcatcgctggctgcatctacaagtacatcgagtaccgcgggtaagcgctgtcagccccccttacagacccggcgcacgggagggcgggcccctctcatgctatgcctggggcagctccctggaggggcctccctggggcttgagcgtcgtgtgccctcacaggggcagctgggagcacgtccaggtgggctgtgttgtgaaagctggggtttccctcccacttccagccaggccgaggtgcctgcacttgtggacagggtctccagcctggagctctgtctcgtgccgtcctcagcaggcggtgagcccacggctgactattcctgctacgtgtctcgcgaggtgtccccaggttgtgtctgtactcactcggcagccacaggcgtccttccccgtgccccagcacccaccctccctccacctgcacccgcctcgtgcccggggtccagccacttccctgtcatgggcctcctgtcccccgtcctgtgaggaaggcacctcacgcatgctggacgtagacctcgttccctccacagccacagcaccctctgacccggtggctcctaggacgggctcccttcagggcaagggtgggcatggaggcctccctcctcatccagggacttttcctgggggtcctgtttgccccaactcacctgcccccagaagtcccctttcccaggtgggagaggagcctccaggtacgcggctggacaaaccccgacttcctttcccacagggccgagaaggagtggggcgatggcatccgtggcctatccctgaacgccgcccgctacgccctgctgcgcgtggagcacggtcccccccacaccaagaactggaggtgagcaccgcccatgccccgtggtcctcagacgcacagaagagctgtttctgaggtcggcctttgagtggggacctttgagtctcaggggcctctcaccttcagccgctcaggcaaggtctggggtgtgaacactgcctggtgcagagcggatggcgcagctgggggccgggggtgtccctgctgcagggtgggggtgtggggagccggcccctctgccagcacagccctgggcttggggtgggagagggtggctcctgctgaagcaaaggccatctttgggaagcctctgcccctcagggcctcggcgggggcctcaggtgtgtgccccgggccattgtcccctcaggggcctcggcgggggcctcgggtgtgccccgggccattgtcccctcagggcctcggtgggggcttcaggtgtgtgtcctgggccattgtctcacctgtctagcatgtcacctgtcccacctgtctaacctacctgttctcctgtcctgcctggctagtgcccacctgtccatcggccctgcctgtcccacctggcttctgtggcctgtctcacctgtcacctgttcaacttaccccacgtgtgtcacgtttccccatcccatctgtcacctgccccttttgtcccctgtcccgcctgtcatgtatctcccgtcccacctgtgtcgtgtgccccgcccgtcccatctgccctgcctgttgatgggccgtgccctggtaagcgttgccgtggtaacagccgccccaccctggctgcaggccccaggtgctggtgatgctgaacctggacgcggagcaggccgtgaagcacccccgcctgctgtccttcacgtcgcagctgaaggccggcaagggcctgaccatcgtgggctcggtgctggaggggacgtacctggacaagcacatggaggctcagcgggccgaggaggtgggccgggcggggtctgggggccaggcctctttcccaccccagctgcacaggaaacgtgccctggcatgtcctcatcgcagcgtgtcaacacggtgctgtgcgtggcgctgctgtgttttagccgtggcggtggctttgagctcagagcagcgcgctaaggcctgggagcaccagccgcaccccgggaagcttgggaggtgtgagggccattagctttccaagggcgaaccctgggaccgcctcctcccgccatgggtgagccccgtccagagccgtaatcatggttctgctgcaagctcagtctcccgctgttcaggctcactgggggctgcataagtgtgatgcccgtgtgctgggggctcactgggggctgcataagtgtgatgcccgtgtgctgggggctcactgggggctgcataagtgtgatgcccgtgtgctgggggctcactgggggctcactgggggctgcataagtgtgatgcccgtgtgctgggggctcactgggggctgcataagtgtgatgcccgtgtgctgggggctcactgggggctcactgggggctgcataagtgtgatgcccgtgtgctgggggctcactgggggctgcataagtgtgatgcccgtgtgctgggggctcactgggggctgcataagtgtgatgcccgtgtgctgggggctcactgggggctcactgggggctgcataagtgtgatgcccgtgtgctgggggctcactgggggctgcataagtgtgatgcccgtgtgctgggggctcactgggggctcactgggggctgcataagtgtgataccgtgtgctgggggctcactgggggctgcataagtgtgatgcccgtgtgctgggggctcactgggggctcactgggggctgcataagtgtgataccgtgtgctgggggctcactgggggctgcataagtgtgatgccagtgtgctgggggctcactgggggctcactgggggctgcataagtgtgatgcccgtgtgctgggggctcactgggggctcactgggggctgcataagtgtgatgccgtgtgctgggggctcactggggctgcataagtgtgatgcccgtgtgctgggggctcactgggggctcactgggggctgcataagtgtgatgcccgtgtgctgggggctcactgggggctcactgggggctgcataagtgtgatgcccgtgtgctgggggctcactgggggctgcataagtgtgatgccgtgtgctgggggctcactgggggctgcataagtgtgatgccagtgtgctgggggctcactgggggctcactgggggctgcataagtgtgatgcccgtgtgctgggggctcactggggctgcataagtgtgatgcccgtgtgctgggggctcactgggggctcactgggggctgcataagtgtgatgcccgtgtgctgggggctcactgggggctgcataagtgtgatgccgtgtgctgggggctcactgggggctcactgggggctgcataagtgtgatgcccgtgtgctgggggctcactgggggctgcataagtgtgatgcccgtgtgctgggggctcactgggggctcactgggggctgcataagtgtgataccgtgtgctgggggctcactggggctgcataagtgtgatgcccgtgtgctgggggctcactgggggctgcataagtgtgatgcccgtgtgctgggggctcactgggggctgcataagtgtgatgcccgtgtgctgggggctcactgggggctgcataagtgtgatgcccgtgtgctgggggctcactgggggctgcataagtgtgatgccgtgtgctgggggctcactggggctgcataagtgtgatgccgtgtgctgggggctcactgggggctgcataagtgtgatgcccgtgtgctgggggctcactggggctgcataagtgtgatgcccgtgtgctgggggctcactgggggctgcataagtgtgatgcccgtgtgctgggggctcactgggggctgcataagtgtgatgcccgtgtgctgggggctcactgggggctgcataagtgtgatgccgtgtgctgggggctcactggggctgcataagtgtgatgccgtgtgctgggggctcactgggggctgcataagtgtgatgcccgtgtgctgggggctcactggggctgcataagtgtgatgcccgtgtgctgggggctcactgggggctgcataagtgtgatgccgtgtgctgggggctcactgggggctgcataagtgtgatgccgtgtgctgggggctcactgggggctgcataagtgtgataccgtgtgctgggggctcactgggggctcactgggggctgcataagtgtgataccgtgtgctgggggctcactgggggctgcataagtgtgatgccgtgtgctgggggctcactggggctgcataagtgtgatgcccgtgtgctgggggctcactgggggctgcataagtgtgatgccgtgtgctgggggctcactggggctgcataagtgtgatgccgtgtgctgggggctcactggggctgcataagtgtgatgcccgtgtgctgggggctcactggggctgcataagtgtgatgcccgtgtgctgggggctcactgggggctgcataagtgtgatacccgtgtgctgggggctcactgggggctgcataagtgtgatacccgtgtgctgggggctcactgggggctgcataagtgtgatgcccgtgtgctgggggctcactgggggctgcataagtgtgataccgtgtgctgggggctcactgggggctgcataagtgtgatgccgtgtgctgggggctcactgggggctcactgggggctgcataagtgtgatgcccgtgtgctgggggctcactgggggctgcataagtgtgatgccgtgtgctgggggctcactggggctgcataagtgtgatgccgtgtgctgggggctcactggggctgcataagtgtgatgcccgtgtgctgggggctcactgggggctgcataagtgtgatgcccgtgtgctgggggctcactgggggctgcataagtgtgatgccgtgtgctgggggctcactgggggctcactgggggctgcataagtgtgatgcccgtgtgctgggggctcactggggctgcataagtgtgatgcccgtgtgctgggggctcactggggctgcataagtgtgatgcccgtgtgctgggggctcactggggctgcataagtgtgatgccgtgtgctgggggctcactgggggctgcataagtgtgatgcccgtgtgctgggggctcactggggctgcataagtgtgatgccgtgtgctgggggctcactgggggctgcataagtgtgatgcccgtgtgctgggggctcactgggggctgcataagtgtgatgcccgtgtgctgggggctcactgggggctcactgggggctgcataagtgtgatgcccgtgtgctgggggctcactgggggctgcataagtgtgatgcccgtgtgctgggggctcactgggggctgcataagtgtgatgcccgtgtgctgggggctcactgggggctcactgggggctgcataagtgtgatgcccgtgtgctgggggctcactgggggctgcgttaagtgtgatgccgtgtgctgctgaatttctgcccactcagagctttgtggggagggacgggtgagtgccccgggcgtgtagcatgctggtgccagctctgagccctgctgctgcagtcggctgccccaggacatcggggtctgagactttgtgtcttcatttctctgattttcaaacttcttatgggaagcttcacactatccagaaacggaatgatgacacgatgaaagcctgtggggtcccatcacgtcacgtcacgtcacgtcacctggagttacttctgtatttcttgctaaagcagggagcttttgagtgcccacctgcgtgattttcatgccaagggcacctcattcccaggcagggctggctgccgtgggcgcctcgagcctcctccttccccctcatgtgtgtgggagtctgtggggcctataccacgtgcctgttgcagtggtgtgtgtccgaggtccctcccatgcgggtgccccctctgtccttgctgtgggttgggagccagctccctgctgccaggcccccactgggaccttgtgggtgtgtccaggcatctgcagccgccccccaccgcctccccggtccgtttctctgcacaaccacagccgcactgaggcccgtccaggtctgggccggtcagcctaggggtgggaaccctgctcaagagggctgtgggcacgtggatggtagcagcctcaggtggtgtggcctagggccaggatcccatggaggtaaaaaatggcccccgccgctcccgccacgttggccacgtggatggccaccttctcaggctgttgcacaggttcgccttcccagggaagacaggagatgctctgggccttccctttccctgacggcggcgtcatggctcaccacgggttcaggcgttagctgctattgactgtgaacccgtggatttaggtatcgtggttttcggggggatgttcacggtcctggtccccatatgtccctttccgtgttccttatcccatgctggaatgctcttaggaggaatcccggagttggaactgccctgctggcgtggattctaagaatcctggcactgcctggcctccctggaggtgtgtgagggcgcgtctgtgcgcacgagggacagggcagggattgcagtgactgggggatgacgggaccccctgccacgctctgccacagtcttcacggccatgggaagagctgcgctcacttatactctcacgttaacggagctcacaggcagatcctctccgtccgacagcccttcggctggggggtctggggcagcctcagacaggagcccgctcttgcggacgggaggacgagcgcaccctgcccccgctgctctcagcgagcctttggctgtgacttagctgcattggttgcgagggctggagccagccgcaggccccgccttcccttggctgcctttggggctgcactgccctggggagccgtattctcctccatcgtggctatgttagtgtgaaattagagaaatctgggcaaatcttttttatttatttgttttttaatttttatttattttttgagacagagtctccctctgttgcccaggctgcagtgcagtggcgccgtctcagctcactgcaacctccacctcccgagttgaagcagttctcctgcctcagcctcccagtagctgggattacaggtgcccaccaccacgcccggctcatttttgtatttttagtagagacggggtttcgccacattggccagtctggtctcgaactcctgagctcaagtgattcgtctgcttcggcctcccaaagtgctgggattacaggtgtgagccacggcagcctgtctgggcaaggctgtaaagcatggacatttctctaagaagcgtgcagcttcgtgactcatgcagtcgccagggaggctcatgcgcgcccttgtgctctgttctgtgtggcactgattggcataaaaggggtcctaaggccctggtgttcttgctccccgctcgtaaagttgtcctccgggttgaggtctgtctgcacggaggcctctgcgactgctgcgccgggcaggtgcggggacttgtgataacagggtccccgacacggtgctgacttgtgataacagggtccccgacacggtgctgacttgtgataacagggtccccgacacggtgctgacttgtgataacagggtctccccacacagtgttgagttcctgccaggccagggcagtgccgcgtcctcctgaaaccctgcagtcctgcaaggtggttttcccaacagtgaggccagaagagagttgagatccccagctccgactcctcggagccagcacgtgggggtgagcacagcagccagtcatgtaggaagtggccccgtgacgtggctccagcacttggaggccctcagggcccctccagtggctgcatccaaacttggctgatcctgaacagccgtttccctgggctccgttctccggccagatcggggcacaagaacagagaacctgaattgccctgcagaggggtctcgtggggatgagaagcagccgcataaaggggctgctgtgtggcctttgctgaaatagccacacttcctgccttcttcccacatgacgcccgatgcgggtgcttccctgtgccttcctgcccagagacggctgtgtccaccccgcagcgtccgcctccagccggtctctgcctctctggggcccctgcctccgcttgctggctggtgccccttgggggtaacgtgttcaggcctttcctgacctaaacaaaagtctcaaagaggagcatatctgctggccctgcaccctgtcccgtcttgcgcccgggcagctgggcagaaggtggaggtgtctggagagcagggtaaggacgaggggtgcctgaggaggagtggggccgtgggagaacattggatgttgttttgtgtgtgaagggctggtggagctctaggtgtgagccagggtagggggtgaggataccagtcaggctgacgtaggggctgctggaatctcggcaaaggaggcaggtggtggctctgatccctgagtggcccggggctgctgtgatgggacacagaccacacggctcacagcaaagggcgtctgttctctcctagttctggagcccaggagtctgagatgaaggagaccgcaggccacgctgcctccagagtctcccgggaggatcctcctgcctcctccagctcctgggcccccgggcgaccctgggcgcctgtgcctccacgcagtctcttcctcccagtctgagagctcttcctgccttcatcctgtaaggtcacttgtcagtggcttcagggcccacctctgacccaggatgctctctcaacatcataacctaattacagggttcttcaatacatccataaagacaggttttccaaataaggttgcattctcaggttcctggggctgggatgcgggtatcctcttttttgggggcactattcaacccactgcaattgagctctcggccctaaaattcatatctgccacacatgtacagtatgttcaccccatctcagtgtctcctgaagtctcaggcctgcacagaccagctctgagtcccaactctcatgtaaatctcattgctcggagctcccaaatctcatcctctaagcatccaaaccagaagccagtgaaatgtggggtctggtccatcctggacaaaactgctgtgtctgtagatgtgcaagtgaggaggtggttatcccagaacgcagcaggggacaagccaggagaggcatgtttgctccaaaagggagaatcaggtgggaaggggccactggtaccacacaaggctgagacccagcagggcaggccctggggttccagggcctgaaggtcagagggtgggaggcctgcgtccacacatgcatggctttagtgcgtggcaggtcctcggccacgcacgtgcaaaccccatggagtcaagccgttccgtggtgcagcctcatcagacacccctgggaagagactgcacacagcagtgaccccctccaaccccgggaggagaccacacggcagtcccccacccccgccccccgccgttgctgttagggtgctgcatcctggaccccacggcctccctttgaagagctgctaatttggcccattttcgggtgtttctgatgcaccaggtggatgaacctggcccagagcgtccgagtgaactgggggtgggtctgggatgttgtggatcgcctcagagaactgcctggcgttgtgtccccagagcagccctccacatcccctgcacgtggcatcagtcacacctgctctgtgtctctctccccagtgtgtgagcacgcacatacacacatacacacacagcggccgggagcaccgcagcacaccgttgagccttcgggccttccctcctgctgggtccacaggggaggtggtgcgggtgccctggccaccgtgggtggtgggcgtgggtctgtgcaccccattcctgctgtagcaccaacctgtcctgtctcccgcagaacatacggtccctaatgagcacagagaagaccaagggcttctgccagctggtggtctcgtccagcctgcgggatggcatgtcccacctgatccagtcggccggcctgggcggcctgaagcacaacacggtgctcatggcctggcccgcatcctggaagcaggaggacaaccccttctcctggaagaactttgtgggtaggcatggctggcggcccttcggcatcccctcaccgtcccctctgtgtcctctcagtgtcccctcgctgtcccctgtgtgtctcctcagtgtcccctcgctgtcctctcactgtccccttttcgtccccactgtccccttggtgtcccctctgcatcccctcgccgtcccctcactgtcccctgtgtgtctcctcagtgtccccttgctgtcccctcactgtccccctctgcctcccctcgctgtcccctcactgtcccgtgtcccctcagtctcctctgcatccctttgccatcccctcgctgtcccctaaccgtcccctcaccatctcttcgccgtcccctcactgtcccctcaccatctcctcgccgtcccctcgcggtcccctcaccatctcctcgccgtcccctcgctgtcccctcgccgtctcctcgccgtcgcttcgccgtcccctcgccgttccctcactgtcccctcgccgtctcctcgctgtcccctcaccgtccccttgctgtcccttcaccgtctcctcgccgtcccctcgctgtcccttcaccgtctcctcgctgtcccctcaccgtcccctcactgtcccttcaccgtctcctcgctatcccttcactgtctcctcgccgtcccctctgtctcctcgctgtcccctcaacgtccccaggcctgtgcgctgtcaggtcccgatgggccttgaggccaccgacccgagggtgtgtgctctgaggctgtcgaaggccctggccctgggagcggccatctgaaagtgtccaggcactccctccccttctcccagagccccgcaggggctgggggattccctggacacatgaccagcagctgaactctgctgtgagtctctggctggtccttggaggagctgacggagtgagggtgggggctttgtggggacccccctcgcctcgccgtgcccgcccctgcactggctgtgagtccccggggaggccccttccgcaccctggcctcagatgacctgcggacggccgcctctctccgcagacaccgtccgcgacaccaccgccgcgcaccaggctctgctggtggccaagaacgtcgactcgtttccgcaaaaccaggagcgcttcggcgggggccacatcgacgtgtggtggatcgtgcacgacggcggcatgctcatgctgctgcccttcctgctgcgccagcacaaggtggggcgtgcgacggggacacgccagccggagcacggccaccccacgtgctgcgggccgggacgggctcctctgaggccccacagccatgccctccctgtctgcaggtgtggaggaagtgccggatgcgtatcttcaccgtggcccaggtggacgacaacagcatccagatgaagaaggacctgcagatgttcttgtaccacttgcgcatcagcgccgaggtggaggtggtggagatggtgagtcccgagggcttgaggggaggaggccggggggaggtggggaggaggtggggggcggcccgggagggctgtgggcctcgtgaggtgggggtggagggggaagtggagatcgggagggctgtggcctcgtgaggtgggggtggagggggaagtggagatcgggagggctgtggcctcgtgaggtgggggtggagggggagatcaggaggtggaggtggaggtggggaggagaaggtggtggcgattgtggcgggggctgccaggccttgcggggtggtcaaggaggcttggttttggaatcgccaggacatcacagaaagcacagagccccgtgtgttgcttgtggacacctcgtgtaacacgggtgtgggtgttgccctagagccggcatcagcatctccgtgtcctccatggtcccgtgtcctcctcggcccgggaccccgtccaggacctcacacctcagtggtgttgccatggtgggtgcacctctgagcacctcccgttttgggtgctctccccagatgggctcaccttcccacggctggaaaccacacatcagcagtcgggacccggggagaggggcactggtcagtgaggccaggctgcagctgtcacgtgggacagacaggccctcggtcagctataggcagggcctggacagagactcgtcccgtccttcacgcctggagaggacggggttgatgggcggaggcctggcattggagcgcttgcccccggcccccaagcatggagctctggatcctggggatctggtgggccccttgtgctggatggaaccatgcctgctcgctaccagcccacccggatccacggctgtgccttcccctccggtcctgctggcggtcccgggactttgtgggttctgaccccacttggatcacgccgacaacactggtcttgaagtcagaacccgcaaagtcctggtttcttccggctcccgtgaccccagcgcatggttttgcaggtcctcaggggcctggactcctggaggtgggtgctgggaagacataaagctggatagagactgtcacgctgtcccccaggaagccacctgtgcccctgcagcagcctgggaggtgcggtctctccagccccgcagccccccagtcccccagtccctcagtcccccagccccccagccccccagccctgggtatggcagaggccccgagcacctgctcctggtttgtgtcgggctgtgagtgaggccaggcacggcttcgtgcctcaccgacaaccttctgtgtttctgtgtcagttcccgtggaactcagttgtcctgtggggttgttcttcctcttgccctgcaggacctttcctaggccgagggctgcaggcctgcgtgacgctggatggttttctgcccagttttgtacactgggcttagtttccatgtggctgtgtcttcggggacgatggctggagtttgtcttgtttggacgaggctttgcgggttcaaggttgtaggggttattattggtgctaatagtcgtatgaataacgttatttccaagtcataaaaccgcttagtaaaatagtaacaaaatgctgcctgggagaaccagccctgccagggggccaggtggggcggccactggggcccagaggaaacaggcaaagtgagcccatggccccagccgcacccccagcccctccgtggtgccagaagcagctccccagctcctgagcaggggttgttagctctgaagtccgggaacctggagctcccagcaccccccatgctcccagccatgtctctggcagggctggggctgcccacccctccgtagccctggccgcagggacaagtgccacctggctggagaggggcgtctgggtcgctgccattcagtctggcatgctgtttatttttttaaaaaaagttttgagacagagtctcgctctgtccccaaggctggaacctccacctcctgggttcaggcaattctcctgcctcagcctcctgagtagctgggactacaggtacacgtcaccatacctggctaatttttttttttttctttgtatttttagtagcaatggggtttcaccatgatggccaggctggtctcgaacttctgacctcaggtgatccacccgcctcggcctcccaaagtgttgggatgacaggtgtgagccaccgcacctgatctggtgtgctgttttaaatactggtgcttaacaggcacagctgctcccaactcccatgagccgggtgcggcgggtgagacacagggatcccgcacggcgggtgcggtgggtgagacgcaggggtcccgcatggcggatgcggcaggtgcggcgggtgcggcgggtgagactcagggatcccgcacggcgggtgcggcgggtgagactcagggatcccgcacggcgggtgcggtgggtgagacgcaggggtcccgcatggcggatgcggcaggtacggcgggtgcggcgggtgagactcagggatcccgcacggcgggtgcggcgggtgagactcagggatcccgcacggcgggtgcggcgggtgagactcagggatcctgcacggcaggtgcggtgggtgagacgcaggggttccgcatggcggatgcggcaggtacggcgggtgcggtgggtgagacgcagggatcccgcacggcgggtgcggtgggtgagacgcaggggtcccgcacggcgggtgcggcgggtgagacgcaggggtcccgcacggcgggtgcggtgggtgagacgcaggggttccgcatggcggatgcggcaggtgcggcgggtgcggcgggtgagactcagggatcccgcacggcgggtgcggcgggtgagactcagggatcctgcacggcaggtgcagtgggtgagacgcagcagtcccacactgtggatgttccgggtgaggcgcaggggtcccgcacggtgggtgcaatgggtgagacccagggtcctgcatggcgggcgctgaggttgtgctgtggcttctccatgtgttctgggtgggtttcccatggtgccaagcccccctgagcatagacaatgacacctgtgagcgtggatcatgcagccccatggggcagtgcctcgccctgagccgtgtgtgccaggttggtttgtggctgtggccttgccctcacagctgcccttgtgcccggtcggagggtcccggggagggacatgagcagagcgtgtgtgcggcgtgactgcccatcgtgcgctcacaccttcctggccactgggcggggggcctgagagccagagggggcctgtggggcccgggacgcgtggcctttcccaccgctcagggcggctcggtctctgggtaccgggctggtgttggagccatccgtggttctgtgcacaccgggcttactacgtgcttgggaactttctaggttgaaaacgacatatctgctttcacctacgagaggacactaatgatggagcagaggtcgcagatgctgaagcagatgcagctgtccaagaacgagcaggagcgagaggtacgtgggggccgtggccacagacaccaggctttctgagaagtatagccgacttcgccgagtcttttctgggaccctcctgcagcccacgagggtcctccagagagcatgcctcaggtactgcgtcgcaggctcagcccccagcctgcgtggaggtggcagaggccctgcaggagcacaggagtggcgtcaaagccagagctcatcggagcctgggcgtgcgggtgcctggttagaggaacggcagcctgccagatgcatgctcatgtgcaggaagggacgagggccgagacctttgaacttagcttttctaaccgagcagcgtgcaggcaggagacatggggaccctccccaagggcagtgccctctgacagggtcagcggcttctgagccggatgagtgcccacagctgcttacgatggctgctttgtctcacagcctgaaaccgtggagcccctcagtgcccttccccgcagcatgcacagatttctgtcctaagaccaagtgggaggggagagtgagtgtgcagggagggagggaagcgagctggaggggagttgccaacccccccaccccccaccccccgacacagacctgtgcagcctccgtgcgtggaagctggccgcctggctgcagcggctttggctccgtgggtaactgtaggctgctgaggacgtctgggtgtatccacctgagttatactggcctgggccccatggccactgtgagaccccaagggcaggtgtctttgtggtcacttcgcactggaggacagcacgggggtcacctggtagcgggatgctcagctctgtgaggtcacggcctcatggggtcttcgtgggtcccaccaggctggtatcacacacgtgtgtctgcagaccaggtgcaggtgttggttttctgagactgcagtgacggcggaggcaggggcaggggatttgcctgccctggggccttggcctcagcaggaacctgcagtacacgggtctgcgtgtggggccatatgtgctgacagccggaatcactaagcagcgactgctgctctcccccaacagagaaaggcgtgtggagctgcggtcctgtccactcccagaccccgggcaggtcagggtgggcacagatgcaggacacggggggccgcccagcttgtccgtggacagagaccccttccacgggggtccgggcagccgggagtgtctgggaggacccacatcctctgttttctgtccaggccaggtccctgagatccggcagggtcgccctggcgtcacaagggttcagcccgggtccagctaggaacaagaatccacccatggcttcatgggaagttcagtgtggagagtcagcaaatgctgaccgaggagggaccgggagcgggaacagcaagctcgagctcgaagggcccctcctgggccaggtgggggttggaggtgtcaccgctctgcagaagggtttggatgagctgctgtgcagacgctgggtggacaccctctagtgacttacacggtggccctcgggccaggtgggcggcgctggctctgccgagagcgggcagcccttgggctctggtttcacgttcaaggccatgggaaatttaggctgggccgggcgccacaatgagtagaggcctggggcccactgtctgtgtccagagagggaggcagccccaggccctcccccatctgtgccaatctcttccctttcgggaaggaccgacatccaagttaaacagttttatccagggaagaagaacctggtccagtgaaatcactctggacctttggctttttaaaatcaccccggggctcacaaactcctgatgcccctgggacgagtggctccccgggctgcgtcacaaactcaggcggggctccagccacagtgggagaggtggccattccagtgtgtgcataaataccacttccaaggtggcacccgtgtctgggagctcccattggcctacctgtcaggctggccacgacagcatggagggcgtgaagggtgcagggaggaatgagaacccagtggagggtgtttaaccaccaggggctgcgccattggtgcgatctcgcggtgagggcgccacttccccttcggcgcctacagctaggggcgtggacggtgttttcattttcctcggattgtcagaagtgacgcacagggggccggccctgtcattggccccagcggtgccccacagggcccctgccagcctggccggcccccaaacgtcccctggctggtcagacacagcctgcttccccggggacagggcctggatgctggtacggccccacctgccccaagcctccctgagacggggacgcctgcgtgctggtcgtgtgggcgagcaggtggtctggggtgaacacgtgtgtggagccccgtcaggtgagggggagactctgccagcacgtgtcacctcctgtcagtacggggtcatggggcctttccagttcagggccagggcgggaaggtgagggggtgagcgtttggtcgggaagcctgggaggagggaggcagtcacgggggcggcgcaggaccagtgtgggacgccaggctgggtcccgggtcaggcacacagggcccttcaggttctgtgagctgccctcacctccggcctggcatcccgggtcgctctcgcccagaggagttttgagaccggctggtctcaccaagtcccgggcccgccaggcccagctgatccacgacaggaacaccgcgtcccacaccgcggcggcagccaggacccaagcgccgcctacgccagacaaggtgcagatgacctggaccagggagaagctgatcgctgagaagtacaggagcagagacaccagcctatctggtttcaaagacctcttcagcatgaagccgtgagtgtccgtgcgtgtggcctggggggaacagatcctggcagtgctggcccggcagtgaggacagagtcccttccctgaccactgaagagcttcggggcaaccctgcaggccagtgggcccgttagagaacagggagccgcctgagtgggcactgaggggtccttttggtgccaaggccgggccctgagttcagccctgtggccgggcgctgagggatccttctagtgccaaggccgggagtccttgtaagacctgggtgccaagtgctgaggggtccttctagtgccaagcgctgaggggtccttctagtgccaagcgctgaggggtccttgtaggacctagggtgggtcctgatgttaaccccacagctgggtgacgagcagtcctcctggtacctgggccagccctgaagtcagccctgcggccaggcctgctttactcaggcaagcctcactgcagcaggcagatgggtctgttccatggaggcgaggaggcttgtgccgctgggcacagaattcctggccttcaccctgtgggtagttcaggctgctgtcgggccttagggcctgccctacgccaaggctcccacctgtggccttgggctgcgaacaccagggctgtacagggtccttgcgggtgtgggtttggttctgcagacgcagcctctgagttccagatgagagcgcaagagacacctctcacccggggtcagagccagaccctaaagccaggttctcaggaagggctgggggctcctgggccctgtggggtgggatgaggcggcgtcctcctgggcagccatgcgatctggaacagcctggtgctctctcctgaagtcagtaacacactcttgtttttttctcctgcatagagaatggggaaacctgtaagtccactcgctacaaccaggtcgccttccgggcccggttgccctgcatgcctgtgtgtgtgtggcctgcgtgtgtctgtgcgcgtgttctaggcctgtgcctgccccgtgcacggtggcttgtgtgcgtccgcgtacagccagagctcacccagagctgctgcggctcccacgtcagtttcctgttgccttcgctcccctctgttcacggtggctccagcacacgcctgaagcctcttcctaagtgaggcccaggaactgagacctgggaggtgtccgagccgctccggagtggaggggaggcgtgcgcctcgcagggcccgtcagtgagtccatccacgtccttctgggtcaggcgctagctgagtcgcgttcccacctggaatgccttccatgttaaagctgtccagcctccaggcggagaggggtgcagatcagttctctgtgtggtcggaccctcggcaggagctacctgcgtctgagctccggggcaggtgggagggtgtaccctggacggacccccagggtgctccctgggagtcctcgatgccgtctctgtcccctgcctgcccccgccagtaaccgcctgggccatgttttccttgtgggcaggcagtgcctggtgcctgagtgaggaacgccttggctgagtggccacacttcccttccctttttatctttaaccccgaaacctgaattaatcagactcaagaaactgtgcagctatgtgcgaggcgtgcagggaatccctgtacttcctgctccgttctgtaaatctgaaagtgccttcagaatagcgtgttaattaaagccgaagaacgacgtagacccaggagtagggtttgacacacacatgcacaggcacacacactcggggaccctcagtggcacctgtgcctcctcccagcgccggggcttgcctccccttggtcggggcgggggcaggtccccacaggcctgtagggtcaggagaaggtgggccagaatggacaacgcgtgggctttgtattcatgtgtggcgtgcgtctgggatggcattgactctcttggcccagcagtttctcggggttgggctgggagaagccctccgaagatctggaggtcggccctgacctcttctgggcagtgcgggcgtgagatgtgcgtggcttactgtgacgtccccgggagcacacttaacggatgtctgtttgtgtgcgtgctcgcatgtacctgtcagcgcacctgccggtggacgtgtacctgcctgtgtgcacgtccacgtacgttagtgtgcatgtctgtgtgcacatactatgcatgtcttacatgttagtgtgtctgcacgcatttgcacattgtgactgcatgcctgtttgtacatgatagtgtatgcacttgtgtattagtgtgactatgcctgtgtgtgtacacatcagtgtgtctgcatgtatgtgtgtgtgcgtatacacattagtgtgcgtgtctgtgcctgtgtctgcactggtcctccttgctgtggcggccggcatactccaccagtagccaagggccaggtctccgcctcaccccagcactcactggctgtggacacgctgcccactccgacccccctgtgctcctggcctgctttcacttcctggagctgctctttgtccccaaacacactggtaattgtggtctatccagaagtcgaattcaaagttccaagttcctggcacgaaagccccttgactgtgctgtggacagagaccccatctgtaattagaccaggctggagagaagatagaaggtctctccctgtgttcctcctggaaattggtggttatgatcacgtttatgtggcttaagcgtcaagcggatcaaagggcgtgagcctggatagcgtccgtggggcctctccatgaccctgcatgggcggcctctgtctgtccgccgccgcccctctgcgtccagggcgctggtgacctcccccagggggccacagtcacgaccgcacggctgcagctggcctgagacccgctccgactttcaagtccacacacgggccgggtttttccaacacagaaacgcaagtgctcccctccgcccagcgtttccccaggtggcctcctggaacgccagttctgctgcagtttaggggcctgcctaggaggggaccgtggggtagaggagggagataagctctgtcccgcaagggcctgagcacctcacagcatgattctgcagtgtccccaaacctacttggttggggagcctcctgtggggctgtggccgggcccaggccgccagggacgctttgagacatggaccggccacagcagcttcagagagcagacagggagggtcgtggagcagagctgcgttgtgaggacggaaggcgggggctggacggccacacggtggaagtgcttgtcctttagcccttggccagacaggggcagggtgggccgtaggaggggacccagtagtggccactgagggcctgtgcctccagctgagtcctcggcataccctgtccttgtcaggcctgggagcttcagcagcaacggctgcacaggccggtgtgggggactctgggcctttccttcctgagcttccggccccttggacccagttgtatcaggaccctcggagaggaggccatgtgtgcccagcctgacgggtctgtgtttggcagtgtctgacgtggggtttaggggcgatgatgtagatgtcaagagaagcgtgtcagccttgaaggcgtcaggcacatgggccacccagacggcttccactgttctgcctgctttgcagatgtagatgtagttaggaaagcgcttgcggtttgtgttgtgtgactgtagcccttagaagcttggcagccttagtgggctgagttctaggtccctggaggccaaagcatcccgctgctgaacgcccgccctggctgcagtcagcgcctttcgctcggagccgccacttctgcatccttcagggtcagagaatccgcctgatcctgactcacacagccctttccaacacgtgtgaatgcagctcatcagggctcagctcagcctcgtgtccggagcgtggggtgcacccgccgcccgctgaccgtgcccacctcccctgcagggaccagtccaacgtcaggcggatgcacacggctgtgaagctcaatggcgtcgtcctcaacaagtcccaggatgcgcagctggtcctgctcaacatgccaggtcctcccaaaaaccggcagggagacgagaactgtatcctttcttgcagtgtgcctgctgagcgtgcgggcaccccctggtggcttctcgctaagacctgggtttgtgggtgctgggagtgaggctggcttcccgcctctccttcagccccaggctctgggagctacgaccgggatgcagtggggctctgagcccagtggtgaccgggccagagttggggccagccctggcattggtgtgggggagggagggcccgcctacagtaccagccccactgtccccaggtgctcagggctgccctggggctgggaggctccctgtcatgcatccccacagcagctgtgcattctgggacctccgctggggctcagccccaccctgcgccgacaacggtgggaggtgaggagcccagctctcggctttaaggccacaattggtcgcagctttgggaatttgtgctttggaaggagaactccgcagtgcatctgggcgtattggcacagacagggtgacgcctggcacatccctgccaggttggcaccaagaactggggccagtgagggcatgtcctccatgcgtcctgatcggaatccgtggcccaggtcccctgtaggctggtgaggacccagtcccgtggctggggttccctgtcgggtggggtcagcaccgtgggctgtgtcgctgtctctgctcgtcctccctgtggccacggtgctccctctctttcccgagcactggcccctctctcccctgccctgctcctccccgcctggggggtctctctaatccccacctctcttttcaccttggctctgggtttctcaaaccaaatcttagctaaccaggagaggataaacctcactcctatcacgatttcagctacacacgctcaggtaagatcagctgtggccttaactctgttgaccacagacatggagtttcttgaagtcctgaccgaggggctgaacagagtcctcctggtcaggggtggcggccgggaggtgatcaccatctactcctaatgcccaacagcatcacggcactctgggacaggcacggaggacggcgtgggcagcctgggcctgggcttggcccagggaaacagacggcagacacacctgtcccccagtgatgccgcccaagctgcccatggggcttcctacggaagtttctaggcccgtcacctagggctctcctgttcagccttaacaggctcagcaaatcagggcgtggctggacgatttccttgcatctgagggcagacgctgctaccggagtgacctggacgtggccagatcttctcgcaggtcacaagaagccagtgagcccttgccttggtttctggaagttcttttccttggctggatttacccagtggttaggttgcatttctaccccatccagaacattcttggaagagcacccggagctgaagctgtccctgatgatgaaggtgaaacgtcagccctggccatggctccgctcagggccccggtcacctccgagtcactctgttccttgactgtctttgtgtttctgtacctcaaggcactgaagctggaggactctgtccatgcccgtgtcaccctcgtgtgggagcctctgggctcggcaggtccacatttcatgagctgaggcgtgggccagggccatctggaaagggaactcggcttttccagaacgtggtggatcatctgtcgggtgtgtggtgaacacgttcagttcatcagggcctacgctccgggaaggggcccccagctgtggctctgccatgccgggctgtgtttgcagctgtccgagtctccatccacctttagaaaaccagccacttcttttcataagcactgacagggcccagcccacagccacaggtgcgatcagtgcctcacgcaggcaaatgcactgaaacccaggggcacacgcgcgcagagtgaacagtgagttcccccgacagcccacgacagccaggactgccctccccaccccaccccaccccaggagcacggcacacagttcagcctctgagctggctcacacgtgccatccccaccccggtgctccagggaaggaggacacggacccgacgtgggaggtcctcaggcagcagtggcgcctggtgtcaggtctgtctggctgagtcccgggcgtcccctgccatggcctgtgccttgcatggaggcggcggtggcactgaagagatagctttcaagggcccaacactttgcacttcggctggctgtgagtttctgctttgtaggttgtggtcacatttgcaggctgcgggcagtggcaccgacttgggcctccctttctatgtggcatatttatttatttaaacaccccagggagttacgtggtaacaaggttgtccataaagaggttgcttctatatactagaggccccagatggccaggccttgggctacgtctggcttgcatggtctcccaagggaatcagccccatcaacaaagttcaaatcggggcagaggctgcacttgtgcccccagatgtttctgaggagccagactagggctggcattgctgtagagtgacggctgctgcccagagcgtgtcccagacatcacagcggggctcagcagttcccacagcctctgcctgccttggctaagcatgagttaagcagcaaaacgctcctccatgtctggatggggccggcaggtcctgtgtcccctgcacctggaggagagcaggctagaggcacagcggccacatggtgctggctctgaacgttggttggtggctggaaaacagccctgcttctgagggccgctcagttctgcacacgaaaccacctcctgagggctcagctctgcccccgccctgggctgcagcctctgcacgcaagcaccaggcatcctttgtgttgtcaactccgtgtaaccagtaactacagccatttacaattgactccgtttccttttgtaggtttccctgtctgtctgtgttagtagaaaaataaaatcctatgaaatctga

SEQ ID NO: 1260 - DNA, 104200 bp, Homo sapiens
actccgaggcgcgggctgcgggcggcgggcggcgggcgcaccatgccctccttcgacgaggcgctgcagcgggtgggcgagttcgggcgcttccagaggcgcgtgtttttgctgctgtgcctgacgggcgtcaccttcgccttcctcttcgtcggcgtggtcttcctgggcacgcagcccgaccactactggtgccgcgggccaagtgccgcggcgctggccgagcgctgcggctggagcccggaggaggagtggaaccgcacggcgcccgcctcccgcggcccagagccccccgagcgccgcggccgctgccagcgctacctcctggaggcggccaacgacagcgcctccgccactagcgctctcagctgcgcggacccactcgccgccttccccaaccgctcggctccccttgtgccgtgccgcggcggctggcgctacgcccaggcccactccaccatcgtcagcgaggtaagggcgccccggccctttggaagccggcgggagaggacgatgctggctcccaggcggacaagccgcgtgtgagacgctggccgccaggggaggtcggtggagacggggaccggtcggctacctctggggacagacaggattcagcgcacccttggaagtgccgcgtcgtaaatgctgggaaaagcctttcgttatctgcctgagcccgtgagttaatgcacagatactttggtttcgggtgtgaacaaaaactttcttcgaagccgagttgtaaacgcctggcgcacgcctgctcaggagtcaaagacccagcaccgcgttccttatctttgaggtgtgcgggcgccgtcattggaaattatggttaggtgcgcgatagggaacttcagtctctggggtgagcgacgttggcagttccggattcgcttatggtctccagggtcaaaggaaagggcgaaccaacgtttgaaggcagcagcagcttttttccagttgcccaaatggttactcaaaatgcaaggggacaaaggtcgaggctttcccggggaatggttttggtaaaattgctttggggcaaagagcaacatctgggataagttgggaaaactgaagtattggataaattttagtttttttttctggtaataaattttaggaacatagcgggagggccacagccttccaacgcaaatccccaacccatttacaggcggaggctgctgccggcgggtgggcgggggcgatccccacattttgggcagtcagtgcatttggaagttaggggagcttccttcacccttgccctcagtaatctgtttctgcatccttgctgaaatggaagattgcctctctgtgaggtccagatatagagcagagtcactttgtaataatcggaactcagaaacggcctcaattgagcatgggttgcagagatgagcagttttactgagctttgtctacaatcacagcttaagttaattttaaaaaaagattgaatgtgatcaggtacattaggaaaaaaggtttgtcttttttttgtgataaactttaaaaaatcacctacttgaagagtggggaaaacactggatgaggaggtaggagcgccctttctgccgctgttgctgttggtctggtgagcttatctcgctgcagttgggagtgtcggtggttgcaattgtacatgttttatacgccatgtgctggtgtgttcgcacagtggatggctctatgctatgtgctccagggataaaacccatggcaggacagccaggcgatgtgtgtatgtgtttgggatctttctgtaacgccgtgtgctgctgtgttcgcacagtggatggctctatgctaagtgctccagggataaaaccccctggcaggacagccaggcaatgtgtatgtgtgttcagggtgtttctataatgccacatgcaagtgtgttcgcacactgagtggctctatgctgagtgatctcaggataaacccccctggcaagacagccaggcaatacatatgtgtgttgggatctttaatttctacttaatccatggtaaggctggggactgctttataattggtgatggtctggttagagatttcacagttgaaaggacagggcatggacttggatgagagagggcattatctctgtgagtcgcatctgttaggtggcttcttccactccactcagcagcgctgcctaatgcttacttcccaagtgaaccagaggacccacatggagggcagacagctgatttttggagacatttaaagatgaagaataaaacgagcctcaacaagtgctcaagcgaggtttgcatgagtgagtatgatccatggacatcaaagaagacagacataaaaatctgtaatttaatgctctgacggatactttggaagcattctggagttgcagggttactagcatcccggggttacaataaggtgattttatgaagatcagtggctactaaaatgcagtgtggaatgatggagggtcaggggctggctcggtctccagctggctgtgtggcttgggtgagttactcgccttctctgggcttgtatttttcctctgtaaaattagccattggattcagcccgttacaatgctccaaatgccatcagggtcaccacctggttactgtttggtgtgcccagaacaatgattaaaaagtctttaagaaagtagaatgatattaggaatgtaccccgtaaagccccaaaaaagtttttgaaatatattggagagattcttttttgttttgttttgttttgttttctttgagacggagtctctctctgtcgcccaggctggtgtgcagtggcgtgatctcggcttactgcaagctccgcctcccaggttcctgccattctcctgcctcagcctcccgaatagctgggactacaggcgactgccaccatgcccggctaattttttgtatttttagtagaggcggggtttcactgtgttagccaggatggtctcgatctcctgacctcgtgatccgcccgccttggcttcccaaagtgctgggattacaggtgtgagccaccgcgcccagcctctttttaaattccaaatagttttgtgcttcttttggtttgtttttcatgtttggtttcttaagaggaaaacccccatctattcataaagttcaactatccaaaacaagtcagcaactctctgaattctgcatagctaatattttgctgtctttggttcaactaatttttttctttcaaattctgtctgatgaaaggaactgtagttccatcttcagctaacattatgtatccagtgtatttttataaacttgaagcctaagatacaaatcatgcaaaggggtgaattgggagagtttacaaagtgggcgggatgaccagactccagaatgcctccatatagctataatacttcatccttgcaccatggtgggaggggtatcattgtcctggcttcatagaagagagacctgaggaccttccagggtcccacgccatttatgtagccaaactggattcaaatccgggggccttgattgtaagtcagtccactttcctccataaagtgctcaaaatccttcaagcaagtccatgaaacatagtactcagatctctcacactttataacctgcagaaacctcgttgaaactttgtatttattttcttactatcatggtcctccaatgggctactttgtttcattttacggtgtcaggatccacagtcagccagactggcagatggggaggctgtgctttcatttggtgggaatggttctctagcctcctgatgtgaaagttgcaaaatggtcatttaaatctcatacaccaccttcgcatcttacaacttgagatagttctaagacactaagtcagaaatcaatgccaagggcacatccctttatggccagctcctaatttgtgtctcctgctcaaggcaaggcagtggatttatcacccacattgaacttcctcagtggagacttttctaatgtccgaatctcggccttatcttgttgtcagatattgggcagaataaaatacaatgtaacgcagagaagcgagtctgaccccctgtcccaaatatttcaattcactgcccagggagtgtcttcaagattgatgctaggatttttcaatgcttgctaatatggtatggatgaaaaaaaaagagcttttccctaggctatcactcagagcagggcttcagaacacctttaaaaatagactgaatcacatttgtttttcctttccagatcattttgacttggaatcactttttcccttccagattacctggctgaatctataaaaactgaatccattgtttgtttttattagaagagtgtgtctttcccatactttctgaaacatcaacaattcaacaaaaattttatgttggcccttgtccctcagagtaactagtcctttctgttgatgacaaaagtgttttaatagtgtaataggtttttgttttgttttgttttttgacaaagtctcgctatgtcacccaggctggagagcagtggtgcaatctcagctcactgcaaccttgccccccgggttcaagcaattctcctccctcagcctcctgagtagctgggattacaggcacccgccaccgcgcctggctaatttttgtatttttagtagagacagggtttcagcatattggccaggctgacctcaggcgatctgcttgcctaggcctccgaaagtgctgggattacaggcatgagccactgcacccagcctaatagtttatttttaatggagtgaaagcaggactctaatgagtgaacagccaccccactaggtgtctgattcttggtctaggcagcagaatggccaaacagattcatgcagcaatgctttctggacctcagaacaaggaaaatatttacaataaggaccttcattatgagaatgtgcaagagtatctcctgctcctctctggcagctgatattttggattatcaacatcagttcagctgaagtttatttagcatttattttattctaggcactgggctaggctggggatacaaagatacacgagtctttctcaaaacagcgtgaagcttggcagggaaaattgcagcgataatgtgatgacagtggctgtgggtgtgataaagggtaccaccctctgatgggacagaggagtgaaccagggcagaaagtacattgaccttaacctcaacctctgagtacaaggaggagtccaagaggaaaatatgagggaaaagatgttctattctcacaccctctcatcttcattattttctctgcacccatttattttgtgccctcaggagcagtggttggtgtgcattctcgggtcgcacacacagggtttggaatcaaaagacgagggttggagttcaggaattttcctttttcacaaacatctagggcccttttcagatggtccatggaccacacagagagacaagctgggtgtttcttaatgaggagcatgatgagaatataatgactgggagagaattgccagttccaccaagcacaccctggagactctcagaggggaacattatccctttatcctcagacaggtatcccaaatcttatcagatgaaatgctgctgtttattttcagagagctttgagctctccagggatgggcaactgataataaaatcctggaattaactggggagcgggggaagcccacagctgaaccacactttctgggagtcttggtaaaccttagaaaggagctttgggcaaaggtaggggactccaacagatgttgcagagacatctgtacttttggacccacgggttatttttggcattgacatcttagtagagtggaaagaatacacatgtcctttggtgtcagataaatcttgtcctaaatcccagctcctctattaacttgaagggcaagtcaactgagcatctgcctgagcctcagtttcctcagcactagaatgggtacaagaatgcctgccttagcaattggcttgacatatgcttgcaaagtgcctggtcataggtggtgctcagaacagttggttcctgtgaacacataaagacccttaagccaggtgggagtcaggagggagggaaggaacaggctatgggccagatttgaccctggagctgtaagtttgctgatccctggtctagcataataaatcactgataaatttgccttaaatataaagagtcaaagccttggccagttgtggtggttcatgcctgtaatcccaggagtctgaggccagcctaggcagcattttgagactccaactatacaaaaatattttaaaatttttaaaaaattggccgagtgtggtgatgcatgcctgtagtcctatctactcagaaggttgaacccaggaggtcgaactgtgctgctgtattccagcctgggtgacagaggaagaccctgtctctaaaaaataaaataaaatatctcggacactaatttgctctaaaggctgagaataccgatactttcccactggaccccacaggtaggtcatatttcccagcttcccttgaagctagagaggccacgtgtctgagtcctggtcagtgatgttggggaagtgaatgtggaactgctaagcctggagccggagcaaccttcctcctgcagtccccggaggatggtggaactcttacacggaaggatatgcgttcctggaggcatgcgaggcaggcaggagccccacagctcccctccacaccaattcatctgcacaggaatatgggattgcgaataagaaataagctttattgtgttacacaactgaggcttgggagactgcttgttgcagctcttcctgttaggctgctctgactcatacagcatcttagtgtgcttcctggcagggcacaggtcacgaggctgtgggcacctgacaaaatggtatggaggctggtgcctctaagagcatcctcccctaggtctggtacacaaggtctctgtgcctccaccccatgtctccgcctatagaggcttttccctctcttagcccccggggctcccactctccaggcagtcaccctgggacatgtgccacagctgtcctccccttgggctcttgtgtgcgctgtttcctttcctttcctcaaaatacctgtctttcctcggccgggcacggtggctcacacctgtaatcccagcactttgggaggccaaggtgggcagatcacgaggtcaggagatcgagaccatcctggctaacacggtgaaaccccgtctctactaaaaaaaaaaaaaatacaaaaacgattagccaggcatggtggcggctgcctgtagtcccagctaccggggaggttgaggcaggagaatggcgtgaacccgggaggcggagcttgcagtaagctgagatcgcaccactgcactccagcctgggcgacagttagagactctgtctcaaaacaacaacaacaacaacaacaacaaaaaacttgtcttttctcatgaggctgttccgttttgtacctttacacacaccaattccagacacaccttccccactgctgcctctacccagggctgggcttggcttcctttatctgtctagctgccttccctctactcatcttgtgctcactgcctcatcagactctgaggtgctggagggccggcgctctgccctcctagcctaacgcagtgtttggcaaatatttgtgattaaattaatgaatgaaagagaaagggattccttggcacgtgtaatgctttttatgaccatggctaggccaaccctggaattggctttcagagattaacccaggccctctaccgatggtgttgcttcctgttgactcctaacgccgattccttgcctcatcctccgccttcatcatcttctgccttgcatccatgaggtgtgatcagtcacagggtgaacaatcatcggcggccatggccgcccgcagacctctggagcaggaggaaaacaggcctccactttacttgactcctatctgctcatggggtctgtgtccgcagaatcctaatgtagggggtgtgacctggaacatgaaagggacaggaaggaatagaactgctggctctttggggccataattttaatgtgctgacgtccattgtgcagaagagacttttcccagctgtcctggcaccacacagtagtctgtgtcatcaatcgagcctgctccagggcagctgggcacaggtgcaaggcccggtgcagggaggagcactgaagggcctgggctgagcagctcccagggtgcagcgctgtccccttcatggctatggagtggggagcaaacaccacctaccttccaaaacaaactaaaacctttccaacattctgcctcggttttttccccaccccctcttaaatcataaccaagaaaggacatgtatttatattctgtgaggaaaaagcaaagttttaatggtctttggtgtggctttttaaaatgataaatgactgttgagcttgtcaaatcatggctaatactgttttatctgggtgagatcagtaacagctttttaagggttaccatgctgttatttctcttcgtgttggtaataaagcaaaataactctgtggctggtacttgtgtgataatagagaaaattagtgaggggtgaagtttaggggcttagaagaaggtgaataaataaatgtaatttaaacaattctggggcaggcatccatcccaccttccttaacatctgctctagattctagtgccctgtagagtccaaggaggggagctgtccttgactgtgagcatagtggaaaccactggatggaggaagggtaggcacaagcctggacctgagaaacaaaggcacctattctgctttcaaattcagtcctgggagagcaggtgacctctgtcataggactgctatagggcaccagcagtggagataaccaagtgataagcaagtctttggctttccattaacagagaccactggtcccaacatggaaaagcgtcccagaagcctttcccagttgctgcgtccacctagcatacacacaggatggctctgatttcatgacacttctgccaacgggaagctttgggcaatcgacagcacaaaatgaaagacaacatgtgtgcttccaggctagtggggagggacgccgtaagctgatgcttctgagacagaaaccgaagggacaaggtgccaggagctcctatactaaaaactgtttgtagcacatttatggggattaagtggttgtggtgaaaacagcctgcacgtttaatattgatgacgttttaaaaagcaatgcactgcaaatatctgttgagaaatgaatgccctttaattgttcacaaatgagtatcttaaagaaaatacccatagagaagtcacctggatagttaaaaacattaactacccagggtagaggagaaaattagattgaaactaattcagattaatttggcatcaactttaaagaaatcaaataaataaatgtccaagttattagagtgtaagaaagtgttccaggaaccttttccacagaggttcttgatcttcctgtgtggcagttagtgggaaattatgtgacaaatttatcacatctcttgtcagctcctagcatccttgtaagattgctacaattccctatccagtctgtatctaatagagcatacataatgatttttattttaattccaaccaagttgaatacattataaaaccaaataaaattgtctatttatcaactccagagatcattagataataacaatttattgttgcagagttttgtgaaaaaattatcaaattttagatccaaactggtttagtgtagtgtattgctaaggcaaataggtggctaagaacgtagacttcctagttttgtggatgcaagcaaatggctgaatttgagggtttttgagctctggactagcccagtcctgagatttcctggttttagtggggagacttaggtaaataaggcattcaaagtgcttgtcctgttgtctgagatatgtaagtagctggtgatgatcatagatgctgacaacagatactgagaaagttgactcagagaggcagcttgggcctggaaattcaggcaaatggcaagcccctagggctgagggaagcgtgctttaggcagggcaccaagattccaatactaaggacgtggccagggtccactctctggagctggtataaactggagcttagtaatgaaaactagggaaaggcccagggtagaggtcggagctaccagatttggcaagatttctcaagcccccgtggattcagttgtgatatagagtgaacaatccccccatccgggtggctctggggacaaatgagaaacatgcaggaaccgctgagcatgtggaaggtcctgggcacatgccagttccctccttcttgctctttgtcactaactgtggtgcccaagtcctccccttgcctggtctagtctggggttgctggatgtggactcactcagaaccccacacttctttccaattgcagtctgagcagagggacgctgggacagagccctggactttcctaaaaccgggaaatcccaggacaggactagaccagagctcagtgagggctgaagactcagctgtggggctgcagggcttgaactccatcgcatgttttctcatgagcctggaaatccttcaataaatatgaacaacaaaagtgccccaaaggtgctgtgttagaaaggcacccatctggctcatgcctgtattctagttgagtcaataaggcaaatttaccttatgttgtttgtgggcagttgcaatggtcctataggcaatgaaaacatcagatcacagtttgcttgtgttgctgtgagaatctgacctcaaagaaaatactcccccaacccaaatccaaatctatgaaatgaagacacagcagttgtggtggggcactaattatgaatgttgagcttcaggttagggttgaagtaaatttgggctaaagtgctttatatattgagcattccaattctcataacattgaatagacactaaaacttaatttacgaaagtagtttaatagccaatggggacaaaaatttattcttacagttatcaatactcacttcctgcttagaaacttgttttcttccttaattaccagaaaacagagtacatttaataatcaatcatactaaatttaaaattagggaaagagagcttatggtgttcagcaaaaagggaaatatcaaaaaagacatcttagcatctggattttttggccaaaaggagagcctgcagtttaattaatggtctacatcaaacaggatattttatgaagcaatagaaagctgtaattaaatctagccttctggatttgatacatcacaaaaccaggagataaaaacaacagaaaattggtgatagggttgaaactcaaccttgttcaagaagcattcacaatggaagctgttgacctatattctatatactttacatttcaacagatagtctatgtttgaacagtgatttttttatatgtgaagattttctgtaaagaactgtattaacatttgtaaacagagtccaagaaaaattaattatgactccttttttggatttcacattggtacagcatgacctttaactcattatcttattacaactattagaagaatagtaaaaacatatttcatatacttttcaaatatttataatcatagtattctttttataatagttttcaattcttatttgatagcatgctatacaattatttttccttactaaactttcatagacatttcacttaaatgatttttctttttttaaaccatataacctgtcaaagtataaaagacacatacaagcggccgggcacagtggctcatgcctgtaatcacagcacttcgggaggccaaggtgggtggatcacctgaggtcaggagttcgagaccagcctggataacatggtgaaaccccgtctctactaaatatacaaaaattagccagccgtgatggcaggctcctgtaatcccagctacctgggaggctgaggcaggaaaatcacttgaacccaggaggtggaggttgcagtgagccaaaatcacgccattgcacttcagcctgggcaacaagagcaagactctgtcttaaaaaaaggatatatacaaggtacaaattatttgaattagtctatattgatctcccttttcattctctcagtttctctttattaaacctctttctcttaagaacataaacaaacaacaactactagaaaagctttaaagtccagcattagtcaaattgaagtactgtcctgacccggaaagcattatccaagaaagtgcatttcaaggccacctttcctaaaccagtctcaggaaggtccacgctctatttccctttgcaaaagcatttaagttaatgctgatatatgatttgtatttattaactcccccccgccccaaccaatgtagtcttttttaccttaacctattattgacttggtgacaagatatagagtgatcatggagctgggatccatgttcctatgtgtcatcagttagaagaatgaagaggccaagggagtcattctaatatttatatggaagaataaaggcccagaagcaggtaaatcattctaaaagaaggggtagggagtaagaggagggcttcctctaccagaaattaaagtgaaattccaagccaaagtaatcagaacagcatggtattggaacaagaacagacaagtggaccagtgaaaagatcagagcacttggagactgactccacccaggggaacatcatatacaataaggatggcctcataactccatggggagaggatggattgttggctaactgatgttgagaaaagtaatgactcatcagatatggagaatgatcaatctgcctatcaccatgtacaaaggtggactcagggtgaattgaagacttaaatgtcaaagtaaaaggtaatattaacaaaggaacatacagagaaacatgacaaggtcagggaaagactttttaaagaaaagtataagccaaaaatggattatctagattatatcagatttctgcctcatgacagataccatcagcagagttaattaagtgatgacaatgatactgagtagagccatgctactctaatcaagggtcgttatgggagttatacaatgcatattgtacaatgcatattgaagccaaaggcttcaataatgttcactgtgtgctcaacactgttgtagacacttgacatgtgttcaactcacttaatccctacccacttcatgaggcatgtgccatttttgtagattttttttagaggaggaaaggaaggtacagagagattagataatttgtccagaatctggagctgcaggataggagacttggaaaagaaattgcaatgtctgaaccaacaagtaattaactgacatctctagaacaggaaaagaagttctgtaaatcaacaagtaaaagatagcaagtcttgcagaggaatcagcaaaggatacagatagttttcatgagaagaaacttctccaaaaggcgactaagcacatgaagaaatgtgtgtgtctggggagctttccccttctaatactaggtcagtttctgtgtggtaacttgagaatacaatgaaacatcgtttaaagtaacctgtggcatgttactggtaccttgcaggctaaatacatcctaagtgtgctaatactgcagataccttgatccccttaggacagttgacccaagccttcccaggagctgtttacctgggggtgtcacctggctgcaaaacagggatgaacaatgcacagatttcaggggtcacccagggatgctgcgacctcagaacacgtcacatggaagatgcctctcagtttccatctgaaaagcctggtattaatccaataattcaatcaccaaatttagtagttgcattccccagattttcttttgggcaatccacagtttgtagaatgcttttctgtgttcccaggttcagaatttcagggattgcttctgtcttcaaggagcacttcagcttcctggttaggaagagaaggtagcagacgtgtagaaaaccctctgcgagactctgctctggcagttttatgggtaggcgcaggcctgcctgaaaccaaacgctttcctttttccttcaccctttcccgttgttgtctttttggttcctttggtatggtagtgtctccatgtgagtttccagggaagcagaggctgaagcgagggcgtgggagctgtttcatgcattagactctctggggagcagccacagggaggggactgagggacaccgcgggatgtccagagaggccggtccccagcgggtgggggcgggccagacggtgcggagggggagaggaggaagactgtgtccagggcatgagccttctggcattgtgggttcccccacgctccagcgccggaggggacccaggcggcaccagcgcgttaggctgcccccgggagcagtgctgcaggagccccgagctcgaggtggtgccggcagccgcgcgctcagagctccaacagggctgggccgcggccaaggagccaggagggtgcacgagaacgtcccatccagggacccacggatacttcgttcctgccagggtctcctttgggccgacagagttgtctctaattgagtgcaggcagccccggagcccgccgagagctgaggctgggctgggctcccggggactcgggcagctatttcaggcagacgcggggcatcgcgccccaatgcgcacagtgttgccgaggggcagaaagagagggtctcagcctaagccaggtggaaggtccgagaagaggctggaagggggcgatggtccagcaggagctgggatgaacaagggctggaagagcaggtgggagttccaggtgagggaagtgacctggaagcggagcagaggtcgcagctggcccctgctgggcctagtctcgcttctgtcgtgaccccttgtctaggaagatcccatcgcgaaggcctcatgagtcccacgtgaccggcacgcctgtgaggcaggaagctcagagtccaggccccgtgcccctctttgggggctagagcttctcccaggtgcaggcagcctgttcacaagagcggggccctcctgggtgaggcctcaggctccggttgtcacccctggcaggcgtgtgcccagcttagatccacctgcagctggctctgaacgctggatggggctgggttggggttttcctgtggcctggggtgagtcccagcaagccaccaccatccttgcccactccccacaggacagagcatagaccctgttcctaatcctcccaggccacactccgcagaatgctgcttctctgtttccaagcgcctgcatgtcttgcatcccctgccaccatcttttgtccgcctgaaggggcagccccataaaccttacttagacatgtccctgcccccagcacaggggctgccttcaagaccgcctttgtctgtggggtttttccttgatgactgttcagcatgccggccccactttcttctgcttgcatctggggttctcccaggctgaccagctgtccccacttgctgggagtgaaggggtttcctgggatacgaactttcagtattaaaaccaggagagtcccagacaaactgggacaattggtcaccctaactgacccacaagtagaaaaatgattcataaaatgtataataatgaaaagctgtgaattatttgcatgtataatagagggagaacatggttaaataaatgtggtgtagccatttgaaatagctactacagggatgaggaaacaatacctataaaataacacagaaatgttgatgacatattaaggaagaagaagtctgggttatacatttgtgcaaactgtatgatttcaaccatatttgtacactccatgtggtagatgggttgttggaaggtaaagactggctgcataggggccctaaaggtgagagcttttcaatactgctgcttacgctttcttcttaactaattcagatattattttgccaaatgcagagccaggaggtgtgaagcagccttcatggtggcaccacatgtgacacagatgagtagatgggtgcagcgttgacaataactgcagtcatattgttcatcttgatgggatttctgagtaacaagtcaaagatgcagaaattaaagtatacaaattggattgggttttcagtaaaggaaaaggcaccaaatcgtttctcagtaaggcacagtaaagggaggctatcaaaacctattgttagtaaaagtacctattgatgatctcttaagcaaaattgttacctagttgtccacgtgaaggaaaggactctctgaaaagagggggctgtttagagaagaatcaagcctctggcaccagaggggactccccagttaggaaactgttgtaacaaaaggactccatcgctcagagcaggatcagatgataaatcaggctgaaatggtataagaaacctacaattaccttcctccatatgaataattgaaaaggcaatggcttcatttaggttgtaatctgacttacagcttttaatagctatgctctgttaaagtgtacacattatcttttaccttattgagtttatattgctttatatcaatataatgatttttttactatgtaaaaaaatacacttacatagtaagtatatttacatagtaaaatcaataattttttttactgtgtagcaaaatacacttacttgattcatgaaccattaagtttttaaaatctgtgtgagataatgtattctctgggtttattttgactactgaaaatttctagtcacaagacattatagctagatacattccaggtgtttttaaatgttaaactgtcttcagcatcagaaatggcctcatgaggtaagtcattattttcccctattttcaaggatggaattgaggctgggagcagttttgtgactcacccaagttaagatgtcatgaaaaattgtttccttgcaaggtctgccacaccctaaaccaatgtcctgtcccaatccacctgacttgagggctgttagattttagatgtcagaatcacatggagggcttgtggaaccagactgctgggcctcactggagtttctgatccaatgggtctggggtagggcctgaaaatttgcatttctaacacttgcagttcccagatgttgccgttgtcacaggtcttgggaccacactttgaggatcactggtctagaaggaggcttgtattagctagtgatttttttcattgtgatgatgatggctaaccttacacttgaacaaaaaatgtggctttctttaaagaaaatcatcagaagttcagttctttaaaattcagctactactcactgacatggtgtattaccctgttctcatgctgctaataaagacatacctgagactgggtaatttataaaggaaagaggtttaattgactcacagtacagaatgtttggggaggcctcaggaagcttacgatcacggtggaaggggaggtaaacacttccttcttcacatggaggcagcaaggagaagtgctgaacaaaagggggaaaagtctcttagacaaccacgagattccatgagagctccctcactatcatgagaacagcagcatggggtaaccacccctgtgacacaattacctcccaccaggttcccccatgacacatggggattatgagaactacaattcaagataggatttgggtgggaacacagccaaaccatatcattccactcctgtcccctcccaaatctcatgtcctcccatctcaaaacacaatcatgccttcccaacagtcccccaaattcttaacttattccagcattaactaaaaagtccaagtccaaagtctcatctcagacaaggcaagtcccttcaacctatgggcctgtaaaaccaaaagtaatttagttacttcctagatacaatggggatacaggcattgggtaaatacagccattccaaatgggaaaaattggccaaaataaaggtgctacaagccacatccaggttacactgatgcaagagatgggctcccacagccttggacggctctgcccttgtggctgtgcaggatacagccccgtcccagctgccttcatggctggcattgagtgtgtggcttttctaggcacacggtgcaagctgtcagtgaatctaccattctgggttctggaggacagtggccctcttatcacagctccaccaggaagtaccctagtagggactctgtctgagggctctgaccccacatttcccttccacactgccctagcagaggttcttcatgagggctgtgccccacaatacacatctgcctggacatccatgtgtttccatacatcctttgaaatctagatggaggttctcgaacctcaattcttgtcctctgccaacccccgggaccaacaccacatgaaagctgccaatgcttagggctgagacctcctcagcctggattccattgtccactatcagcattttggtcaaagtaattcaacaagtctctaggaacttccaaactttcccacatcttcctgtcttttgagccctccaagtctctaggaagttccaaacttttccacattttcctgtcttcttctgagccctccaagctgtttcaatctctgcttgttacctagttccaaagttgcttccacatttttgggtatccttgtagcagcaccccattctctggagtaccaatttactatattagtccattcttatgctgctaataaagatataaccaatactgggtaatatataaaggaaacaggtttaattgactcatggttctgcagggctagggaggcctcaggaaacttacaatcatggtagaaggggaagtaaacatgtccttcatcacatggtggcagcaagaagtgctgagcagaagggggaaaagctccttagaaaaccatcagatctcgtgataactcattcactattatgagaagagcagcatggaggtaactgcccccatgattcaattaccttccgccaagttcatggggattatgggaactagaattcaagatgagatttgggtggacacagcaaaaccatatcacgtggtttcttttactgaagcattttcccctccactgcaacttgcatacctgtattgcaactttcaagtgctataaaaatagcacatacccccatcaggcattgatagcacctccatgtgcagattttgaaggtaactgaaacttcctctgccctgacaggccatgctgctgctcagtgtcttccgctgctgtctccaagtggtgttcttgtcatcctggaagccctgccttgggccatgcctgaaatgcactaatatgctcatttgtgaggtagtacagagtggtcagggcatccaggcacatcatggatgatggggcactgttacgggtgctgggacactgccatgaacaagaggcccaggtccctcccctgtacctctgtagtcggtgccagcctcatgccattcagctaccttcacccataatgtccctgcaccctctctgttgagtctacctcctcttcctcctccatccagcctaggtctctggcccagttcttcagcccatatcttccagtggccccactgcccttcccactggcctgcctgggctgagagcactgctggagacaccactcccagtacatgctgctctgtcctctctagttcccggtgtcctgatattgcctgatagtcatgttgagtgtcctgacgtccactctggctctccagactctgttctctgccaacttccaacctgcccctccccactcataccctctccccctactcttagcaaaccactcactctccacttccctgagaaaatagaaaacttggaataatacgcttcttcgatgtcctgcaccaggacaatcaacttctctatctctgctcccatagcttccttctaaccccacagcagaagagttataatactgccccctgttgaaagcttattttccacctgtgctctggtccccacccctcctggcttctcaggtgatttccacctgcctaccacacccttgatgcctgtcttcagtctctccttcactggtgttctttgcttgtccacccttaaacctgcttaagttcacctgtccacgcttaaacctgcttaagttcacctgctatttaaagcagtgtcccttatccctgtgttcctctgcagctgagcacctgtaattccctgtcataggcacattcatcatctctacattctcaccttccactcactcctcaacctagtgtggtctccatcatccccgccacaccacagaatctgtgcttcccagggtctctgatgaccttgaggttgctgttcactcacctcctcacccctggtcttatgtatcacaccaaagtgtcagctgtgcaaaagccaggaataggattcctactctgtagggacccctgtggctggcgcaggtagctgccatagtcaccggttcatatttcaccgttctgctcatttcgtgctccctggtacatctcttatttcactgcttgcatattctgtccaagctctgataaagccaaacacatttaacagatggacacaactggccatgcttcaggcttctgattcacccatacttccaggagccatgaatctgaaatctggagctggtctgtagaaagcattctatttagtgaaatgttgaaggaattttaggtcaactatcatgtatttcattgtctccaatgccataatttccaagtgcctacttgaacagtagatactttcaggggattttcatatcaatgattgcattttgccattgttctttattttttcagtaatgctccatctgtaaacaacccaaatttcaaagcctgacatagtgtattgacaaattattcctggatgcctgtttttatcaggccaaaatccatagttattctaaaatggatatcatacaaataatgctgctgtagcatgctaacattttccagactattatgaaaatgtttagctcatttacaagtcatgggaaacaatatcggaatttgctactgtgtagaaccattactatagcacttccagtgatgcctgcttgtgatctttattgcccactttatagttctgtattttcatctccattttttaatccttaaatatacaaagtaaaatgtaaatatcttttttgtgggtcttttagaattattttttagcattagcacttgtaaatttactggaagtttcaacaatttgtatttcatgttagataaaagtaaggaagctttcaaagaaaagtctaacaaatataacacatgtacccacctccccaaatgaaaaaatgttagcattttgttgtattttatttagatttttttgcagagaaataagccattatacatcaagttgaaattctacttactattgttgtgcgacaaattatctcaaaacgtagtgatttaaaacaaccatttttttttactcacagattatgagagtcatgaatgccgaacaggcacaagaaggagtgtttctttctgctccacaaagtgcagcttcagataggaaggcttagaggttgggatgacccaatggccagggcaggagccgtcagggtgtcttaatttactgatttggcagagagtagtgctgtcagttgggccctcagttagctgcaacaactgcacatgatacctctgtgtagcttgggcttcctcctagcatggtggctgcagacgtcttacaaagtggttcagagccccacaggtgtgttctataatagctcacaaggcagaagctgcattgcctttcaggacctagcctcagaagtcacactgcctcatttctgctgtattctgtcagttccaggagagtcacaagcccttcctggattcaagggaaagggaattagatgccatttcctgatgaaggtggggcaaagttttgaaagagcatgtgtgggggactcatgccatctttggatagtcccagtctccctcctcaaggacatcaactcttgtagtttgtctccagtccaaacatgtgtgggcactttccctgcatatgtgggtatccacgtgaatgtctcttcattgcttctccatctttctaaaaagtaatcacagagagtcatgaaatccagtgttagaaccaggcattgttaatgctcttatgttattattattcaagctgggctaggggaatgtggcattaataaaacaatatgtacattggatttagttatactatactctctattctaatactttgtaatcattagtaataaatagtagcatattacttcatgtaggattttgcaaagcttaaactattttcacatttgttccttcagtccaggcttcctaaaaataaaatataataagagtcttgagacttaagttcatattttgcatgaatcagataaaataatagatagtaaaatgctttgtaaactgtgcagagctattaagttgccccttatcattaagtttttaagtctgattttctgatattgtaatcctgtcctaggcttcctctcatttctttgctgtaatctttgcttctacctcatttcttgtgtccaaatacaatcagttattcaaggcctggctcaaatgctgcctagaagcctttcctgacacagacctcccagcttacctcctctccctcctctgtgcttttatcgcattctgtgtttctctggtagattatcttttgtattctatttcacgtatcacatcactggggctcacctggaagcttctagcaaaccaaaccccagtctctgtagcccttagtgcacaacaacatgcctcccacccaggagcaggctgtgaaagtctttttattttttaattattatactttaagttctgggatatgtgtgcagaacatgcaggtctgttacataggtatacatgtgccatggtggtttgctgcacccatcaacctgtcacttacattaggtatttctcctaatgctatccctcccctagtaccctaccccctgacaggccctggtgtgtgatgttcccctccctatgtccatgtgttctcattgttcagctcccacttatgagtgagaacatgaggtgtttggttttctgttcccatgttagtttgctgagaatgatggcttccagcttcatccatgtccctgcaaaggacatgaactcatccttttttatggctgcatagtattccatggtgtatatgtgccacattttctttatccagtctatcattgatggacatttgggttggttcccaagtctttgccattgtgaatagtgccacaataaacatacatgtgcagcgtgtttctagtagagtgatttataatcctttgggtatgtacccagtagtgagattgctgggtcaagtggtatttctggttttagatccttgaggaatggctacactgtcttccacaatggtggaagacaatcccaccaacagtgtaaatgcgttcctatttctccacatcctctccagcatctgttgtttcctgcctttttaatgattgccattctaactggcttgatatggtatctcattgtggttttgatttgcatttctctaatgaccagtgatgacaagcttttttttcatgtgtttgttggccggataaatgtcttcttttgagaagtgtctgttcatatcctttgcccactttttgatggggttgtgtttttcttgtaaatttgtttaagtttgtttacaagtgggatgacagtgtaaagtctcccactattattgtgtgggagtctgaatctctttgtaggtctcgaagaacttgctttatgaatctgggtactcttgtattgtgtacatatatatttaggatagttagctctttttgttgcattgatcttttactattatgtaatgcccttctttgtcttttttgatctttgttggtttaaagtctgttatatgaaactctgggatgaaaattattgtcattcagaatgtcgaatactggcccccactctcttctggattgtagggtttctacagagagatccactgttggtctgatggacttccctttgtgggtaacctgacctttctctctggctgccctttacattttttccttcatttcaaccttggtgaatctgacgattatgtatcttggggttgctcttctcaaggagtttctttgtggtgttctgaatttcctgaatttgaatgttggcctgttgtcctgggttggggaagttctcctggataatatcctgaagagtgttttccaacttggatccattctacccatcactttcaggtacaccaatcaaacgtaggtttggccttttcatatagtctcatatttcttggaggctttgtttgttccttttcatgcttttttttgctgatcttgtcttcatgatttatttcattaagttgatattcaatctctgatatcttttcttctggttgattgattcggctattgatacttgtgtatgcttcacaaagttctcatgctgtgttttttagctccatcaggtcatttatgttcttctctaaactggttattctagttagcaattcatataaccttttttcaaggttcttagcttccttgcattgggttagaacatgctcctttagctcagaggagtttgttattactcaccttctgaagcctacttctgtcaattcatcaaagtaattctaattctccatctagttttgttcccttgctggcaaggacttgtgatcccttggcgagaagcagtgtcctggcttttggaatttttagcatttttgccctggtttttcctcatcttcgtggatttatctacctttgatctttgatactggtgaccttcagatggcgtttctgtgtagatgtcctttttgttgatgttgatgctattcctttatgtttgttagttttccttctaacagtcaggcccctctgctgcaagtctgctggagtttgttggaggtccactttagaccttgtttgcctgggtatcaccagtggaggctgcagaacagcaaagatttctacctgtttcttcctctggaagctttgtctcagaggggcactcaccagatgtgagccagagctcttttgtatgaggtgtttgtcaacccttgctgggaggtgtctcccagtcaggaggcatggtggttagggaatcacttgaggaggcagtctgtcccttagcagaacttgagtgctgtgctgggagatctgctgctatgttcagagctggcaggcaggaacgtttaagtctactgaagctgtgcccacagctgccccttcctccaggtgctctgtcccagggagatgggagttttatctataagcccctgactggggcttctgcctttctttcagagaggccctgcccagagaggaggaatctagagaggcagtctggctacagtggctttaccaagctttggtgagctctgtccagttcaaacttcccagaggctttgtttacacggtgagggggaaaaccacctactcaagcctcagtaatgatggacacccctcccccaccaagctcgagtgtcccaggtcgatttcagactgctgtgccggcagcaagattttcaagccagtggatcttagcttgctgggctccataggggtgggattcactgagttaaaccacttggctccctggcttcagccccctttccaggggagagaacagttctgttttgctggaatttgaagcaccactggggtatgaaaaaaactcctgcagctagctcagtgtctgcccaaatggctgcccagttttgtgcttgaaacccagggtcctggtggtataggcacccgagggaatctcctgatctgcacgttgtgaagaccatgggaaaagtgtagtatctgggccagaatgcatggttcctcacaggatggtttctcaaggcttctcttggctaggggagggagttcctcaaccccttgcacttcctgggtgaggcaatgtcccaccctgcttcagctcaccctctgtgggctgcacccactgtctaactagtcccagtgagatgagctggtgcctcagttggaaatgcagaaatcacccaccttctgcatccacctcgccgggagctgcagaccagagctgttcctattcagccatcttgccacctgtgaaagtcttttgaatggatgaatgaataaatgaatgaatgaactgttttttcactggcttcatatgctcatgcctcactaaggttgtagaaaatacaggatcttgaatactttaaagtggcaatgtcttgtgagacagacatcatccctgctgtcccaaaattacccagcgtgtgtggagaggcccctggctttggagatggggggcatttcccttgactcccacctcctcagcaccacagggctcatctctggggacctggctttccagttagagcagacctggatcaagaagggccacaggaaagagaaaagaaagacttggcagtgggagggcagggcgttcaggcctctccagggaagggtgccaacctctggacttagcatgatgtttttaaaagaaatgaatgtgtgtcttgtctctaccttcaacttgtaaggcaagtgcagtgccagaggctggggtatctctgctgcccaggtgcactccacagagacagagcaagagcacgtgcagactgtgctgtccaactcgcatagaaggctgacaaccacttccgtcctaatggggaaagtgaagttggcaaggcagaaatgaccacatgctcacccaaaaccttggtagcagcatgtctttccagaaattttgcaagccagatctggaaatttgatggctttgctcctctttttcctgaaagaaatggaaggaatcaggctcatgaaaagccagatttcacctccatgcacacaaccaggacccttgccttcctgaaatgccccacaggctttcacagaatagatgcagtcttagcagtgggcagcttgcttgttgtctggcctaagtctgagccaagataaagacatataaactgccaaggagacactctattccagaaccttctcttctttgcaaagcaaacataattttaagatcaagatgcataactcttgtaatcaaaagcttacacatttcctagcccccccaccaccctccacccccaagcaatgggttctaagcaatataaactgccaaagtggtgtgtagagggaaataaaaaccagactggtaagataccaacttttttataccagtttcagaaagtgcttatgcagagcaagtgtgggacaatattcaattggcaaaaatatgatgaaagtagctcacttaagaaaggaataaagtcttgtttattgaaagaacagtgacaagtttttttaaattctgaaagtcttgcatatttcctgcactgtatatttacctaagtacaagtgttttaagaatgatctcttgagcctgcttaaatcaagaacgcatatttcagcaatttgaaaaaaattgcatttctttgttcatggctgttctcggggttgagaggtatggacccaggagtcagaggtctgagtttaggcttccacctgctaactagcttggaacctctgactaggtttttaaaccctctaagtcttgggtttctcacctgtagaatgaggataataatcatgtctacctcacagtattgttgggaggacttaatgagatgtagagaaactaatctaaagcctggctcacagaaaggtaatgtgaagtctcaaaaaaagtgaattttacaatagcaaagacatggaaccaacccaaatgcccatcagtgataaagaaaatgtggtacatatataccatagaatactatgcagccataaaaaggaacgagatcatgtcctttgcagggatatggatgaagctagaggccatcatcctcagcaaactaacacaggaacagaaaaccaaacaccacatgttctcactcataagtgggagttgaacaatgagaacacatggactcaggcaggggaacaacacacaccggggcctggttggcgtgggggcaggggggtggtgcggagaggggtgaggggagggcgaacaccaggacaaagagctaatgctcgtgggtcttaaaatatagatcatgggttgataggtgcagctaaccaccatggcacacgtatacctatgtaacaaacctgcacatgtatcccagaacttaaactaaactaaaatttttttttaagtgaattttagccactagattttagagttgaagcatgccatggtacttgtgattaggcatctacctgtgtatttattcacctgaacacctggatgtgtagaataaaaattgctcaattgttgaaggctgctgcatcgctctatgctacttgttctgttaaagtatgttcagggagccagcccagagaggcacctccttttagctctgtgaggccttaaagctgggtcaccatgaagtccctgtatatatattttttgttttaataactccaagtaaccaaatgaaaacaattatttataaaatgtattaagaagtaaatgttatcaatttgggactttgcacaactattattaatgtgacctcaggtcccatgacaaattagaatggcaatcctgggtgagaagttaattttgtcctgaagctggcagaatcaacatgcaccccagttgtgggataggcctgttctctcactccatcacatccaacacctggcaaggacagcttttggtatgctaaagaatttgggaaagatgctgttggtgtaggggcggggagactagaaacaagatctttccatgggcagagctcttcagagcttgataacaaagtttggtctgcagcctttgtcaaataattataaactctccagttgaaacagggaaatgtgggctggcgtggtggctcacacctgtaattccagcactctgggaggctgaggcaggtggatcacttgaggtcaggagttcgagaccagcctggccaatatagtgaaaccccatctctactaaaaatacgaaaattagctgggtgtggtgatatgcacctatagtcccagctactcaggaggctgaggcaggagaattgcttgaacccagaaggtggaggttgcagtgggctgagatcatgccaacacactccagctgatagagtgagactctatttcaaaaaaaaaaaaagaaagaaaaacagggaaacgtttgcaaagcttccatctccaggttgacttcagtcaataatcctattgtcttaaggctggagtggacttccttgaagctctttgcccagaaaaccttgccaaaactctcctaagattattaagagttttctcgagtctcttttcctgattccaatcaactggaaatgttatgaaaataattctgtggtcaagtctcacttactcttgctctcaaacacaatccaccaaaagaacaaaacacaaagtaaaagtggatgcaagacacaagaggaagaggggccctctgcagaggctgctaagcaaacgtaggtttggctcaaagatttttgtttctttgaatcagttcactatttttaacctgtggaaatttgttcactcattctaacagtagcttttgctttgtgaaattggtttatttagtgttatgttcctcctgtaaaccttttcattgtatgtttttctcctaatctaatggtaatcctctcagtgatatgagtaacctggtgtttgtatttaacactccttcaacattcacagaatcagaaaatatcagaacaagaaagccccagccttcaagattgtttgatttgtgttccctaattttatgtgtgaacaaaactgaggctgtgaagattctagaataatatgttgagctcaaaaatatggtagtagaattagaatatagctttctaatatttgtataaaagtcaatgatatttagaagtttaaaaaagatacacattaaactgggaaaatactaaatatttaaattctgtaggctagttttcatattctggaaaggtggattttcatatggcactggtgctggtgtttcatcaggtcagctgtctatgtcataagagggtgttcttattagaaaatgtaggctttggcaagctttaaaaggtacacgtgttactgcatgttctgacgagattttgaaaatctttggcaactgtgctttccaagtggagaaaaagggctaccataatgttgaaagacggaaattaaaatctaatcagatatggtggcccttatcctccaccttagaatttcttttcgtggaatgtctggtggacagtaatatatagaggctcctcgacttaggatgggatcacatccagatacacccattgttaaattgaaaatatcataagttgaaaaatgcatttaatatacctaatctaccagacatcatagcttagcccagcctactttaaattgctcagaatgcttacactagcctgcagtcgggcaaaattatctaacacaaagcctattttgtaataaagggttaaatagctcatgtaatttattggatatagtatcagttgtttccccttgtgatcgcatcactgactgggagttgtggctcactgccacttcccagcatatatgactagcctggaaaaagatcaaaattaaaaaacaaagtacatttctactaagtgcatatcactttcacaccattattaagtcgaaaatcgccaagttgaaccatcctaagttggggaccgtctgtagatcaggcaatccttgacattttatggcggcagattgccaaaagagattggagtctagaagtcctggaagcagccccaacaattacacagaactcagcatcatgccctcacatcaaggcaaggagggagagttgtccctatttttcctttccttgaaagggatagtgaaactcattctgaggtttttaaaaaatgtactttttaatgcttttcctctatctgttttgctctcccttgataccctgtctacatcatgatggctgtggcactgctcctgctccttacatggggtcttagaatgcacaaagctgcccaatatcactttctctgtatttgaggaaaatttctagtagcaaaagaatatcctctgacactcttttcaaaatgccaactaaatgtgatagaactactttttgcaacagtgaagtcccaaagtctctttcttcctgatgggttaatttagtaccttcctttttccaaatcaaagaaccataaaagtcagtgaaaatctgcattattattatcctgtgtgtttagttttgctttttagtacttaccattattaaacacttggcccatttttggctaattgttgtgtaattccaaatacaaaccagtcaccatggattattgcagttagagtcatcagaaagcaaggagctatgactcatgctctgttcttgccatgtttttctgatttgtatttcatttcttacctgtgctcacaagtcacatgaagatcaatacatctgaaatatatatgctgactatgtcaccagattttatttctcccatcattgaatctggacaggcttctttcaaaagtgttgagtcatttttatgtctttatcacactcttctaaagtccttaaaactcctaattatttcagaggattattgtcatataaggtatacaaaatcaattatatgaagaagttgtaatcactataattaaactgaggcttatctagacagatcctgtgtcatatttttcacataatgaggctaaaaactttgtggagaaaataatggatatttatagaatatactcaagtgtatttattttagaaggtctgttagacatttcacaaaagaatctgtaatctacagaaattaccaaattatgttacataatattttaaaaacttgttttagaataagttggaatgtgaggtttataaaacaactggaataataaactgaaattataatttaatttttatacccagtgcatttatttttcttcctatgacttgactatagtttaaaattcttataggtttagtatcccttttttgaaaacaggttttcaatgtgtttctgtaacaataatgaaaagtaaaggcatgtaatctcttttccaaaataaaagattggtttgagaattatgatcatatatacaatgtactaaatgcaaccttttatgatgatgatataaaagattcacagactcacaaatcatatgccactcaactaaaatactaagagaacataactttatctttataaaacatatacataggcataaatacatagacaaaggtctagaaaaatatgcatatcagtgtggaaatgcaagtgatgataatgatttctgttgttttcttctaatttctatagagtcactatgctatttaaattttcaaaaaattaagttatgtgcaataatctttttaaaattatttgttttttaatcagctttttaatctgatgacatagaatgataacgtagtaaatcatagtttctgaaccaaaaaacagggacacatagactgagaagtgccaagttcattttagagattaaaaatacaacggcattgggacttttctagaaaattcaagatatgtggtcacaattgaggtgttcagcttctagagcgaactgaaccagatatctgctaaggctctgatagagaacagctggaagctcagaaaggtaaacataattcaaatattggtgaatatgccagtgcagccgagaaggtgacaggatttgaaaaatgtgccaggacacaatgagaaaggccttggaataaatacaaaaagcccaaactttattctgtaaaagtggggagctactgaaggttttaatcaaagcagggataatctcatttccaaggcaaaaaaacaaaaagaggcattccttcctaataccacatgtaggagctgttcttattctatggtggattattactttagtagtatcttataaagacagtgcctgaaggtcttttatctgtacattgatgtaacacttttcaaaagcatatcagcagacacatttttggaagcatgcattctgaaacttgaacttcaaataggagttatggctgatatcatggagtaaggtaaaacagaagctgactcctctccagtattcaaggctgactgttgtctctggaactgagaatactgggaaaagtgtgagttggacactgtgcacaactctaattaacactgttctaaagggaaagtatatgaatatattgtttaaacactaatagttaaaagttatactacaatatcttcaaggtttaacacataaattgagacacacacttaattaggcctaagaaagaagtggaatgtaaactcgttgattttattttcataaatgatttattttacaactatgaagaggaataatagaggccttttattagcaaagagattattatgatgtctattttcagccatgatttttctaccaatggaaagtggaactgaaaacctacttagggtgatgtgttggggttgggatcaaagagactactataactgtcctacctctgagattccagcatcacatgtggtgacaataacacttcatttagttatatttctagtgagtccagtggaatggagaaaattttttaagttaaaaattctaaaggacatatgtataatggtaggaattatttagtcttcttaataaaataaatcatttattttagaattattttgtagtctgaaagcacatttcctataatttttaaatgtgaaagcaggcaatattatcttgtaggtattgtattatattacaagagccaaagcatgctgattcccaatttcatccagtatgacttgtcttagaaaaagaaataaaaatgcagatccatttattcacttattaactgagtacatttcctgaatccatgtgcacgttgggtgataggaagctgaggccctgctggctaaagatgtaagagaacagagcctaaaactggcacaccagctggaaattaggagggcaagtttccctagaaatgggagaaccacagataggatgaaccccaaaatctgaatataaactctttccaaatacttggctgaccaccaacttatgcaaacataagggagacttcagtaggccagcctgaaacaaagcaactgcagaagctgaaaaatttagggatttgtcagttgctgcatatcacaggagagcagagcttgtagtttgagtccaggtcagctaacttcttaccagaacaataagccaatgatcaccaggagagcacaatagaactcagaaaggctgcagtgactattatctactagctttaggccctgtcctctgatatatcaagctagtaagacatgcaaggaaaccaggaatgtgataatgcctggggctgggagattatggaaattgtcagtcacccaaaactgactctaaataggcctccatgttgaatttagtagtcaaagacttcaaagcacctattgtagatatgctcaaccaaagggcattaaaagaattaaaggaaaaattgtcttaatgaatgagtagatagggaatctcaacagagaaattacattattaaaaaaatggaaattccagagctgaacaagtacaataattgaaataacaaacttgctaaacagtctcaatagcatattggagatggcagaagcaagaataagtgaaattgacaatagatttttaaaaatggcccaatcttaagaatagaaagaaaaaaatacccacaaaaaacactatcaaggagtccagcacacaaaatccaagctctgcctgtgcattaggcttcaggacatgagggaatggcagtgaattagggctgcactatgccaggaacactcatttaccacaactggatttgtcagcagttcgagtgaactttccttaggcattatagaattaactgtacttagagagaggttcttggttaacctcagtgttttcacattttaaattatttcctaagtttcaagtgaaactaaatatcatttgaaagacttttaaaggcagtctgcccaccccactccaactcaccccaatttccactaacaactacttcaaatgtaattgtcagaaagagcaccccactccactgcaccccaaatcagcctccgatagatattgcatctgaccctggggggcccttcccgctttcctcttgctatgctcactacactttatttccctcaatgaaaactccttccccaccctcctaatgtgtgacttcacattctatacatagaatttctttttttttccaaagtgaatatagttttatatattttttaactacataaaaataaaacacaatcaatacaaaaagaaatggataaaacgcaaatgtgaaaacaaactcaccaatcaccaaccactcagaactttaggtcagtttaataggtgtcctcttctgacatttcagtgtccagtctgccctccttatccatggggtctgcatccacagatttatccaaccatggatagaatatatgttttaaaaagcaaaaaaaaatatataaataaaaaccaatacagtataacaactatttacatagctatgttgtattaggtattgtaaataatctagaaataatttaaagtgtatggaaggatattcataggttatatgcaaatactacatcagttttggtgggggggatggagtctcactctgtcacccaggctggagtgcagtggtgccatctcagcttactacaacatctgcctcctgtgttcaagcaattctcctgcctcagcctcctgaatagctgggattacaggcgcacaccaccaggaccagctaattcttgtatttttagtagagacggggttttcccatgttggctaggctgatctcaaactcctgaccctgtgtgatctgcccacctcggcctcccaaagtgagccaccacgcctggctcaaatactatatcattttatatcagggacttaaacatctgtggattttggtatccaaggagggtcctagaatgaatcaccagattatggtcatctcctgaggatgattgtatatacataaattcggggtgttttacaccaatggaatcatatgcccagttttataatctgattttaatttttactcagaatgtggatatcagtccaaatcaataaatatagacaataattgacttagttcagcagagaaactggaatctcacactaagggtgaggaaggcgggagacaggagcattcagggaggggcaactcacaccttagagaccaggaaagactcaggtgtttctaagccaggggagccagtggggctgaacacaagagaatcgtgcaagctttaagaggagcatccagatccccagatctccggttcctccaggcagccccaggggtctgggaggctgggtgggaaggagatctaagtgctccctccatgacctgctgctcgactcccaccttccttccaccctcagaatttctctgtgggcctcattgtgactccgctcccctccttcccacccaggggaagccatctccacatgatggactttatctgtgtgcctcatcatgtctccactcacctctttcccatgcagggaaagcaggctccgcacagtgggctttctctgggctcctcttcttgtctcacagtctcctcctctgtggcttatgctctcaggttcctggtgcatttatcaaaccagcgctccgggtcctgctcactctcctctggctgccagtgggcagctccctgcctcccagtgttcttaagttcagcagttataattttcatctccaatgattcctttttgcaggatgctcctttttcatgattaattgctctcattttgtcaatgcagcagactcttgtgtctcactgaaagcatgaattcaggtttttagttacttcttgtttcttgtgtactgttgtgcatggaatcattttctccagttctgctcttctgaagaattgtgctgagccctgctgccctgcctggccagcatcttctcttcatatctgtagatggacagagttgttcggtgtagcaggtgccctgcgttctgtcatgggagacacagtgccttgttcaattctttcacttcccagttactgtattttttctggttggtggggctcagggggagatatccaagggttcaggagctctggccacttttccttgtgagagtttgatggggctgaacaagacagttagggaaggaggtaagccctcccttcaggtgctcagcccctctgacctctgtactgtctgccccgtggcctccagtccctcaacacacacctgcacccaggaccaagcttcctcggccctactgtgcgcagctggacccatgggctcctgcacaactggaccccagaatcctccctgcagccttcctctgccttccagccgacgcaggagctgttagtgaaggggaacagaaaaatggatccataaatccttgcttacctccctcgcaggctctcttgcctgggacagatgacatggctcctgcctgctctgctctctgtcaaaacttccccaagtattgagtctgtgggcatgaccattctctagtttctatctgtggcttggaatttgtgttaatgtattggttgggtcctttcaattggaatggggagagagaggaatccataaatctgtgactcagtgacctttaggaattggaagccaaggtctatttcttatgtcttattttgttattgtgcatagcagtgtctctcaactgtttgaatccaggcccctggagatgaatgtggactgtcagtggtgtggctttttccacctgcaccttctgcagagcagggtgcaccttgagcaccttgagcacgggcaccttctgcctgtgcacctgtgcacatgaaggagcctcttggggtcttgctgcctttggggcttttgctttcgcctccagctccttatacttctgcccatatatctcactctctgttttccagcctgtcttttctgttttctgaagtctgccctttccccttcatggttaggtgaaggaaggggaaatagaaggaaatatttgaagaggaaaggttgtggcactgcagggtatttgtgactttgtccccaattgcattcttcaagtgcagttcttggtttttagggtatctctttgagtgagattatctttaagtcttttgtccttattctgagaaaatcttataaagtttccctatatcttttcatagcctggatttctcagaaaacacatggagaagcaaagcttctgctaggttgctgtgggaaggggaagtataggcccaggcgggcagagtgagggaaggggagtggggcagagtgggcaggaaagtggacacatgtgggtccccacagagccctccagatcccatgcatagagcagctgctgccaccagcagcacagacatcttccaagggctggcagagccagggcacctgctctccaagaagggcagaggtcggcaggcatgcacagcacttaccccaaggcatggtgtcattattgctgttgctttggagcctcttatgggactggaatctgtggagaggatggagagagtaatgcatctggaatggacctcctggctccttcctatttctcatcttgatggtcacactgcacacttcccaggccgcttggccacctcactgtcatgcagccaccaggacagccagatccctgctccaagcactgcaggaggagtcctcctccagcagggtacaacctggcactgcagctgctgtgactcatgcgcatggcatcaaggcagccatgcccaggcccagctcttacctctggggaagatagacagctgacaggtcaggacacagactttggtggcaactgcccgagcacccacatagcaagttgccgaggccaggggcatgcagagccaggaaaacctgggaagatgcataaacaggcccagcccaactttgctttctgtaggtttcaggttggcagaggaaagcaaataagtgaagaaagagtggtgggggaggagcattggacagagggaaggaggccaaagacaaactcttctcactgcctgtaagtgagcaggagtctgacccccggcttttctcccagagcctgcttctggctttacagttatcactgccacactcatgagcagtatttccaatactgcacagcaagaggggctcccaaggaaatacatgtagacccaatctcagcttaggcaaaaagatttctttgctacaggatttgtcagaaccttaaaatgtcaatgtattggaatgtctgcattcagaagggctatccgagacattatactaatgtatgatggtctccactcatgtttttggaggcctcatgggagtagtgtttataggcgtcaccttaggaaatgctgccctagacttttctgactgtttgccagccccatcaggctttggatctcgtatcttcagaaatgctgtcagtattttccaaggtaaaaactagtaaagaaaaccaaacaaaaatccagaaatgtgctcagttaatagttctcctagtatcttcccagaatagcatgtgcatttcacccttgtcctggagataatgtctattacctggattataatctggaaatgaattctaactccttttattatgggcatgaccttgtttctgtactcccagcctccaaccagcaagaaaatgggggtctcagtcccacagccacaaggactgggattctgtaaatgccccagatgagctgggaggcagattcctccccagagcctgcagatggagttcagcctgcccctgacaccttgcgtgggagacactaacagggagaagagctgagcctcccccagccttctgacctacagcaccatgtgatcatgaatatgtgttattctaagccactaagttggtggtaatttgttatatagcaatagaaaacagatgcattaagtttgtctacaatgcccatgcctgcagtcatattctttggcttcctagaaggtgaccagcaatacatgtcagagtgtacaattagaaaaaaaaatacaaacaatacattatgttgtggttctcaaacgtgagtgtgcatcagaatcccctggagaagtgtattcaaacacagatttctgggacccacccctagaaattttgactcagtgtgcccgaggtggatcccaagaatttgcatttctggtaagttcccagatgatgctgttgctgctagaccaggaaccacactttgagaacactgtgttaagtcatgagctctccttttgaaaataatgatttactaagttgctgtatgtttctcaatctctactttaattgcttattttatgataaaaaatatttctataaaatgctcatagaaatgcctcttattgtgagtccagtccccattaagttgcctgtctacattgtgcttctgaatttagtcatttttccctttgggactgttctatacaccaccttattcactatttttattttcttacaaataaactttacaggaatcagcttaagaagctaacagcaattatctgcaacaagaataagtatgatgaaaatagagatgttacctgattgtggttctttattagagagtaaaggaacagagaaagaattaccccaaagctgcattgtgcatcagctgctaagtcatggcctgcttgggcaggtacgagaccagtgttaggaaatgcaataatccagacaactggagctgcagggcactggctgtcagttacccccaaaccaaggagagaagccaaggggaagactcccctcttgggctcccaaagaggtgaatgtattagatagtcactggctagagcatccaatttagtcatctttccagaacactcacggtcagatgacatgatgatgaaatatctcgtatagaaggctgatcatctcacttgattaaaaagttgtgtgacctgatttttccatagaattggcccttaatcatgagccatttttttgtcttgtatttaatatcagtcttgtgccagttccttggaatatccaactgactgatccaatcaatgaacgagtgtttatggagagtctaccaagtgccaagcaggagaacatcaattctgtcagccagtccttggaataatccaacgtggccatgtgggaggccacggcaaaggatggccaagcaccttaactgacagggttctgttcttgttcacagtggggagggtaattctccaaaattcagtcctgccactgccactggagcaagtaaggggtgtcaggcaactgtcactgtgccctgatgtgcagcgtggcatgtccacttgactctgtgacacgtctctcctcctagcccactggtagagcaggtcagagattggtcccttcttgaccatttgtactcccagtgttgatgatactacacccagatggtcagagcgaggctgcaatttcagctcttaactcatgccccggcttagcactcttctctcttagtggaagggaaaccctggtagtgccaggtttatggctgcagggctgagagcaacaaaacccatccaggcagcaggacctgctggttgggctgacagccttggagactgtgttgaacctggtcagcactggctccagcagggatggggcagagtctgtatagtgaagtctaacgtggttggccttgggtgggattctgtgtgggtctcatccttttggatggaattgcattaaatcaatgcagtgactcaagatgtttagttcatgaaaaacagtagctatgcttgccaagtatttgtgcctttgattaacttacttagaactaattaatcaccacttataatgtatacttttttaaacagactcctccaaaatggggaggcatgaatttaaaatagagtagccctattcagatggctatgatccacttgttaagcactccttagcctgagtggcctaaaaatcggagcctggggcaaaagcttatatattaattcttgatcaagggctgccatcctagggaaggaagaggggggaaagcaagagcggcaggaaggagggagagcaattcagagcgaggaaccccaagccagccacaactccacagccaaggcactggcctcattccccagggagctctgcaaagtctagtggaatatctgtgtctcagaacagccatggagggggttgggctccctcttctcctgtgctccatcttttactggtcagagtctgtcctgagagacagtcccatcatggctaggttgtcgggtcctctctgcttgggaagccagtatcttgcgggtccaggctgacacctgagaggtgggaaaaagatgtacactctctccagggggctgcaactggggaatgagatgagtgagccaccagggagatgcagctgtgtggaccaggactcagcacaaagctcatccctgaattccaaggagtgagaatgcagaagagagagctatcttccttgttgttttattaatctttgttttatgtgaaactgataggagtattcatttcctagggctgatgaaacaatataccagaaactgggtggtttcagaaaatagaaattgattcgctcctggttctggaggccagaagtccaaagtcaagatgtgcacagaaccatgctgtctcttgggctctaggagagggtctgttccatgcccctctcctggctccagcactgctgccagtccttggcactctttggctggtagatgcatcaccccaatctctgtctctggcttcatatggccttttttctggtatgtggctgtgtctctgttttctcttcttcaaaggatacctgtcattggactagggcccgctctgatacagcatgatttcatcttaactcattacatctacaaagaccctatttccaaaggtcaacttctgaggtttcaggtagacataaaatgtagggtgttgagggaggggggaagccagtcctataaaatacgctgaaattaactatcttccagcaggtaaatagttgataacctctatatcaactgcatattagactaaatcctatttaattggactggagttgggctcaggcattttttcatttacctcaagtaattctatatatatatattttattatcatcagcattatatcactgattataatgcaattggtaacatttattggacagttactgtgtctcaggcactgggctgagtactttatgtatattataccaatgactcatcattccagttcttcatcttacagataggaacacaagagtcaacaatgttggaaaatcgccagaggacacagacctgggagcggccaagtcaagacatccaggctgtctggctccagaactaggactcgtctttgccaagagaacccagaacatatttagaacctttcatcttcttctcgtctttagacagtctcagttatttagagaaattgtaaacattttaagatgcgtaactgcaagccttcactacaaagaaataaaacagcctggagagagaggggctgacgtatcatatgtatcttgtacaacctgaggatgagtcaccaagggcagaagttaataaatgacaggaattattattcaaacagatttaatactttcatgtctcccaatttcacaagtttagaaaaaaagtgatgcatttagaagacatctctccctcctatttcgaagcttagctgcctaacctacagtaaagcctgatagttatgaaccttggagaacagcttctatgacaagtgaggatctaagagcctatatctcataatgatgcctctctgcattaaactaaatcaccccattctgggcaatcattgcagatcccctggtttcctgtcttggccctggacccacactcccttccccatcaaaggtgggatggggagaagcagctgcccagcttaaaacagtgtacttcccagtcatgtgccaggcagaaccttgttggcacccacgtttctgtctctgtggctggacctgctcctcatcttgtcttcagtgcccttctttttcctttgatttctacctaaatccagctcattgtgggaccttctctggtccaaccttcttcaagtctccagctgctcttacctccatgggccatttctttgtttgaaattatcttacatttagtcgattccattctgtttagatctcagctgctctacatttgcttcacagaaattgaccttggctcccaaactatataacaagtacctcccagggacagaaacaaggtgtgtatatgcctggtattcctcccagccttctcggcataatgccaagcaaacaaaattggagtgatctccaacatacctgataattactctttatacctgtagtataagaagtgttaactttttgacattaaatgaaggtgcccaaatagtgccatcagatcatgttaaaattttttcatggtgacccaaattaataatgacatcctttttcctcatggaaacccaaaccaaattattatttatgattactataatttttagccattattaggctctgttatggtactgtgtggttgattaaaaatggaagttgcccatggaggtctacatgtcattgttttggccagtgcaaaatgtagccaggagcacaccacacctgacagtatcagtgattattattattattattattatttttaatactgatgaagagtttagtgactcctgatttcaagctaagagctgattaggaaaggttccattgacaactcatccctagaaaattaaaacagaagcacatagatattgcaatttgacttcagagacttccctttctcctagaacaatgcacaccgcaaatgagggctatttccgatggcttataactaaagtaaaatactgtgatatcgtctaatcttagaatctcttaagtgagaatttgttcaagagggctaacctagaacccagtggaaaaatccagctgatggtcacctgggtccattccctatggtctgaggagcaaatgaggcccctctcctgagtttatttatttatttatttattttatttatttatttattattattatactttaagttttagggtacatgtgcacaacgtgcaggtttgttacatatgtatacatgtgccatgttggtgtgctgcacccattaactcgtcatttagcattaggtatatctcctaatgctatccctcccccctccccctaccacacaacagtccccagtgtgtgatgttccccttcctgtgtccatgtgttctcattgttcaattcccacctatgagtgagaacatgcggtgtttggtattttgtccttgtgatagtttgctgagaatgatggtttccagcttcatccatgtccctacaaagaacatgaactcatcattttttatggctgcatagtattccatggtgtatatatgccacattttctatgccttttgaatacttgcattattttctgccttgcttcttacctttgacctttgtaaatgggagattatttgttgctcttgttttaaggataatttagaaatgacaactttagcatatatctaataattacttgccccagcatttcatcattacaactcaaattaacataatgtctgtttggattttaacaaagaagaaaagctaagaaaaaccttcacttggaaacccttcaaaagtttctcatttggctacagttactcaggctttctgcaaaacgaagcaatgttatccttacattacaccaacagttgtttgagtcttttatcagactgactttctgctcatgccaaaaggcgtcattttctttgtgtaaaagtgactttgaagattaataagtaacagaatgggtacacatggatttatgaacatttaaaattgcttaatgtttttgcatgtgtatactttgaaaaaaaataggagatgccccagttgttctacatagattgccttaggagaaggacataaatgtgcgtcattgattcagacttaagtgaattgttggtgatccacaatgatctcccattgacaagaggtgggtttttggtctcccaaggaactacaacaagcttttagtactttatatcagaaaaaagtacttagcctgtgaagctcatggctttggtgcccgctaatctctctttaaacacgaaagatacatcgcaggcccagagctgttgcatcagcaggcaggcagcaagctgagagctgattaggaagcgtcagcccctagaggcagaggtctgccccctgactctatgagcaagagtcaacatcaagcccttcaatccttgggcctgcagttttccctgtacaggaaacacaagcgtgtgtggatgtgtgtgcatttctttagaaacacataatttgtttgttgctttattttctacctttgaaagatggcaagatcccagtcacaaaaacagaaaccaggctaggtattttaaccagagagggatttaataaaagcgttaggatttgagctgttttggaagagctgaagaagaaggagaggacaggggtcaggaaggacagttcctgcagtgtcctgccctgctgggtggccattacaaagctggcagctgtggggcagtatccctttgcccccatgtggccaggcacacggggcactggctgactcccacagccaccactgtcaggattggagctggagctgctgccacagccagaagcagaatgtccactacctccctcctaccttctgattttgcactagctccctactggtacaacctacacagaaccctgccagtaaaggaatctgagaaatgtagtcccctgaggtacagaaaacacagaagggcaggcagtatctggcccagatgcctatcataaagctttagaaaatgttgtgttatcgctgcactttaaccattgaagtatttattttaaattgattcttatttaaatatcaaatataagagaaatcctatttgactatgccttttatgggacagtcaagaagataatcagtattatattaaagaatattttatgggtttaaagaatattttgggggcattttaattcacatagttcaaaagcagctgaatacatgtattaaaaggcaagctcttgataggccttgctatgtcatctacgaaaagcactcctgtttgcctctgctagctaactcagctatttgaagtacagatggatgaagcaaattctactgtttgggtttttatatttgacactggttgatacttttccaaagcaaatgttgcatttccgctggtagtttgatttcgctgtttgctttctgaaattctatgtacttttattttagtacatagaataactatgcctgcttaattccaatgagaaattatttcagataaataatcatcaacttgtttacttaaaataaaatttttgtacctcgaaaaaccaaaattgataataaaaatcctttaaaatgaccatgattacaactattatgcatatctgtaaatctctttacttcttacatcttgactgatcatctcagcaactctgtgagaagccaactactactgcctccaaattttttccaactatgttaggtgacaggtcattagctgtaaaaccaaggcaagaagttggactttataagtaaatacgatagtttacttatgaatatgtatttatgagactcctcaaaattcatattccaaccacattaattttctcttcatgctagagtctaatgcagtggttagactgcagcatgaaactggggtaagcataccacttggagatttgcaaagatgatcacaggaattgtcggcctggataattttaagggagccagttttcagatcctcaacctacattcgtactctttcccaaaacaaattcgtctaagaatatgtcccttttaaggatgcaggttcctacccaaaattgtacttttcccactttgcaaaattaatcatgcctctctctcatctttctctgaggcattgacttgaagttttaaaatcttcagggcaacaaacaatgggacaatttgacatattgttccagtattaagaaagtaactttcttaatgtaagactaattataagtaaatgtaaatgactgatgacttaattaaacaactttttgtaagtctgatggtttccatttttttccttagagcagaactgtaggagaacttacatgacatgctggctaataaaaaagtaaaaataatttggtgatagatcactgtgaatcttggcatacagctgagaaggaggttaaagaattgagtaacatttctgtagcaaaactcccttcattcccactgatttatttatatggaaaaatcttcttggcccataaatttataaaaatgaaaaacagaaatagaattaattttgagccctaactcattctagtaataaataatatatccactgatttcatgacctaactagaaaaacttagactcgcttttggccatggagacatacatttccaacaaaattttacttctgcataataattatttcttaaaatttattacatcttatttttttatcaattatgatctaaagataattgtaattataacccaagcagaaaaaatccaatatttagagacttattgccacaggaaaattttaaaaattaaatgtcaatttatatatgtaacttattgtacatagaagtatggtgacaaaacctataaaatattttctacacgaaatacattacattagaataaaagtctgtggaaatgaaaataagagctcaaagagaaaaaaattgatgtcaaatttcagactattaaagaacagtctgtttatagcaattggacacctgatagcatataatattcatactctattgcagccatcccttcctttttggcactagggaccagttttgtggaagacaattattccatggatggagggagtgggggctgttcggggagatggtttcaggtgaaactattctacctgagatcatcaggcattagttagattctcataagaagtgcgcaaccgagatttcatgcgccgcccacaatagggttcacgctcctatgagaatctaatgccgctgctgagctgacaggaggcagagctcaggcagtaatgctcgtggcccactactgctcacctccttctgtgcggtctggttcctaacaggccacaaactggtactggtccatgactcggtggttggggactcttgctctattcaatacgcttaaaagaatgatgttggccaggcgcggtggctcactcctataatcccagcactttgggagtttgaggtgggcagattacgaggtcaagagatcgagaccattctggccaacatggtgaaaccccatctctactaaaaatacaaaaattagatgggcgtggtggcgcacacctgtagtcccagctactcaggaggctgaggcaggagaatcgcttgaacccgagaggcagaggttgcagtaagcagagattgctccactacacttcagtctggtgacagagcgagactccatctcaaaaaaaaaaaaaaaaagaacgatgttataacaacatagtatactgaaaattacatcctttgcagttatttaaacaaaggatatttatgtgttaatgtaaacatacgtatgtgatacattttcaaaatttatttaaagagtatatgagcaaaaatctttacagatcattgatctatacaaaagataaggtgttttgaagatctgcattctggcatgtctccatgtgtgttttctttgttttctcagtttgaccttgtctgtgtcaatgcgtggatgctggacctcacccaagccatcctgaacctcggcttcctgactggagcattcaccttaggctatgcagcagacaggtaggtaccaatgtgacagccattttatgtcactataataccatgcattaatacggggagaaaaatgttttatgttaactattaaaacaatatttttgctaaattcgcaaacaattcttgattccatcattcatgacatccacacttggttggtttgactaattcttttcttttcaaacttcatctccttattccttgaacttcacaaaggtctgaggctgttcccggtaggactgagagcatcagaatgaaaacacagacctccaaagcaggaacatcatgactgggttgatgcactgttatgctgaatactacagaatcaatcaattcgatgtgcttcagtaacaacttactgattgtggttttattaatttagtcataagattagcctattccaaatttgtttcacctaatttttttttaaacgaaatccttgtattttattctacaaatgtaaaactctgtgaaaaaaatatttttccaaaaaccactaaaggagtttttttctattattttgtattcataaatgcaactgcccagtggcaggcatggtgagtgtgtatattcaagacatcatgctttctatttaaatattcttcttccttaagattattgatgctagctattgtattcatgtttaactctatttttaattccaattctaactatgaaaatacttgcagtaatttaatattcctctctatcccccttagcaggagtaataggaatatagactggaaattgctgactcatggctgtatctggcctaatattgttctggttaatccatctctgactcatggccatatctggcctaatattgttctggttaatcgagcccagcccatggtgggttcttgtgactgtaccattcagtgggtgatactaagtttacctttagagaactgcaaacagcaattaattagctaatagaacaacaaaaggccccatatcctgtagccaattgaagatctgagtttaatcagaccagtgcttcaaaatgggtagagccttgggtttcattttctgtcactttttctttctctttcatgtttctctctcgccctctccacagctgtcctttgcatgtgagtttctgctggatcctttcatgtgtgatgccctttcccctttttcttctttttatcgatgtccttttctcctgttctacttctagccctttcaagcttcatctttcctttcctaatttcccccacatgccactctttttttgctggctacaatttggaactgtgcagtttaaatatttatttattttgttttgtttttactctttctaatttggatattaggttttgcttcatctgtgttttttttctcttactcagtcaataaccatatctccaaactaaattaacgttactaaagtggggaatttccccttcctatattctcataagtgattgagcatctgtcctcatataggacttgctgccttggaggggaggggccagacctgggaaaaagaggagccatgaataactctgcttcctacatttggcttcttctcttcctccatatccatgatttatatatgtgaaggaagaacaagaaataacttaataggccatttgtcaatgagagtacagtgtaggaagggtggaaagtgaatataaaatctagattggggcttctggtttcctgttcagcctataaggagcttagaatttgccactcagtcttgacaacaagtaaaatgctgaacaaactgaaaaatcaataattcttctcagatccataagagaagtgagattacagggcaaactactaccttcagcatcaccccgcacccccaaccccactaaatagaaagacaggagaatacagagaatcataacacaggcgcagaaacctccttgagagagccagggtagataaacatgaactgtaattgatgaattcctggaggatcactgtggatgacctgaaggattaaaaactctagagggactcactcaaaggagggcccaagcttttgtgattttttttttttttttttttttttttgccacctgaagctctacaaggttccaaaggtgaatattaaggaaaatccctcatgctctggcagccagaggggaaaaggaacaattttgaaatatgccagaatatcgttcttaacaatgtctgccctcaggagaagatgtttaaccagagcctaatcttctggggttttctgagagcctcattgatctgggggaagggaaataccaactccagccccttctagccttccaagtggagaaagagaaacaccaaattctagcctcctctagctttcaacttggaagaagggaaatacccagctccagccccctctagcctttctcccctagttcagaggagagggatagagaagcatttgtgaagttcaccgtttagagacataggttcactaaaagactgagagctactcatagaaccacagaatgccttccctcccccaacacctcaccaccacattactaaaggtctatttatagcagttccgtttacccagtacaccatgtccacctatcaagaaaaaattacaagacatactaaaagccaaaacacacacacacacacacacacacagttgaagagacagagtaagcatcagaactaaattcagatatggcagggatgttggaatgatcaggctaagaatgtaaaacaactatgccaagaagtctgatgcataaagtagcatgcaagaacagttgggctatgtaagtagagagatggaaattctaaaaaaagaaaccaaatgaaatgctagagatcaaaaacactgtaacagaaatgaaaaacgttgttactgggcttattaggagattgggcatagctgaggaaagaatctctggccttgaggatatcccagtagaaacctccaaaactgaaaaaaaaaaaaaaaaaaaaaacccacacacacaataacaaccacctgaaaaagcagaacagaatgttcaataactgtgggacaattacaaaagatataatatatgtgtaataggaataccaaaaggagaataaagagagcgagaaatagaaaaaatattttaaacaataatgactgagaatttttcaaaattaatggcagacaccacagatccaggaaactcaaaggaaatcaagcaagataaacataaaaaagtatacctagttatatcgtagtcaaactacagaaagccaaagataaaggaaaaattctgaaagaagagtggggggataatgtcttactatagtaaaagagcaatgataaaaattacaccctacttcttttcagaaaccaggtaagcaagaagaaagtggaatacttaaagtgtcaagaaaaaaaatccaatctagaattctatactgtgcaaagttatcatttaaaagtgaaggagaaataaagactttgttagacaaaaattgagggaatttgatgccttgtaataaatgttaaaagaaattatttagagagaatgaaaatgatctaggttagaaatccagatctacataaaggaaaggcattggagaggaataagcaattgagaatatgtttcttattctcaattgatctaacagataatagtttattcaaaataatagcaacaatgtgtttggttgtgtatgtttatatatataagcatacataagcatatatagagtattttttgttataaggtactcatactactcatgaagtgatacagtgttatttgaaagtggatttgaattagttataaatgtatattgtaaactctaaagcaactactaaaaaaagattttttttaaaaaagcatgactgatatgctaaaatgaagaaaatgtggaatcctataaactgctgttcaatgaaaccacaaaagccaggaaaaagtgtggaatacaaacataagaataaaaaataagggaaacaaatagaagatgataacaaatacggtagacattaatccaaccatgccaatactcactttaaatgtaagatggtctaaatgagccaactaaaagacagagattttcacagtggatcaacaaacaagacccaaccatatatgttgtctacaagaaatccactttcaatatacagacacatatacactaatagtaaatggatggagaaaactataccatgatagcagtaatcaaagtaaagcagaagtagctatactattatcagcagagcagacttcagaggaaggaaagttatcagggataaaaacgggcattatataatgacaaaggggtcaattctccaagaagccaataatccttaatatctatgtgtttagtagcagagcacaaaattataagaggcaaaaactgtgataaaactggaatgagaaatagattaatccacgatttcactggagacttcaacatccctttgttggaaatggtcagattcaacaggtaaaaaacctataaagatataattgaactcaacagcatcatcaatcaactgtatctaattttcctctttagacaaccttatctaacaacagcagacttaacatttttttcaagttctaatgaaatattcacatgcaatattcaagataaatcacattctgggccataaaacatatattagcaaatttgaagaaataaaaattatacaatctctgctcccagaacatagtggaattaaactagaaattcataacagaaggatagatggaaaatccccaaatacttggggatgaaacaacacatctatagtaacacataggtcaaagaagaaatctcaagagtaattaaaaagtatagtaaacaaaatgaaaatgaaaacactcaagacttttggaatgcaacagaaacaatgtttaaagggaaatttatagcattgaatacatatattagaaaagaggaaatatataaaatcaataatctaagctttcaccttaggaaactggagaagagcatattaaacccaaggcaagtagaagaaaaaaaaatacaaattggagcagaaatcgataaaattagaaacaggaaatcaagggagaaaataaaaccaaaagctggttatttgaaacgatcaaaaaaaatcaataagcctccagtcagactaagaaaaaagaaagaggagagagagagaggttgaagacataaattactaatattagaaataaaagaggggacattttgacggatcccatggacattaacaggataataaagaaatactatgaacactctgtgttcacaaatttgataacctacatgaaatggaccaattccttgaaagattacaatctgccaaaactcacccaagattatatagacaatctgaatagggctatatctattaaataaattgaatcaatagttaattacttttcaaaacaggaagcaccaggcccagatgggttcacaggtgaatttgccaaacgtttagagaagaaactctaccaattccctaaaagctctttccaaagatagaagtagagggattgctttctaacttattctgagaccagcattactttaatacctaaattggacagacattacaacaaaagaaaactacagactaatatatttcatgaacataagtgcaaaaatcctcaacaaaaatttgcaagtagaatccaatagtgtataaaaaaaattatacaccacaaccaaatactgtagcataccaagtgcgtagtatcccaagtatgtaaaactggttcagcattctaaagtcaattaatgtcatccatcaatcacatcgacaaactaaggaagaaaaaatgacatgatcatatcaatagatacagacaaagtatttgtcaaaatccaacatctatatatgacaaaagctctcagtaaactagaaatataggggaacttcctcaacttgataaggaatgtctattaaaaaaactacagttaacatcatacttaatgacgataaactgtacagaagctttctcactaagatcagaaacaagccaaatatgtcatctctaataacttcttttcaatgccatgctagaagccctcgctaatacaataaataagacaagtaaagaaaataacaggtatactgattggaaaggaagaaataaaaactgtctttgttcacagatgtcatgattgtctatgtagaaaatcaaaagaattaacaacaacaacaaccaaaaaaaaaaactcctgaaactaataagtgagtatagtgaagttgcagggtacaaggctaatacacaaaagtcaactgctttcctatgtaccaacaatgaacaagtaggatttgaatttaaacacataatgccatttacattagcaccacaagaatacacaacacttagatataaatctaacaacatatgtacaagatttatgtgaggaaaagtgcaaaactctaatgaaagaaattagagatgatctaaataaatggagagatattcaacattcatggataggaagactcaatattgtcaagatgtcagttcttcccaacttgatgtatatattcaatacaatactaatcaaaatcctacagagttattttgtggatattgacaaactagttctaaagtttatatgtagagacaaaagacccagaatagccaacgcagtactgaaggagaagaacaaagccagaggactggcactacttaacgtcaagacttaccgtaaagcgacagtaatcacgacagtgtggtatttgtgaaagaatagacctctaccaatagttcagtggaataaaatagagggcctagaaatagacccacataaatatagtcaactgacctttgacaaagcagaaaacaaaaggtactggaacaactggacaaccacatgcaaaaaaaaaaaaaaaatgaatctagacacagaccttacaccctttaaaaaaaatggatcacagacctaaatgtaaaatacaaaactgtaaaactcctagaggatgggataggaaaaaaatctagatgaccttttagatacaacaccaaaagcataatccatgaaaaaaagaactgataagctggacttcattaaaattgaaattttcttgttgtgagagagacattatcaagagaacaaatgaaatgacaagacacagactgggagaaaatattaacaaaaggcaaatatttgataaagaactgttatccaaaatatataaagaactcttaaaacacaacaataagaaaataaacaacccaactaaaaagcgggccaaagatcttaacagatagctcaccaaagagagtatacagatgataataagcatatgaaatgatgctctacgtcatatatcatcagggaaatgcccattaaaacagcagtgagataccactacatatctattagaatggccaaaatccagaacaatgccaacaccaaatgctgactaggatgtggaacaacaggaattctcattcattgctggtgagaatgcaaaatgaaaggtgactttagatgacaaaattcttacacatttttgtaattcttacaaaattaaacatacttttactaaatgatccagcaattgtactccttggtattccaattccaacccaaaaaagttgaaaactcatgttcacccaaaaacctacacatacatgtttatagcagctttcttcataattgccaaaacttggaagcaaccaagatgcccttccataggtgaatggacaaactgtgatacatccagactatggaatattattccatgctgaaaagaaatgagctatcaagctatgaaaatacatagaggaaacgtaagtacttattactaaatgaagaaactgatctggaaaggctacatactataagattttaactatatgacattttggaaaaagcaaaactatggagacagtaaaaaaaaggatcagtggttgctagagggtggggagagggagggatgaacaggcagagcacagaggatttttagagcagagaaactattctgttagatactttaatggtggatacgtgtcattatacacatgtcaaaacacatagaatttgcaacatcaagagtgaacccaaatgtaaactgtggacattgggtgattatgatgtgtccctgtaggttcgtcaattgcagcaagtgtaccactcccatggggaatgttaacaaggagtatgctgtgcatgtgtaggggcaggggacagagtccactaaaaaaaattttagataaactaaggctacttccatctctactctgctgactcaagcaagatgctatatgtacatattttatggaaatttttatgaaaagatgtaatagaatcaaatctcttaatggacattgatagcaaacatttaccagacaataatttgacaccactatgctgaaccaattcacaccagtctctcagaatgttgtgcatgttaccttgttccttttcctaaactatttaataacacatatgccaatggtgaaaataaaatacaaaatttaagaacaactgacattggctgtgaactttgtagtttataaaacactttcacattaacatctcatttgatcctctctacaacctccctctagaaaaaggtgggaataaacaaaaacaagcaagcaaaaccttcgttttgaagaccttaggaattagcccaaggtcttatgactggtagatggttgaggtgagattcaaggcaaggccttctggccataacacaccattccttcttctttctgcctctctgtccttatgacttgacacataaaaaatgctagaaagtgtcacatctgtaccaccggggagactctgtgtgaaacaatagtttcaaggagggtcatcttttcagaaactgcaatcacaaaggatgcattctgtactttaaattttgtaattccagcctaggcaacatagggacaccctgtctctacaaaacatctttaaaataaaatgatataatgtaatacagtataatatggtatgatataatattttatgttatattttcccattgtgttgaagaaaatgtttaaggtgagctcttttcctgtctttctcaaaaaggtatggcaggatcgtcatttacttgctatcctgccttggtgttggcgtcactggggttgtggtggcctttgcaccaaacttccctgtgtttgtgatcttccgcttcctgcaaggtgtatttggaaaggggacgtggatgacttgctacgtgattggtaagacattcttacaccatcttctctatttggaaactagggccagatagccaacaaatgctagttaatcaaccttcctcttcctcatgtgtcctttaacaaaggaggtttcactgcagctacagtaattatttctgcagatgggagagctcagaggtaggattctgagtgctttagaaactaaaataccaccttactttgggagccaaatatagaatattataaagcactggggcaaactacttttatgtacttctacactgttataatatggtttctagctttgctttataagaaattaatttttataaaatctcagtagcttcttgaggcatttttgaggcatttttaaagcattttctctgcactgtgttatgtgatacagtttgagattactttcctgtgttgccaactctcctctttctgtacaagtgggaaactttttactatgggagaaataggttctaaaaatgagaagttcatttgtgacccttggataccttctatagccagaaagtttgaccttctggtgatggaagaaagaaaaagttcactttacttttttctcatgtcccttgggaaagccctggctactccttttggttccatttctagcttgggaccagccacttactttaagagtagtggtggatttctgaccaggaaaatgtgaattctcatcttagattattgctgcagatctttgcacttccactctcctctgtcactgctatacaatctccaagcagtgcgcattttggagacccctgaagacctttctgtgagtgggagaaggagagaagatgattagagggattggttgtcactgtctggaacagaaggagtaacattggaaggcaaggcatttttaaggagactcagcctaggtgaatcttcaaagttgtgatctgagggcaacaataaagtagcctatcccaggataatcagaatatgagaaaccaattagtgggaaggggcaggaaaggaaaagatttcagcaataaaatttcccatgtgatttttagagcatatcctgtcaatgaaaagtataacactgtggagagaattatcatttaatagaagttgtcttgtgataacgaaaagtctttgtagagtcttatatttataatgaatcttctaaggagactagaatgtgcatatctctagagatacagtgataaaatgtagccatcttaacatatttatgttttgataattacaattaccttttaaaataatcatcactgaagctttcctaaaaccaacacagatattcttcgtatttccctattgtacccagaagagtgctggtctgggtgcataagaggaacatggcaagtgcctgtgataaatggcagaggtgagagtgggagaaaagcatttagtatcaagaaggacacctccatcctttctgcaagtgtggaagcctccgtatctgagtgctagcgtgttctagcaatgctgatggatgtaacaggtgtaacatctctgtatttgtttgtttattttggagctgaccttgtgcttctgtgacctcttgtgtttgttttcctttagtgacagaaatagtaggttcgaaacaaaggaggattgtgggaatcgtgattcaaatgttctttacccttggaatcataattctccctggaattgcctacttcatccccaactggcaaggaatccagttagccatcacgctgcccagctttctcttcctcctttattactggtaatgtggttttggttatcatcatatttatactgattctgcagaaattagactccaaacagacatgaaaatgaaagcaataaagaaaattttcttttttttttttttttttattatactctaagttttagggtacatgtgcacattgtgcaggttagttacatatgtatacatgtgccacgctggtgcgctgcacccactaatgtgtcatctagcattaggtatatctcccaatgctatccctcccccctcccccgaccccaccacagtccccagagtgtgatattccccttcctgtgtccatgtgatctcattgttcaattcccacctatgagtgagaatatgcggtgtttggttttttgttcttgcgatagtttactgagaatgatggtttccaatttcatccatgtccctacaaaggatatgaactcatcattttttatggctgcatagtattccatggtgtatatgtgccacattttcttaatccagtctatcattgttggacatttgggttggttccaagtctttgctattgtgaatagtgccgcaataaacatacgtgtgcatgtgtctttatagcagcatgatttatactcatttgggtatatacccagtaatgggatggctgggtcaaatggtatttctagttctagatccctgaggaatcgccacactgacttccacaatggttgaactagtttacagtcccaccaacagtgttttcaaacatctctaaaatggctacatgctttgagaatttttagagaattttaggatttaaagagagtatttgttgatgattttattaataattgtgaagaaaaatgaattaataaaataccagaacgcaaaattttaagtagggtactgcattatgttttgttttgtaataaatagcttcatgaaaactataaagtaaccaaccatatctgccagtatttcaacatgcaaattaaatgcaatgaagtctatttgtttctctgtgtgttctataaagcaaatgaatattactcagaaattctctgaggaataaggaaatgttaagagcatcaaaaaattacattatcaaaaagcaacagaaaagcatttgatttttgttgttgctgttttgagatggagtctcactctgttgcccaggctggagtgcagtggtgcgatctcggctcactgcaacctctgcctctcagattcaagtgcttctcctgcctcatcctccccagtagctgggattacaggcatgcaccaccacacccagctaatttttgtatttttaatagagacagagtcttaccatgttggccaagctggttgcaaactcctgacctaaaatgatccacccacctcggcctcccaaaaggctgggattacaggcctgagccaccacacccagccagcatttgatttttattggaatgaacatgttttaatgattcttctaatttaattttaatatatgggcaagtcagtttacataaatcagattcctaagcttttcttaatatttactaaatcccaattcttttcatatatggaatcaatatattgtaagatagcctggttttgcaagagcaatgtcatgttgattattttgatgagcaatgatccaattatcaagctagcatttttccccatccattataaccttgcaggaataatctgtatttcagggacctattatcaactcttattgactcctaaatgtatatctaattgcaagatccattttgatagaaaaactcaaggcaatagattttagcgtttgaaattcctagacataactcacaacagcctccttctttgccagggtggtccctgagtctccccgttggctgattactcggaagaaaggagataaagcattacagatcctgagacgcattgctaagtgcaatgggaaatacctctcatcaaattactcagaggtaatttctttcagtatgagtaacaaatattgctaaagctggtgaattgattttgttgcttcttgtgtacttaatgttgcttcttaaatttatatacaaaatatgcatattatatatatatatgtatgtatgtatatatgtatacacacacacacacactaccaaacatctgggaaatcattttcagtttgacttaactgaaaaaaatctagggaaaaatcataggacatattaaagaagaaatgattatgaagctctattagcattatagccaaggttaattgatcatttcagtacatattttaataattgcaccaagttacttgaattattatactttacttactgtaagccccataatattgaatcattcatcttgattgtacaaactgtaaaactttttttgacttttaatttaaatctttaagtttggccctgaaaaaaaatctgtttattcataccagagcttgagcagtaatgtaatatttcagcctctaaactcctatatgctggtctttctccctttcttcttttcttcctccattccttccttcttccaagaaaggctttttggatgcctctgcatcagtgtaccaagaaataggggagggccgggtgtaatggctcactcctataatcccagtgctttgggaggctgaggtgggaggattgcttgagcctagaattctagaccagcctgggcaacatagcaagaccccatctctacaaatagaaagttttaaaaactatgtgggcatggtggcacgcacctgttgtctcagctactcaggaggctgaagcaggaggatcatttgagcccaggactttgagactgcagtgagccatgatcacaccactgccctccagcctaggagacagatcaagatgctgtctctaaaaaagattttaaaaaaatgaaatgggacaaaaattaaaagcttttgccctttggaatatttgatatgcacttgaggatataacatatatttaaagcaacccataaataattagagaatagcatataaagaaaaatatgatgatgttttagctccaaagactaagtgactacagaataacagaaaggttgttataaaaggaatgttagagaagaatttttggatgatatgaatcttgatttaagactaggttgtcaacattgttttcttcatagcattcagtttgatttcacaggaaccttctgataagaacgttctgataagaactgggttttggggctgggtgcggtggctcacacctgtaatcccagcactttgggaggccaaggcaggtggatcacctgaggtcaggagttcaagaccagcctggccaacatggtgaaaccccatctctactaaaaaatagaaaaattagcgaggagtggagacgagcacctgtaattccagctacttgggaggctgaggcaggagaatcacttgaacccaggaggcagaggttgcaatgagacaagattgccccactgcactccagcctgagcaaaaagagtgaaactctgtctaaaaaagaactgggttttgttggttctattgtcccctccccagcccttgaagcttggtcatgtatatttggatttctgccttcttcctctctcttatattaagtggcaagcagtaggctcttttccaaaggtttcaactgaacagatgtcactggtgcaatggtgcaagtacattaatgatgtaccttgaggtttacagatcataaaatgtgtggtaaagataaagcatgatctttttaaaccactatgattagtccatccttgtcactctttgagtgaacacatttgagctgtgtgttccttttagggaaaaataatatacccctgtttcccagcttgcactcatccattgtctatagtcctcatagccaggtcaaagatctgatcatttgtattcaattttaatcatccagtgaataatctctgctcttttgcacacatagtccagaggtaagtccaaggttttgatcttgatttaaaggtctaaatatagaaatatatttaggaatatagaatatagaagaaacaaatatagaagggaatatagaaaaataggatcatagaaaataaataggaataaagaaaggaatatataaaaataggaatatataaagtgttctagaaaaataggcatctagaaaggaatatagaaaaataagaatatagaaaggaatatagaaaaataagaatatagaaaggaatctagaaaggaatatagaaaaaacagctgtgtgctggtagcttgtgaaatataatgttggattaaccaggcatgtcatgtgtgatgatagtgagtatcactgagagatgagtctgattccccgaagcagctgctgttacacatcccatgagtgtacagtttagcactgctcccacagacccactgacccagctttattcatgagcaccgtagagatcatgacaacaggtaagtagttcaatgttccacatggctgtgcttatgagagatcatgaactatgggatccagtggcttccaagtcattttaattttaatatggaaatttccaaacatactcaaaaatacaaaaatagttgaatgaatctctatgcatatccctcagctccaacagttaccaactcctgatcaatcttagtttttctatactctgcctagtttccctatccactgagtaggaatcaatccagccatcatagcatttcatcttgtaatattttcctctaaagtaggaacacataggtatctctggaactatgtgtgcactatcttcaggacactgctgaaggaggagcaagaactattcctgtggttcttaaaattcaatacaagtaatcacacctttgatccacctgtggggactgatccctcttgtgggagcaaagatggggccatggtatataaaatataaatataaaactaatatcaatgtcattgtcctaagaaaaataaccatgattccttaatatcaagtcagtgttccacttccctgattgtcctacaatgtttcaccctgtctatgtgcattagactcctcctgaagttatggattatgaattgttgatctctttgggtttatttaattcataggttcctgccctttttcatttcattccaactttgggaataaaaaaattcctggggtttttctcctgaagaatttccacagtctaaattttgttgattatatctgtaggatcctttaacacgtttctctgtcttttatattccctgtcaattggtagttagatctagagcttaatcaagttcaagtttaatatttctggcaagactacttcataagtggcttagtacatttccattgagagatacctggtagctgcttgtctcttcttttggaacattacttgccactgataatcactgcctggatttactaactcatcagaggttgccaaatgacaatattctcatcttatcattacttcttcatttattgctgcagtgcttaaataaagaccaatttctcccatcaactcttggtgacactgagatatagctcatatagggaagacaagacatatgcatcattttttcttttccaaataataaattggctccctacatcctcccaaagtgattaatgagttgagtgtgtttatttaaacatagtttatatgtttcaatcctttgcaattgcattagtctgttctcacactgctataaagaactgcccaagactgggtaatttataaaggaaagaggtttaattgactcacagttctgcagggctggggaggcctcaggaaacttacaatcatggcagaaagggaagcaaacacgtgtttcctcacatggcagcaggcaggagaagtgccgagcaaaggggaaagccccttataaaaccatcagatctcatgagaattcactcactatcatgagaacaacatgagggtaaccatccccatgattcaattacctctcactgggttcctcctatgacacatggggattatgggaattacaattcaagatgagatttgggtggggacacagccaaaccatgttaacagttattttggtgagtactctttcggatgctcaaattgctccatctttgggcacacgcagcttatccagagtctgccaccctctagtagcttctgaatacctccttgctctttagcacgatgagattttccagtctcatcttgtaagttccagtctcacacatggaatcacctatttctccaagggagctttggtttttgaaacatatgtcttcaaaccgaacctacccatctttaatctttttaattgtacagcgtaagcagaaaagcaaagtgttatcttcaagagaaggatttaacatttaagtttaaaacaccttgctaaaagcggaattcagccacattatgggccacgtcatagttttccatctcaaaggtccttatgtccccacaagcaccatcctgagcagaaaacctcttcgtgatgacgcagaaggactggccagcagggtaggcactgtacttgaactccaaccccaaaaatcacagcaggattccattataggttttgtgcaatgacaggtatgaccagtataaattactcatattttgtgattcaaatacatactgtccgtgtctatgttaggatagccttgaaactgtatgtttacacagttactttcacattaacccacatccctctctctggatacagtttccaggatgttcagacccacgactgaagttcccagcaatctctttttacttttcacagaatctctcttcagtaacttctgacttttagaagacgttatcactgtgtaaatgacctcatccttcacgacctctctaattcccacctcattctcagggtgcccattatagggtgcggagaaggttagaatggatttgaaagaatgtggttggattcaaagaagccctaggagacccaacaagtcagcatttttctcttgtgaaaagaaccacctgccaaccccagcctgttccattgctgacatcagaggatcaggtatatttaggagaagctaaggacctagcttaaatctacccaaggatgttccatattacagataagctaaattaactacaaactaagattacaccaatctccagagctttagtgagagaagggaaaatatgagaggaaaatagtatgacagatttgatccaacattgaaacaggtgcattttgagggttgtttatcctgtaaatcatctcagttacagttcacatggatgttactcatttcatgggtaggcaaactctgtctctgcctcacttgttcctaggcttccatttgccaaggtttctggctggcctctggctttgttgaagagatagctagcactagcagggagaaatacaggtgatcagagtccaggctctctgaacatacaaacagtataactgttgttcactaaatggaaaaatcccaaaatcaaaaaccaatgcaaaacagtgaagtggcttgagctcctaggaggttaggtagaaattaaagagaatcagtggatgggtagaattttaagcagtaggtagttacccaatgtagaacgaggattagcttagacacctagtctggtggttctcagcctttcagcatttgcatacgataacttttaaggcttacttaaaaaaaaaaaacaaattatgggtaagtctacaataatgatagcacaggcacagctacagcatgacagcgtctcacaatgtcttcaggagcatccacaatcatccactgaccccagagagcatgtcaaggatgagaactgctttctgccctggccacaccctctgttttgctcataatgcaaagttcttttacagtgcagtaaatgtgaaatttttctttggtattagttagacattattcctgcttgttacttgtagtgccctgtttcttgccttacacctggtcactaaccactcaattcaacttttcactctcatatgatagacaagtaatagtactgtgtgcaagtgtgaataatggatggagtaacaatgcttatctgaggatatggccattgccccaggtactgaatttgtgtgcttgtcaaaataaaaaagaatgggcaagtacttcagagtgtccacacttctggtggtagtagacttggtctattggtgagtaatggagagctgggattgtttctaagtaagcatgaactgctaatatctgtgataaattgtattaatcctctcagctattcacttcctctctgtaagaggattttacatcccattcccacccattgccagatgattgacagcagtatctctctgtaggcaatatacttccccacccagtgtcaggcttggccacctgacttgattgcgcccaaggagcagaagtggcagaatatcaattcagggcagaagctttgagaggcatcatgaattcctgacagccctcttgctccttctgtctgccacaagaacagcagatcccaaatcagtgctgttccttcagggtgggtctcagaaggagagctacagcctggagcagagctgcagcagctgacctacagctgctgtatgggacatggccaagaaaaagctgtttccccagtaaactactgctcaatgtgtctgcatgtactacagagatttgggggtatctgttcttgcagccaaatctagctaatgcaattggtcatattactagttcaactgccagagtagggttcaacacattctttggtgatgcaggggtatctgattgtggtagattaaattactgtttggagagattcacattttccctcatttccaagggatggaaatacttcctgggtctataaatgttgggcatggcaatgatattgctttggcctcatgataggtgcagtggacttcctgccctttgatgttggggttgaccatgagacctgctttggccaatggcaggttgctagatgtgatgcaatagaagcttgaaatgtgcttgtgtggttgggctttatctctgcacctcagccatcaccatgaagagaaaattcccaggcttacctatgggccccaaaggaggctgagagacattcagaatggagttgacctagcaaagcttcctcaaacctacactagcaggccccagccagcccacaaacacatgagataaatgaatgcttactattctatgctgctaagatcgatggctcttatgcagcattatttatcaatagctctgatggtaaagtgtcaacttgattggattgaaggatgcctagatagctgggaaagtattgtttctgggcgtgtctaggagggtgttgccagaggagattcacatttgagtcagtggactgggagaggaagcctcccctcaatgtgggtgagcaccatccagttggctgccagtgtggcttgaacaaagcaggcagaaaaaggtgggataggatgtcttgctgagtcttctagctttcatcattctcctgggctggatgcttcctgcccctggacatcagactccaggttcttcttgcacttacatgagtggtttgccaggggctctcgggcctttggccacatactgaaggctgcactgttggtttccctacttttgaggcttttggactcagactgagccactcctggcttcctacctcctcagcttgcagacaacctatcgtgggacttcaccttgtggccgtgtgagccaattctcctaataaactccctttcatagatatgtagatcctatcagttttgtccctctagagaaccttgaccaatataatagctgactgtgtcaacactgagtgagcagccactgtcactgtactgacctggatgatgcagctacacaggtagtaactgtggcagcagttttggtttcctttttactcccaggatcttaaaggcctttatcctaaagatccctctcctctgcccccaactgcccattcctcccgtttttgtatgggatatactcatagagaatagtaggttacagttctagctaacaagaagtctctgatactacagaactgaatatgcccatatttgttagtgatattttatcctatactggcgcaataaacccataagctttgatcgtagtttccttattttttggatacacttatgtattgtttatagtgaatctactgcttttaaaattaaacattagatgttatatcaataatgttcacacataaacatgcttgaggcagttcccatggtggtatgtttatgtgacatcaggaacggaatttgagctttccaattccaaagggattcctttaggcccatcatcaatataaatgataccattgtttgaaatatttgcaaaatagaaaaaattaaaacctcattagaaagtgtcttactgattttttttattaccttagttgtcagggagacttctagaccttaatagctaccgtcttttctataatttaatgagcagtcacacaaacaccaatattgctacagaaagggactttccagctttgggaatatctgtttctgacatttcctttcaaagggggatttttataaacataatttttcttcttccaaaagaggaaccacactatgattccaacttccatggagcccatcggggatggtggtatttcagttcaattagggtgctgtctttgttaactgttgtgtttagttgtgatctcagacttcagatttgaaatctctcttcggggaattcatttcaaaagatccagataacatagtttaggcacatggagtatctgagggcagtccagtgttggaatgagaaagattgagtctcaaaaacaaagaaagtctcaaaaacagttattagaaagaaagtcactgggaacccatccagcactttctcctgacagggctgtcttcctcctctcactttacaggatgaatggtgccaattctaccagcaaagccttcatctttaaaatgactcataaaaatggtaactgtagtatgtgtaccatcacactcactttgacttagaatatgcttgaatgcataaaaatatgtcaggacactggacatactcaacacagaatggaactttgtagccaataattaatttaataatacttcctattttaaaaaatagcctgagttctagaaatggtgtgtatttaaatggatttgtttactttccatgtctttagctttttgaaaacaagactatatcgcataaaatgagaaaactgttcatgctacagtgaaatagccataaagactgtaccagtaaacagttccatccacagcatgtcaagacccccaacttcctttctcaagcatggtgcccagcactcatttccttccccaaatggaaactcagcctggcattgctcaggtcagtgggctgtcattcaacaccgaaagatattgaggggaggatgttctcctacacctttaattgaaatggaaattcaatttaaaggtgctttaaagaatgagattgcagccttggagcaggctaggcagacttgtgggatgcctcatcagacagcagcattttgcacaaggaactatggtgagccagggcctttccccctactcacccaaactcatcttccagatttcctctgggaaaataaatcattgggccatgcctttatcaaaatgttaactatctctgctgtacaagttagggcttgaaaactattcgtcagaactgggaaaggaaagcattccacattatggtcccataaacttcctgcattcagtacttgcaatcaattctggtgtctaaggacatattactaaagagtgagtgtatttacagaacctaggacaacagagggactcaggcagtgtccagcagggtggccaactgtccttgtttgcccagggccggggagttgggagtttcagagctaacaccaaaaaaatgtctcaggcaaactgggtagagctgttccctccatgactgggtcagtcctcatctccccagttatgctcagaggaagattccaaaggtctacacttgcaggcgtcacaagtcctccctgcccatcccatgggccctgatgcctagaagaagacacgggattcccgcctggctggaggatgggtctgggatctgcttgccagccgttcccgggattgggggcaggttgctgagcctgtctagttgcctgccaggcttcccctttctttccgcaccccttcctccgcagagcctcatgtctacctggttcttcatctggtcctgagtccttgcccattctactgtggctctggccctgcttcattcctgcctgattcatcctcagaaggcaggtttctgtcctgtccctacacatccatggccttaaagcaagatgctgacgctgtcttgatggctggacctgcccttcctagagacggctgctgccaacccatttcccagacaagtacccaggccacagacagcagggccagcccacggaaaacacaaagcccttttttccctagctagcctctccatgtggaggaacaagtcctattgcttggtggagagccaaagccctttcctttctcacttactcttctctcactgctactgggatcctggcaaaccacacaggcaggtccatgtggcttatgacacaggagttccgagctttgcgacatgacattggcaactgctcagttatccgtgattagttatgaatctaaatgcgtgggcttcccccttttccttctcaaaggctgagcttccccttgccctttaggagcaaaagtcttcccctttctactccagcactccttggtaggcagagaagcatttacttcttccctgcctaccctgagccccggcagtattacaaacaaaagtaaaaagtaaaacacaaggcaaaactcatcagccacacgggcttgttttattccattaatattggttgttctcttttctgggagttgtgtaggcatctaatttgattattttagttatgtgtccctctctaatagaaaagaggagtgagtttgcctgtcctttttccgtttcaagcgtctgctggggaagggccttctgataccctctctggaatccttccactctatcagtgtgagggaagaggctcagcttcttcatgtatgttgctcctttgccatttggtccattcttgtgttttcagcaaaaccagtttccacaatccaaattactgtgcttctcgactgtggataaatgagaaaatactcctctctgtgaacgcgctccttcgtggagacagtaatgagtacaacttccagagctctgcgcagccagcaaccctggcaggagtccctgtgttattcataacccagagctgtgttgccatggcagtactgcttgctagaccttggacccaccaggaaaattatctttcttcatgaaataatcctaagaagagagatgtggcttgaggagcagatgaaattcatttaaattccacagcactagattgaacattgatgtacacagatgtgcccctttgacatagatgaagctggaggaaattgtactaaaaagtaagtaagtgagaaaacacattgtcattcaatctcttgaggtcccatccaggaagatgataaaaaaggtatcaggtgctggattttcatggaatcaatcctgctttccctagaaagaattaaaattaagatccatctcataaatgggtggatgaacacctgggttgtgttggcatagcaacacttcttcatgtgggggctgatggtgggacccacccactcatacaaacagcgtgcggcccatgcaacacagagatggctagattacttggtctggaaaaaataagatggtcctgctctgttttcttttttctctgaatttggtgctatttgagagacggaaatagaatttcatatacagaaaggcaaacagattgagacaaagtctttgtaaggtgtctgaataaaggaggtgttaattggtgatgaagtccttttatcctttgcgggagaaggatttagatgatgttagggaaaacagccagaaccaagaatatttttctgctacaggaatcttttgtgtaacagcaaaactatgtcaccttctttttttttttaagttatactttaagttctagggtacatgtgcacaacgtgcaggtttgttacatatgtatacatgtgccatgttggtgtggtgcacccagtaactcgtcatttacattaggtgtatctcctaatgctttccctgcccccttcccccaccccgcaacaggccccggtgtgtgatgttccccttcctgtgtccaagtgttctcattgttcaattcccacctatgagtgagaacatgcggtgtttggttttttgttcttgcaatagtttgctgagaatgatggtttccagcttcatgcatgtccctacaaaggacatgaactcatccttttttatggctgcatagtattccatggtgtacatgtgccacattttcttaatccagtctatcattgttggacatttgggttggttccaagtctttgctattgtgaatagtgccacaataaacatatgtgtgcatgtgcctttatagcagcatgatttataatcctctgggtatatacccagtaatgggatggctgggtcaaatggtatttctagttctagatccttgaggaatcgccacactgtcttccacaatggttgaactagtttacagtcccacaaacagtgtgaaagtgtttctatttctccacatcctctccagcacctgttgtttcctgacttatttttaatgattgccattctaactggtgtgagatggtatctcattatggttttgattttctctgatggccagtgatgatgagcattttttcatgtgtctgttggctgcataaatgtcttcttttgagaagtgtctgttcatatccttcacccactttttgatggggttgttttttcttgcaaatttgagttctttgtagattctgcatattagcccattgtcagatgagtagattgcaaaaattttctcccattctctaggttgcctgttcactctgattgtagtttcttttgctgtgcagaagctccttagtttaattagatcccatttgtcaattttggcttttgttgccattgcttttggtgttttagacatgaagtccttgcccatgcctgtgtcctgaatggtattgcctaggttttcttccagggtttttatggtttcaggtctaacatttaagtctttaatccatctcgaattaatttttgtataaggtgtaaggaagggatccagtttcagctttctacatatgtcaccttctttagtgatgaacatggagggtaagcagacagggaatcctggatgttcttgttaacacattcttgtctcctagccgctgtaacctcagccctggagttgacaaaagaatctgtcccagtgggccacagatcctagggattatggagttattgcaaagatccacaaaccattagcaaccaagccttgtctgttgaatgaattaatacatcttggattaaaaaaaatgtactttcttcagataaaattaaatacagttagaattaataaccaataataaattgaaaggtgttattaaatcatagtaaatttgtgtcattatgtggtctcaaagaacagaagtgaagagcacaattcctgtcatgtgggcaatctttaaatttttttgacattaatcagacatcctcatactcaaaaaggatgagtcactgtaagcacaaataaggtgtctctacctgttgctgagagtcttgacatacataaacttcatgacaacaacttctaggatcccttcatttctttcattcaataaaatacacttgagttcattatatttttatcttccactgaccttagggacaaattctgcatgttaagtagggtggattgagtgctgtgactcccaactgcctactgtctctcaaaggtgaataggatgggttgagtaccacggttcccagttgcctgtctctgaaagatgaatcttggccttttctggcttacatttcagagccaacacatgacaaatagtttagatcttgaggaagactgaggaaggcttatggaatactcagcacaattatttttatggcacagagtgaaatagagattgaatacttacacacgttttgattagtatgtgtgttccaccaggcttacacacttctctttgagatctgatctagacacatttttctaaagacatttcaggtattccctctgcagttcataacagtttatgcactgcattgatacaggctgctctcaagttagcaggggacaggtttttgatgtcaactaagtgaaatatagtatcaacttcatgtagggttgcttgctgccatcccctttctttccacaattctgtaaacaacttggtacattttgttgtctagaaatagccaacctctaaatttaaacaggttgagtattaaattattgcagtgaacattttttcacattaaaaactgaatcacagaattcttatttgatcaccacatgtttagaaaaactattttaatgtcactgacatgaagttgtcccagaaacgaaagggtatgggtatacacaatgtagcagtcatttatcttcatttgttcctccatttattcagcagatagttactgggtgctgtattcaaggcatctatttttaaaataacctctgtgaaatgttcatttcaaaaatgtctccccagatgcattcaagatgccttctattttctctaatcctctataattgcttttctttttccttttttctttttgagctgttttccttctctccctcccaataataggtctttatttaactatacttattttcatcatataaatatgcacaatataactaaacacgaagttgaagaacatgcatataagacatgtcttatatgcaatgtctggaaatcactacagtgtgttttaattttgattgatgtacacatagcctttcacattgaaatctaggtaaggtaagtacagctattaattatggaaactagtctatatatttgttggaatatgataaatcaagtcaccgttcaaagttgaataaatagtgaacacaatataacattaatgcagattaattaccatggcccagagaccagccatgagacataacatgcttcgctgtcaacaacattcaggattggaattccagagatggcgtgtgctactggcttatggctgatacgtaagagaatctcatctatctctaaatgttctgccttaagccgcacaaaggacgtaccagtgaacaatgagttaccatgtgcagaaaatattctgcaaatcaagaaccagaaaagtaagcaacccgcaaactccaaaactcattacatgattgtgatctttattttgaggtgcatctaaactgatcttcaaactcttcagctatacctgactttctctggaatacttctcagcattttcaaactaaaccaaaggctttctgagttacataaggaaggcaaaatttggatatttgacaaatttggaagcactgaaaatggaggaaattccgagatgacagtggttttggttcttgtggttcttgtggttttggttcttgttttttgaggggtgcagagttgggttacttaagactctgtgcatggctcaggcatcattgggctgtgcaacactcgtctcatgtcctacttgattttcttctccctttcctcctctattcccactcttccctcggcaggttcccactctaatgtgtctgatttatatgtttgctattaatgtgttcttatgaagtggagtgtgctgtgtgtattcaggtgatataaatggtattgtgccactccagatcttgtatttcttactttttcactcaactatgtgttttaagtgtctacccaacttgttcatgtgtgagtgcattgcttccaactgtcgtgtgattttcattaggccatacctgctgtgtctctggtctccatcttcctaatgatgggcacctgggttgccttcagtaattgtgatcggtgttttcatacatgtccttttctgacctgcgtaaggctctccatggagttcaaggcctagaagcggatcccttgggtcctggtgtgcaggcaagctttggaccctgaataacgccagcttgctttctgtgtctaccgcactagtgggacttgtgggtccctattgtctacatctagatttagtatgcttcagtttcctaatttttccagccccctcagtgctttaagttgcacatctctagttactggagattctttgtaccttcactggagcacttggaaaacagaagaaatcaaagggcagtcaggactctcccagcaggcagggaccaggtcagagtcaggatgaagacaaagcaccctgagcaagaagcaatggaagagatgcttgtgacccgagctgatggggaaggttgagggcaacgcagagaccccactgccgacttgccaagaaaacgtgcaggaaatgagggaaggctccattttcctgagaaaagggatggaggaacataggcagcatcaagctccagctactggctctttgagaatgtagtcgggacttgccccagtcacccttgccctgagaactcagtgactggggctaatgtcaccctggctgtccttgacctgtgcagaaagcactgccaaccctggacagtgggggaagggccttatgtgcccaggccccagcaggagacacctaccaggaatctagtgggacaaggtttcagggatcctggaatcctgcccacacccaacagctggaacagttccctcagctggcgagtggacaggtggtctgatgagctcatatgttattgatgatgatgttaaagaccatgttcccatagaaataattcccaaagcattcagaagactgagaagaagtgatgataagaattgttctgggcaggagtgtgtagttttgatttttacttgtgataaagcagaggatttgcttgaattcactcaaacttgctttttctctctcttcaaaacaactttggctgaccagtgtctcatagacactcaatttgccttttcatggaactcaaaattttgtgtatccatacatgctaccatagtttcaggcactgggcatttcaaaaatgtgatatttagaacctttctatttccgtgatgactgttggcatagatgctgctggagatttcgatgacatgttggattcagtccacgcaagttttgatgcatattcccttaatttctgagcctttagagttagagttttagaactgagagtacattctcttcttttttcctttctcctcttatgtcaacaggctcccttccccacccccccacccacacacacaaacaaaaaataaaaataaaacgctctcagctttgcttttaagaaatgaagaaatgttccaacatgtgacccacagctgcaatccgttcacctttgccaatactgaggctgccctctgggtccctcctgggactgcatagatagaggcccatttgctgttctgggcagcatgcccagtcatctaggaggtgggggactggggcactctttcaggccaactcaaactaatggaataaaatatcttctccatgcagtgtctcaaagaaagagccacctgggctgcaggtgaccagactcgctcagtgcagcacggtagctcctagcctcatgtgcagtcaaacacatgagatgtggcaagtctgaactgagatgtgctatcaagtaaactgtacaatggatttcaaagatttaataggaagcaaagagtatggaacgcctcatgaataatttcatattggttacaccttgaaatgatcatgttttggatctattggattaaatgaaaagtattataaattaatttcccctgtttctctttatgttttttaatgtggccactagaaaatgtaaatgtactcgtgtggctcacattatattcttactggacagcattggtccagaggactgggatttatttttaactactttaataaacatcaaacatttgtgataattttaatacaaatatttccccatcgtatatgctcttgcatggtaaatattttatctactcttgttttaaaggataaggaggttttcaaaaattgccgaagtactacaggtaatttggcaaattctcttttatgggtaccagatagtgctatttccacccagaagctggctacagctctgtaatgtgacatgcttactcctggctattctgggctggtcctcgtctgactaatgagctcattatccactgggcagtgggatggaaggacatgagcacctcagctgtcactgccgagcttcctcccagccccaccaggccctctggttcctgatgcttgtctgtaagaccaatgggtactttaacttttgaaggtggtttctggttcccccaatcggtgagcccaaagacctcaaataacattttattcacacagacttcttagagatgaaaagtttctagagagcagagcctttagggaactagtgatgatgcattcactgaataaatcacagtattatactcaagagcaaatacgttttctttcttattggtgtcatctttccttgtgaaatacggcaactgatgaagaagtctcctattgagaataaccagacgaaatcacaaggctagacaagcagctactaacaccatccccttccccctgcccatggtaaaccctgctggcaaatgtatttctccctcctaaacctgggaggactcacgtttctgcacccagagccccaggtggaagtaaacaatgggagtgagccgatgaggtgggattgctgttccttgactcttagtgcttctcatgctagtctcctggggatgcagttaaaatgcagattctctctctagatctggggcggggcttgttcagcaggctcccaggggagaccaacgctgctgacttgtgggtcatactttgagttgcaaggttgcgtacgtggtatttgccagtgtgcacattcatgaaaaagtatcctgccttaagcctggtagatccacagttccaaatcaacattaaatacatctggtatacttaagaaaattcaacataaaaagaaatccatttcttaaaaaaaaaaaaggcagagcaaccattctctttatctgaggacctttaaaagcatctgcctttatgtgtcacagcattagctactaattactaaaggaaaaagtgctgggtgaattatcacctgaaaataaagtaactctcaaatgttataaaacataagattaatgttgacagcctctgttactatgacatattgtgtgccaggtgtgtgtgtgttataggtgcatatatgtatatatatacacacttgtatgtatctgtgtatatgtacacatatctatgtatctatatagacagatgggttatttaaatgaattttcaaaacactaataaggtgtgatttgataaatgaataatatttaataataatattaaaataatatatttgaatattattattctcctgctactgatgagaaaactaaggctcaaacagtttaagtaacatgctagtaaaaaaatgttctgagtagaataccacatgtctggcctaaccctgactgtcttttttctgacccgagaccagtcctccacgtggggagctctgaacaccatatttataacagatggttatttataatgtctttctcttctttggcaatttaaatgaagacgtcaacttgaagaaatgtttcaccaggaagaattgcaaagagagctgaattaatcaaagaaagacgaataaagtgttcttttaatatggagtacataattgttgatggaaaacacagtcttggcagaattaaaagataatcaaagagatgaatagggcaaatagcaattcagctcattaaataaatacaaggaaactaacctctgcagtttaaccttgagcgataccttttcccatgaatagagagtgtcgatactaggcaacaagcctctgaacagatagtgttacccggaacatcacccttttctccctttgcttcaaatcaaaaccagcatcccccatttagacagcataaaaggtatgacaaaacgggacgccaagtgagacactgttgattctgtttctatgaaattctagaaaaagcaaaactgtcatgacagaaagcagatctgggtttccagagcccagagtggggggaggggactgacttcactgagacacaaggaaacttttggggatcatggaaagggtccgtaccacggttgtggtggtggttataagactatatatttgtcaaaagtcttcaaagtgtgcacttagaattgctgaagtttattgtacataaattacatgtaaatatcataaagtgcatgtaaatggtatgtgaggtaataaagcaattttttaaaaacaattttaaacctggtatagcattttgtttttttgtgtgtctgactcagaccaggcaaaatttagtaaccctttggcaacagaaaatcagcacagatatagagctagaagttattgtaaaagaataatagtggcggccgccacggcgcaggagttgccaagattttcctggatgaattccatccaagatacggttttaagtctctcaaggcctttggatgcctagaaagtgggtcatctttcagaatatctgcgtcactgtggagatgttagtaaatcaaagaccagctggatttgtccttaaatgtagcaaaatatgtacttgcttggaagtactcttaatcctttcattcactggacagggaagactggtttcacagtcctgactcccttcattcgttatcaacacctcgtattttttttttggtagatgatatatatgaggcagtaaacttgtggtctggaaaagcagagatcatattaccactctgttttaacttctaaaagtttgaaattaagacttataccaggtatttttatggagtggattggagtatagaagcaattattttaactatttgctaaaaaaaaattgcctaaaatattcagttattaaaggaaaagcattgttctggattggattcttcagataattctgcttttggcaacaagtaacagaaaaccaacttaaataggtttggacaataaggacattcactggctcgtgtgtctggaattctagcaacagcagcattcagggttggccagaccaggatctcaacaatcttattaaaccatggttttcttctcctctctccactctgttgacaggatagcttcatcttaagacttgttgtctcatcagtgtaagatgactgctaagttgtatgtgagcccacaatttcctcattcattccttgaaggaagaaaaaagatttcttcaggaacttctgacttaaaagcaatgaaggactttcccagaagtccatttctcattggcccgaattgggttgtatgcccatttctcattggttcaaattgggtcacgtgcccagtcactgacatggaggatacgatttccctaaactaatcaggcctcccgctacaactagaaggagactcagctcccacaaacatatgaattgatggtgcgggagagtgtagtgggaattctgttaggaaagagaaggaagtcaacaatcgggtacgctgtgtctaatttaagtccatgactttaaaagtgagcttttttttttgttacaaaaataatgtaggcttaattttttttttttttttgagacggagtctccccgacacccaggctggagtgcaatggcacgatctcggctcactgcaactccgcctcccaggttcaaacgattctcctgcctcagcctcccgagtagctgggattacagatgcccaccaccaagcccagatattttttgtatttttagtagagacggggtttcaccatgttggccaggctggtctcgaactcctgacctcgtgatccgcccgccttggcctcccaatgttaggcttaatttttaattttcagagattatttgtagctgaaaagaagaaagtaattaatgaaatgatacggcatacttttaaacaataaatatcatattctacatactgcagacacattaccgcataatggttaaaaatacagactttgctatcaacctcctggttcatcttcttactgtctgtgtgtcctccttgggtaaggtacatagctttcctccacctcaacttctttctctctgtaataggaatgatagtagtatctgtacaagtttctccagcactaagcctctcattcaggggtcagcaaactacagcttgcaggccagacatgcaggcaacctgtttttgtaaataaattttattggaagccatttatgtatcgtctatgactgttttcacactacgatggtaaaggtaagtagttccaacagaggtcttagagctcacaaaaccaaaaacatttaatatatagccctttgcagaaaacgttcgccaacctctaggttaatacataagatctttattttcttgtcaaaatctaacatgtcataattctgtggtcattgagtgactggagatctgccagagaaaggcaattatctacagagctaacatgaaagcaagagatgctcctttattttatcacttaaaaacagtgaagaatcatgaacaactgaaaaatctacaaatgtgtttaaatgtcaaattaggctgggcatgatggctaatgcctgtaatcccaacattttgggaggcgaagtcaggaggattgttcaagcccaggagttcaagaccagcctgggcaacacagcaagaccctgtctctactactactactactactactactactactactgctactaataagccaggtgctgtggcatgcacctgtggtaccagctactcaggaggctgaggtgggaggattgcttgagtcgggaggttgaggctgtagtgagtcatgattacaccactacactctagcctaggtgacagagagagaccctatctcaaaaaaaatttttttaaatttttttaaaaagtcaaactatctacctgaactgaccagagatcttgaaatatgtgatgtaggatttcccttcaactctgggatgttggaactggaaacttgagtgagagtgaatttgttcacactcatagctagtggatagaagtcatagctctcagcagaagtctgaagaggaaataaaagagagccagtaataaattgctgtgaatatttcttttgaaaagcaaagaaaaaagtattgccacctgtgtgtgctgaatggacagtggtattgatatgtagacaagggatcctgtcagggaatccctggagagagaagagtctgagactgacactgcccggcagccccaagtctgagttgtggaaaagccctcagtaaaaggaaaaactcatggcaacgagttggtggtgatactttcatggaggaacattgtccttgcaggatgggtggttttaatcctgaatttaaagatctttaaaatctaaattatctagtcaaatttttttcataaaacaatgttttaattaaagattcagttttaggtcaagtgcacagtgtctttctttaaaaatatttagatgtggccatcaactatcaagaatgtttctagaatgaaatatattcagcagtgctgtgtggggatcaggaacacaggctccaccaatcagttgcctggtttcaattcctggctgatttacctgtgtactattcactcctgaaagtcctaagccttgttttccttatttatagaataagattaacagaagtactaactttatagagctttgatgagacttaaaataatccacgtaaagtgcttagtctagaatctaatatcacacactccataaacactagccattttaatgtattaacacatagaaatgaattgtagaaaacattttggcaacaaactataccataatatatatttgtaatctatggagttcctatctttcacttttgatattcctgtcttgttttttgagcagcaaaggttaaggtagacacagaaaaatccctcactggggtcttcaaatttagaaggttagctcaggggtcatcttaatagacattatattagttaagatccaggtcaacttgctaatgaaacaaggccccaaaaatacagtgatgaaaaagataaaagtgtctttctctctagcacacgcacacagaggtgagcagccaagctctagtgaggcagctctactccatgagttccatttatcttgcatctccaccatcgcctacacaggtggtatggttgaagctcaccagcatcttcttccagcaagttattacctttttaaatgcagagacctagaacttatacacatgacccctacaaccacctcattgctgaggtcttaatcacagtgccactcacagttgaaaaagaggatagaaaaaatgactgtcactaggctgccatatgcccaactaaaattctacgtattctcaaaagagggaagggaagcatggatggtggaatccatcagcagtcttccacggcgattgtcatggaaactattgttttgttgactctagacactattgattttaagacacatagtcattttatgtaccactaagtaaaggaaaccatgttgtttaaactgggacacatttctttcttaccagctcagttgtaggacaccttccaattaagagatgttaaaatgtagaaaaccaatgtgtcttggtatagaagaaatacaggattgtgaagactttggaaaagaaagtgaccaaaggcattcattttgcagtctacttttgtgtgtgtgtgactttccttggagcaaagataggcataagatatcaagctttggttgatctattgaatttactgtttagaatctgtgattgacaaggtactatcagtgtgtgtatgctctaagtcaaattcctgtgattactggtagagagactttagctcaaagctttggggaaaatgtgcctagattttcattcaatctgggccaaatctggagttgtacaaatagatagcatcggtcttgtccttagtagccagcatttttgtttaataggaggagagaaacccaggacgacactgaggaacagatatgaccagggcacttgacttcttgtttcagcactcagtcattacacaaacagttgttgaacaccaggcactttgcttggtgtgacaatgcactcccgccttccaagagctccagacccacaggggagtgctgttgtacaggtgctaggatagaggtccggggagtagaggcagaatttgggagccatcagttctatctgaggctaggaaaggcttcccaggggaggtaaaatcaggactgaggaggtcaaagagccctccatgcagaggtaagagactgacaagcacaggaaactggagctgcggtcactgcagggtatcatgctctgatgcttccgcatgttagactggaggcaggatgtggggattggggggtgtcctctccagcttcgcttttttcagtgttttgtatgtagttggccaatagcagtatttgttgaattgaattgaaaagaccagtttcttggatggccagctagagatgagctgaatttttctggatcaaaaagatgttagattacaataaatgggcaaaagcaaaataatacctttggtgcttactcttaaacttaacattactctattttgtttgtgaaagtcagatttgaggatttagtttataaagaaacccttaattggttggatcccacttgcttcacccaccctgactctcatttcccccaatgtaataaatgtgcatatgtatttagaacatacagagcagtttaacataaagtactgaaattatcctaagaacagattctcagtgcagcaatcctatctttgtgaatttgatgtgttctaaatgcaagagcagaagtgttttaattgtcaggttttaagatattatgaaagcccctagtcacttcagtaagatcatttgattctggttaatgacaagtctatactatgcaggttttttttttttctgtctattgctactgaaatctgcttttcttatatagatcactgttacagatgaggaagttagtaatccatcctttttagatctggtgagaactccccaaatgaggaaatgcacacttattcttatgtttgcttggtaagtttgacttgtgatggatttaaaagcttgcgttaaatttacaatacatcccttccttcaaatcagcttgaagttatctcttacttgttctctggtgtctttcaatgttgctacaggttcacaagcgcagtggtgtatcaaggacttgtcatgcgcctgggaattatagggggcaacctctatatagactttttcatctcgggcgtggtggaactgccaggagctctcttgatcttactaaccattgagcgccttggacgacgcctcccctttgcggcaagcaatatagtggcaggggtggcatgccttgtcactgcgttcttaccagaaggtaatcttaccccacatctgtttggcagccaaaggacttgaaaacacctaaatccacaatcaagtatagggagccacttgttcttaggaaatgtgcaatggaatcacagtctttcgtgatgtcactccattttctgcttaatcagcataaaaacttcgaagtaagagattggttctgtagatgattctcttttctcaattgctaggatcatttatgaatgaaatagatattgtgcccaatctagctgatagcgatgtggtttctgttactcatctttatgtgacttacttttgtgatatctctgatgtttaacttatttcctgaacctctgccatgctgctggcaccatgctaaacgctgaggttacacatagaagaacgcagtcttgacttcgaatggttcacaatctattaagggatacagatactttaatattgtcacgattcttattgtcatgaattatttgtgagatttagaaactaattaaactatttacaagatttagaaatataaaaaaatagattggggaggagtgatcaatccagaaggggattcaagaaaagcttcccagcagtgggaactaaacatgcgtgaagactcaaatgtgccagatatcagggagagagaggacggacgtttccaaactagagaagagtttccagaagtatgaaacacctttgtgcatgcaggaactgagggttcattgctgtgactggaatccagacaaggagcctgagagatgatctgtcaccagcatgaccagccctgcaggtggtcctgtgagcttgcggaggaggaggagtgagtttggcataactgcagcagtttagagatggctatgagcagggggagatgctgagagcaggagttacaattggggcagtcagacctagatgagagagggtcatttcatttcagagatgttgcagagttaaatttttcagagctccatgcctggtagatggggtgcaggccagaaggaagcagagggtgccgtgactcctgatgtgtggtgagcagcacccagaagatccttaccctagaacacaccaggaactgggaggaggagggcttcacatcccaggggatgtgtgaagtagagcaagttcatcattcccctcttccaggaaaggcaaagtggggattacagagaaagctggattctccaggcatcctttgtgtctgcacaaaaaaggctgtctttctttgagaatcctctgaggaccagccaagaaatggacaatatagtgggagtcagaacagtcagacatttacagatgagtttattaattaaatgaaggtttatgaattcttaaaacacgaggtaggccctatttgaataaaattacaggaatgccaatattcggaacacacacacacacacatacacacacacacacacacacacacacaatgtacaagtcccctgacatgttggaatgtttgatgatgaacagcaaccacctatttacatttctcttgttttccttgagtgcattcgcttcccagggctgctgtaataagtaccacaaactcaccggcttgaaacaacagacatttatgctctcaggggtgtggaggctgggagtctagaatcaaggcatccaagggtgcttatgtccagaggttctggggaagggtctcttcatgcctctctctggcaatccttgcagctccttggtgtcactcctatctctgcctccatattcacaggacattctcttctctgcttgtgtcagtgtcaccttgactaattacatctgcaaagaccttatttccaaatgtagtagccttgaggttccaggtagacatgaattttgggagacactgttcaacccactacatggaattaacatattataagagttggaggatctgtacaatagctatctcttaatacgtatctatttagtatcgactaattgccagccactgaactaggaggggaatggagaggtgaacaaaatagacataattcctgccctcaaaattgtataatttaagaagagtgaaaaatcgcaaacattggagacgttactgttctattttactttggtactttggatataacatacaactgtagctccctgagatgaagtcttctgttctcatcgtatgtggactaggaatgaatgaaatattcattgtatatgaaattagaaatgcagcgagaaagatgcatgcttcggtgtgtcccctcatttcatgatatatatatatactttactctataagattttctctggtcctagattgattgggatgactttaatgtttgttgcattcagaatgaccccagaaagcattcaaggctgtgtgtccaaatcaagacagaagtaactagccggatagtcatataactattttgtagagaattctttcatatattggaaaatataacaccaagaacagactgttctcccttgtctaaccagttttattttatagatataatttcctgattgaagctttagaattgttctcagcaagactgaaaatgaattgctcttattctagacacattttatttttaccttctgcagacttggctgcttttatagtcatatgtcagtcatgactgactggcaagaatacatttcaaatccctaaactgagttccaaatattaacagacgatcctcccttgagtccttccaatttaaagacccattggacttgattccagccactggttaattagcacgagaaaggcttttctgctcagccattcctgacgtcagtagtaggtcgccagcccctggggagaatacagatgagcttttggagaaaccagctctaaaatagtctcacagcaaacactttaatcagctttccctccactcgacccaacttttcatggtctaaagaatggaattctggaagaagaaatagtagttctggttgtattctcatctcagactcactgcttctagtccaaatttcttaacactcattaatgtctggaaaataaagacctttctttatccatacctgtctgccatctttaatttgagtttatttaggatgaccacaaacctagcagtttggataagtcgtcttcttgaactggaaaacttgtcttccacttttatttttctttaattgaaaagtgagttcatgtatcttaatttagacatttctactagaatttctcactaaactttatttcagaactcagagtagatgatccattcagaggacatataaagttttgtttaagtcctgcatcctttcttcaggaattgaggtattattcccaatcatctctagtagcttgaccaaatccacattcagaagaaaacattttctttgttctcatgtaattccatggaagacaattttagtttcagtactcatttttaaattgccctgtggtttttgtcattgctaccaaaagatgtctatggccacctcaaaatgaatttagcttattactggaatcaagaatttctttgtgtgtatatatttattcatacttcctacagttttcttttcactctttagttaatgaaccatgcaatgccttagaaacttttctttggttacacatttcaacaaaatctctgttccagtatagtttgatactggactctactgcttggaaaagagttgggagtctttcagattaaggtcaatgttccggacagaccacatctccacaaatggggcaacttggcattttctgaatgttttactgaattgactggctatttatctgagttaaccacatatgtttatcatggtggagtgtgtgtgtgtgttttaatttggtctctggcttttgtttggatttttccatgaaacaccttgcctcggttataaacccaaattgcccttgaatttgtcggtgggactcaattttagagcaatcttgatttagtgaaaagaaacatacaatggaagaacccaacctggatagtgaagctgtttcctaggtagcaggcagccttcactgcagcccgggagtggcaggagatggtcccatcgggctgggacccagggaatctgagtctctgctcccactttccccttccagtaccacatgctcattgaaagatggagtggaatgcattacctagtctccactccccccttttcttggtcttcataaagaagcaaagcctaaataacacatgttgacaaaccttctgctccagagcagacagtggcccagcacatcagcacaaccctggcctcctcactgcctgatataaccgttaacgtgacagctacaagggttctcatgtgggaaaaacatcaagtgcaccaggatgtccttggccagtttgcagtcaaaatatgtaaacttcagactcccagaaatggtttggattcttgagccatcttttccttacacctgtgctcctgggcaattgttttatttaatgaattttagcttttttttttttttttgacttggctattctctagagagaacacacagaagtctactgggcttgattctcttctttcatcctcctcattcatttctactaaaaaattatatattcaggaaggttcaataattcccctaggaaacaggaggactatttagtgctaaatgaacatatgtgttggatataaagggaaaatgaaaggcacatgaacactggacatgcttcgttttgctttggagagcagatatggtcttgttcatgcagacatatgtcctcaataccaaatcccctaggaaaggatgacatcaattgcacaacttctaggaaagctagagcagtgactttttagagtaaaaatggttaactcctctgcccttaaaacataaaagaaagaaaatatttaatatagaatgtttggcatttcccactagttagtagggaggaaaggaaaatttcttcatacaaccagagcagtcctaaaacagttcattttaaaatggacgaaccaattagcattgatgaatgtggctccttctggatggtttattgaaggaagtagtacaatgggggatgaagaagacaatgagtgacatttgccttagtggtaacacacagaatagatgtccccttccaaagatcctggtcctcaaagcttgctccactctagaaaccaaggtcagctcacgtgaggaactccccaggtgtgctgggaacggctattccttgtgtcaccaccgcaaggtatgcacagaaaggacagctgggcaccagctgtgggaacgtggtggctcaaaggcatgactggaaactaccacctggacaaaaagccagtgtgctttggctctctaggaggtcattgcctggaacaatgttccaatgtagtggctgctcatgctcaacaaacggttcttgaattgtacttcctataatccaacctgctcagaaaggcatctagcgctctaaaatattagctatcatctagtttcattgttgttgaaatttggttacattattagaaagttctatcatttgtgcttaaaattggcaaagacttcagactggaggccactaagcaaatactttttgttgttctgtaaaatgttaatgaaatcagacccctaactcctccctttcaaactttctgtgtttgcaggaatagcatggttgaggaccacagtggctacattgggaagactagggataaccatggcctttgaaattgtttatttggtaaattcagaattgtacccaacaacattacggtaattctaacaaacgttatagtttctcctaagtaactctgtagaccagcgttttaagttgatttagttaaaaactatgaagtcgtttccttagctcagtgatatattagcctaggctgaatccagctagtaaagaagatatgctttgagttatcactgctttctgcattgctgcctgctgcattttgtgataaaagtatttctcatattaatatcttcacacactgttacggttttgaggaaaggcccttaacttgaaaccagaagacctctaggtgcccttgcttagactgtgggttaaatctgtatccatcagcatcacctgctgcaagactatggcctctctttgactgcattacatgcattgcagtggtgagcagctggttatgaaggatgaaatgaaacagtgtgcacggattagtgcaaatcaacctcctctgctgaggaagcattccctgggcacacttctccctcagatgaggaaaccaaagtagcacaaagtgacccagagcaggcagggcagtgggttgctgatggataacaccctccacccacgctggagacttcctcactagccttactgtgaaacgtgcagaatggaaatgttttgcttagagttctgagagtagtcgttttcaaagttagaaaatgcaaagtatcttcacacttcctttggttttttaatatgtctgaatatgttgattatcttgaagtcacttgttgaaatagttttcacttaaaattacttttcattcaacagaaatttcggagtttcgctctgttcaggtctgtgtgattttgggggaatcatagccccatttctgctctttcggctagcagccgtgtggctagaactacctctgatcatctttggtaagaactcatttgctattcttaagagccttcatctacattctttgtactaaaagagacctataataattgttaggttcaataatgataatgatagtcatttatcttattataataactatttcattgataattatgatattaatttcatcttattataataactatttcagttttgagagccaattcagttataatgaatggttttaatttactttatattaaagggtgctgataaataatgttcaattagcattctttgggttctgagttaaatgctgtgaaactcttatggtattggagaacataaccaataattttcaggggactaaattaaatattcaatatgtttaaaaatgagggccaggtgcagtggctcacacctgtaagaccaaaatgggaggactgcttgggcctaggagttcaagaccagcttgggcaacatagcaagactgccttgacaaaaatttaaaaattagctaggcgtggtgatccatgggtgcctgtagtccaagctactcaggatgctgaggcaggaggatcaaggctgcagtgagctatggtcacgccattgcactccagcctgggcaacagggtaagaacctatctctaaaataaataaataataaaaaataacaaaaataagcctaatgtctaattgtatttctggtgttctctctctatggatatcatatcttcattggcccgatgctaaaaatccatgtggagggagcaggtgacacaggatcccgggcacacattccatcacctcctccaggtccctcgagtgcacctctcctcctacctccagcttccataggacttgtgaaggaacagaatcatagtctaggagggaccttggggaattcagtgtcccacttctccagggctgctccaacggtcctgcctgggtttcacacacttcccctgtgccctcttctgcagtaaaggatacgggttggcccctttctcacgcaaccgtttctctatctccacttccttacttctggtagagaatgtttttcatttatggttcagcagttgaaatttgaatgaaaatactgagcccatgaggacagaccttctgcttcatgcaaaagtcctttgacagtgtgagggacaaagagtcggcttctaccacttgacaccagtgacctcaatacaggatcacctcaaattattgtatgggatttggtcatcaagctgagtgttaattctgtggtcagcatgaaaaagcagaaagtgctactgtccagcaaagacagagtagtccaggagacaagacacatgaccttcaggactgcagcccacagcccagtggcaggcaggcggggcctgagactgcgaggggagacagccgaatttctaaaaactcagcgacaacagaatgtgataactgctgagaccctgaaagcagaggctcctatgagaataggtcacagggacccttgacccctgagtggaagggagcaggccagggaggaaggaagcaatgtctaggccaagaggggctggctgtgctccaggcagtggaaagttcaaagcaagaggatgccgcatcctcaagcacctggtgctagaggatggagtgcagttgtgagctgggcctgaagagaggtggtgccagggcagggcagggactggatccggaagggcctcaaggacatgccaaggctttgctctttatacacacagcagtggaaagtgactggacagtttcaccctgaggtggacagagctggccttgcattgtagaaacacagatatgcaagtgggttggaaggaccccccagcatcgtccctctgatggtagatatgcaagtgggttggagggacgatgttgggggtgacaattcaaggatgtcatcatcaggagatcacagtggcttcttctaataaagggatggcaatgggaatggagagggtggacagattgagtaaacatcttagaagccagctgggcaagatgggatcactgatgggcacagggagaaagcatggtgacctgagaagcccaggtgcctggggagaagcaggtggcacaggcactgtagcagcaaggctgagggtctgcagggtgatggggctctgtgtccgctgtgcataatttgaggcacctggaagagttcaagtggaaatagaaaccagcaggctcaacaccgctgagctcaggagggaagagtggccttgggatgaagagctggaagccacctggcagtagagaatggttgaagctgagggagtggcccaagccccccagaaaatcaggacaaagcaagaggaaagcaggaggcctaggacagagacctgaggggtggcaaagtgacagacctaggcagaaggagaggaggtggccaaggaagtggaaaccaagtgagaagcccgaggcaggagggcacgagaccaggtccaacctaaggactgaaagtagcacatgtggatctggtggccagcaagaggcagaaggaacctgactggagcagagccagggagaatataggctgagtctggaggagggcaggcagaggcaggacctggagcatggtcctatgctggtgctggcacctcccactcaccagggccaactgctaccatattagttcgtttgccactgctataaataactgcccaagactgggtaatttataaagaaaagaggtttaattgactcacagtttcacatgactggggaagcctcaggaaacttacaatcatggtggaaggggaagcaggcacgtcctacatggtggcaggtaagagaagagcaaggaaaattaccacttataaatccatcagatctcatgggaactcactcactatcacgagaacagcatggggaaacctccccaacaatccagtcacctcccaccaggtccctccctcaacatgtggggattacaattcgagatgagatttgggtggatagacagagccaaaccatatcagctacattttcaagaattttgtaagccagtcatcaagcacagatatcatcaaaaagtaaagaatatgaaatatatgagaaatagaggcaataaatgcccaacactcatcagtccctaattcagctactacaccttcagtattacctgtgctcctgagattgtgtctgctgcatctttatggtggaagccccattgatggggctcctgcatcacttcccagtggcccaggcagggatgttgtgtcagtagcctgaagggcccacagtgggagcatttaaaccatgcacattggcagatgctgccaatcagggcttgattgcccaaagagggttgttaggcatttaccagcacaccactaggctacaaagaagtggagaaaataggggagggtggcttttcaagaagtttggctctaaagagcagaaaaagaaaggatggtaatggaaggatgaggtgagattgagagaaggctggtcaaacaggaaaggtctgaatgtgtttgaaagcttctcccaataggttgaagatactggaggaagggttgatccctacagtgaggagcccaaagagacaggcctaggagaaggctggtcccggagtagacaccaggacaagctttccactgtaaggtaacaggaggaatcggagggagaggggcaggtaagtgagagtgtcagtgagcgggcgcagaggggactcccctccagcacttctgtttccctgtgatgcaggagaggaggccttgggtgttggaccctaagaaggaactcagtcaatcactgtgagatgtgtgagtgaacacatggctgccaggtatacaggggccgtggtgctactcagggtttgaggaagggagagaacctttgaagctgtggtaagggagagctggggcattgatctgggatgcagaggttgctgtggttgagagctactccagtgagcaacatgatggcttcagagtgagcaggccccatgggagagggcccagctgtgtcttcctggagcggtaacacctttcccctattccataggtatcctggcatccatctgtggtggccttgtgatgcttttgcctgaaaccaagggtattgccttgccagagacagtggatgatgtagaaaaacttggcaggtactgtacaaaattcaatgcaccctaaataaaagcaatatttaaaaccacgggggaaagaatgacattgagaaaattgaatatccacagggaaaaaaataagaataaatcctcatctcatattgtaagcaaaaaattcaaagtagatacaaaaggttaacataaaaaaaaccctccagagctagataagagtatgcattgttttttttaatgtggttgtgaagagagaagcattttcacataaggtgctaagactcagaagtgatctaaaggcaggaactgctgatgtgggaaagtggaaattgctgggacatacagcagcaggggattaacagtgtggcttactctacagagtgaggatgcgtcaggtctgtctagatggaatggcataggcaggttttcaagactgactacaaagtgaaatgtcactgaacaacatgttatagtatttataaaaaactaaaaccaaaggtgttttctctctgcagctggataggaagacagatgacacacagatgatagataataggtagatgatagataataggtagatggatgatagatagatataatagatgataatcatagatagataagtgatagtagataaatgataaataatagatgatagatgatagatagatacagatagataaatagacaggtagatgataggtaatgtctggatagataggtggatagataaatagataatagatgatagataataaacattagtaggaagatagagagattgagttttggaggggggtgtttaaatagggtataagtaaaactaatacccagccaatatattaacatgaggagtaatgtcaagaaaaattcacattacacaaattctttctaattgtttgaaattttttcattaaaacatagagatatgaatatgagaatgtatagtacaagatgtaaaatattaatatgtgccctctgtggacacaaatgggctgggaagaggggtagggaagggaggaccatcactttcttgccagagacttccatactgtttgattttctttaaaaattagaacacgtagtcttgtgttgcttgtgtagttttaaaaaatgatgtaacagctaatttaacaactaaaaagcaatcttaataatgacttaggaattaagaacatggagctctaaatatttttaatatataaaaaatcctgaggaacagctttcttccctttgattctattccactgactgccttctgtttacacaatgagagtgatgctttcattctttatccccaaaccaatcaggatcagatttgcaaactcatcaggaaaaaatggaagaaaagggagtcctctgaaatcaagacttttctactgcttcagtaacattaaaaataaacagctaggagaggtttttttgtttttgtttttgtttgtttttggcttggggagtgtgggtggaagggggttgtctaaatggtgtgcaaggaaaatcaatacccaactaacatataaacatgaaggattataccagcaaaaatttaaggtacccagattctttctaatttttttctgtttataatttttcataatgaaaagttgggtacattaattaattatacctagtctctatacatgaaaaaaaatatagtagaagtatggtttacagtgctacaatttaagcacattaattgtgatccatggttatttactctacaaaaattacttagtgctaaattactaaaacttgctagcatttcccttttaaaaatcacactggattattttatcgtttctgctggtttttgttcatgttaacagctcatttccaaatatatgttaattcagtagaagttcataaagaacttaaatgctataatgctaacaaacccctgtatcagaggaaccagcccccaatatttcagcataggttctattttccataagtgttggccagctgagaaataaaaagagtacaaagagaggaattttacagctgggccgctgggggtgacatcacatatcggtaggactgtgatgcccacctgagccttaaagccagcaagtttttattaagggtttcaaaaggggagggggtgtaagaacagggagtaggtacaaagatcacatgcttcaaagggcaaaaaggagaacaaagatcacaaggcaaagggcaaaaacaaacatcacaagacaaagagcaaaagcagaatgactgaaaagggtctatgttcagcggtgcatgtattgtcttgataaacatcttaaacaacagaaaacagggttctagagcagagaactggtctgacctcaaatttaccagggcggggtttcccaatcctagtaagcctgagggtactgcaggaggccagggtgtatttcagtccttatctcaaccgcataaggcagactctcccagtgcgactgtttatagacctccccctaggaacgcattcctttcccagggtcttaattattaatattccttgctaggaaaagacttcagcaatatcttccctacttgcacatccatttataggctctctgcaagaagaaaaatatggctgtattctgcccgatcccacaagcagtcagaccttatggttgtcttctcttgttccctgaaaatcgctgttactctgttctatttcaaggtgcactgatttcatattgttcaaacacacatgttttataatcaatttgtacagttaacacagtagtggtcctgagggacatacatcctcagcttacaaagataacaggattaagagattaaggtaagagatgcataagaaattataaaagtattaattttgggaactgataaatgtccatattaaaatgaaatattcacaatttatgttcagagattgaagtaaagacaggcataagaaattataaaagtattaatttggggaactgataaatgtccatatcaaaatgaaatcttcacaatttatattcctctgctgtggctccagctggtccctccattcagggtccttgacttcctgcaacacccctaaggtctgaacacagacaaaaaatgatcctggagacagatattgttgttaccttagagttgggttttcatgaatgtatttgatcaaaaccagctatactattaaataataacagaacaccctcttctaactagttacataatctttcctaaagactttctcctttgttttttcagtccacattcctgtaaatgtggcaggaataagaaaaccccagtttcccgctctcacctttgaggcccccgacaaagacagaaagaaggagctatccaggagctgatcctccttgcaaagctgtgccttgcagagatgcacgtgtgcatttcagctacatcatgccgcgctgttgtaatactgtataaagacctcaatctatccagagtatttttatataatgttggatgagttaggatttgtaatgctgttgaagtttctgggaacacataatatgtagccagtttaacaaagaagctgtcaggtgcacagcccttcctgggtttttttcttgtgttccctgtggtctctgacccattaggctaaagagagacaagagaagcccccaacctgattctcatgacagctccatcaagaatgtgggatgtgccgaccaaggatttgagaaagttgtacagaaatgtgttcatcaaatctggtcaagggactaagctcctagctgaccattcattctgaagattgcatggaggatgaacatctgggaatcctgttaatgagaaggctgaatcacaggcacctgggccaaagggtgtgagcattcatgttctctgctcaccttggtttccgcacaccttcgcaatgtgaacaggtcaggagtccctcccgtccacctcctctgtaacagctggggttccaggcatggtttaggccctgttccagcaataagaaccaatctgctgtacaatctgaggacttggctctgttatttacaaaatgatgctgtggttctgagattatttgggacatttttggctctcctttagtggacacctagagccacagattcccttctttactaaacaaatcccatggattctgatttctgggtcttaggattttaaaagtgaagggatatttttcttatatttgtgagttcagttccgatggtgcccgtggtcaaaagcgaaaaacatggacaattcctattcattcttagcactttgacatgtcttggggaaaagcttacattttaatttaaaagaaagatcaattatatccatgcttaacaggatcagcaggagctttataaatgactttacagagactaataagggatttgatctttctttttttgttatcgaggcttttgaaatgtggaacttgtgtgttctgctttatatgttatattcaatatcttttcagatgcagtctatattttatgctgagttttaaaaatgaaatactttatgcaaacaggcaaaattggtaccaaagggaaacattaaccatgaggaagagcatttttctaaggagaacaggtgacaatatacacatgtgcgctaatcgtaaaatgagcatcttagtctttaaaacacatcagaattgaatacgaataatctatttgtcgatgaaataaacacaactctttgaggatttgagactacattcaccctttattcacagtcacttgcagttttgcttttctctgcatttctctgctgtaagatgactgttgcattgttgaattgtattttgagtggatatttttgtttggtaacaattaaaattttaaatcgtaaaaaa

SEQ ID NO: 1261 - DNA, 201928 bp, Homo sapiens
aatgggcgggcagcatccacatgacccgcgccggcgggagggcgtggggaggcaggccaggaacgcacgctgcctggccgtatcgccgcccccaccgccgccgccgccgggactagaagtgagccgcccgggtcccaaacgccagccagccagtcagtgggtcccgcagtcgcccgcaaccggggcgaatcatggcggccgccaaggtaaccgcgggcccgaggccggggggagcgcgcctgccggatcagcctgggggtgcgagaggctcgggcgctcacgtgtctgggttggtgccacaggcggagcaaaatggggtgccgggcagccgttccaccttgcggctgctggagggagggggccactcctcccgggcagcacaggcggtcggtgcagagaccgaggcccgacctcgcagcggaaactttgtgggccggacactcccacttggccggggagggaagttggtgcctgacggggctgagccagggccgacgaggaggagcgggcgcgactggggcctggtgcaccctgggccggcaagcgctgggggtcctctctaccttcccagcgcgctcctgctcctgaccccgctggttgttgactccggcttcttccaggggccagagcccgggctgaagcctgatcctattacgtttcaagggctccgccctcccgcgggtggggaagttactttgacttccgttttggaaactgcctaggagacttggtctgcgcctttgtgaataaaaagtccagggactctccccctccccgctttcccatcattcccatcttccccctccctctctccatctgacaacacttagatacccgcctcggagcatttgagaggcttctttttgggaacgatgaaacagattgtcctgggagcctgtcactcctgtgaagttgtacttgaaaggggttctgtgtaatgtgaatcattcactaacccagaggaaaggcaactccaacacttgacctttcctctttcaccatttcttgaaacctggacaccatttcagtctctttggactgcatttcaacttctctggcagaataccatatttagtcccaatcacttgaatcatttggaatttattgcttttaatttaagttcacgaaggcagccctctaatcaagcctatacaacttcttagctcattttaagtgcagtgaacttaaatatacctaacatttcaaacatttgtccttaatcaaaactctgtgataaccctcaagaggaaaacatggccaacacatcatattcctatttattcaagcaaactaatcacatttgcaatggaaattgtaagcagacaaatatatttaaatgctgttctatgacttaagtctctccaggctccccaaatccgtaggcttcttcatgttgttagtttctgtggtctaagtggcatttctcttttctgtaattactctgagtttcatccttaggaaagtactctgggtgtgtgggctcatgtatgtttgcatatgaacacacaggtgtgcgtgtgtatatctatctataacttttcagcagtttctctgagcatcactaggattcaattttggaagctgccttaaccctttcaagcccaatagcccttgaccttttttttgcattaaatttgcatgcaaccaaggtacaaggcttggtatgaactaattccctagagtaggtgggactaggtacccattctttactgttagttttatatctgcaggtaatgtaaatacttttactttattaggagataaggtaattgaggaacataaattgagacgtgtgcatagaaatggagtataagacttgagtaatattaagtaaaataagtgacctggtgctgtggctcatgcctgtaatcccagcactttgggaggctggggcgggcgggtcagttgaggccaggagttcgagaccagcctggccaacgtggcaaaaccctgtctctactaaaaatacaaaaaagttagctaggcgtgctggtgggcacctgtaatcccagctactcaggatgctgaggcagaagaatcgcttaaactcaggaggcggagattgcagtgagccgagattgtgccattgcactccagtctgggcaacagagcaagaccctgtctcaaaaacaaataacaacaacgacaaaacataaaataagtgatatggaagttagttcaactctttggttgtacttctacataatagtagaagtgtcacatatcaagggcagttgatttttagctaagtattgagtcagggaaaatgaaatgttcatttttactacttgggagcttgtgtttttgtttatgtcttcatttgcactcacctctttctgtgatatctgatggctcacatcatatatacttattttgcaatccaataagatatataaaaatcaattccaagtagatgggaaaaacaggacaaagggaaagtaagacaaagccaggactaaggttagtggaacattatgtgcttactagaggtgattgcattttctcccagccaaagcaaagaggaaatgatcagtgaggtcatttacttgggagagaagtctccttatactgctctctgagagcagttttttttttttttttttttttgagatggagtcttgctctgttgccaggctggagtgcagtggcatgatcttgcctcactgtaacctctgccttctgggttcaagtgattctcctgcctcagcctcccaagtatctgggactacaggcacgtgccaccacacccagctaatttttgtatttttagtaggccaacatcatgttggccaggctggtcttggatctcttgacctcgtgatctgcctgccttaacctcccaaaatgcagggattacaggcatgagccaccacgcccagccgagcagtttcttttatatgctgtgagtgaacggcatttgaatctaccttgtgaccacagatatatgtctgtgggttacataaggccatttcttatcatgtccttcattataactcaatggcagtgcagtaaatgtggccttaaaaggtccctcaatgaagctgctggtctaacttattccaagaatgtcccttattgaactgcctttgggcatcacctttatcggttgattctgttggcagcctgagttaaaggctgtgctccttgctttttccctggagcatagctattccatgttgccagctgaacacagagccataggggtagggttggcattccctcttaaaagttgaggagcctggataggagaggacttcacctcaatggactgttaggaaattgggctgagactctggggactcagcaactgtgagaattccaacactcactacactcactgtgacaaattgtttgaatatttaagcagatttggtattttctggatagatgtagccacaactagcaattagttttctgatctgtttctttctttggtctttatacttatttaaatacagctaattattcatgaccttcctttaaatagttttaatggggagatggagaatctagtctttggctgctttttattttgaattttgctatgaagattactagttaatggttcaagaagtgtttgttttctttcgtgaatgaacattaatctaaaactcttagtattctgagattatctcaaaaagtgtccattctcttgctgcctacgtttgtaggaataatccttgtgggttcccttgttagatctgcctgtactgtttgcgttgtttgaatatttcttttaaacatttcccaaaactgccataaaaaaacagttttaaaaggtggtaattgagaggtcacccttttcttcgtctctgcccttttcttggttaaaggagagctttcttcttcgtcattggttaaatttatgcgttacgaatgatgtaattaacctatatgaacctactaaaagttagaatatgctcccttgagttcagacctgtgagatgttctggggtaaaactgaacacagaccaatattagcctagaaccaaaagaaggaaatttgggggcacattaaagcattaataataaagacaatttggtctgtaggactagtacactttgtattgacttttcattcttggatgagttgttgctgtgatcattgattcatttatgtgtattgtgttctttccagtgttgcaaatgggacaaaattgagaatactaaaatgaattgttagctgggcatggtggcacgcatctgtggtcccggctacttgggaggctaaggcaggaggatcacttgagcccagaaggcagaggttgcagtgagctgagatagcaccactgtactccagcttgggttacagaacgagatcctgtctcaaaaaaaaataaaataaagtaaaataaaataataaaataaaataaaatagaataaaataaataaaatgaattggactccattttgatgttcaagaaaaccaaaaccattccagggggctaagttctctgatggaaatgctcccactacaaggtttgtgggagcagtaggagaagagcccatttctgaggagatgagggaagtcttctgaaaattgctagtatttcagaaggaatggatggggaagagtaaagatccaatccagtggttggaaacaaatgaagggctgggaggtgagagcacaggctacatttagttaacagcaggtaataaaaactaaaagcagctgacacttactgagcgcttactagataccaaattcagttccaaatgtgtttcattgttgattcatttaaaattcagttccaactgtgtttcgttgttgattcatttaatgcctcagccttttgagttagttactatcatcctttttttatagatgaaggctctgagataccaagaggtgatgttagtggcctaagatctgataagtatggctgggtacggtggctcacacctataatcccagcaccttgggaggccgaggcaggtgaatcacctcaggtcaggaatttgagaccagcctggccagtctggcccatctctactaaaaataggaaacaattagccgggcatagtggtgcattcttgtaatctcagctgctcgggaggctgaggtaggggaatttgcttcaacctgggaggcggaggttgcagtgagctgacgtcgtgccattgcactccagcctgggtgacagagcaagactctgtctcaaaaaaataaaataaaataaaaaagatcggataattaggaaattatcgagctggggttcaaatcctgccagtctggctccagcagctgtggcctcactctgtccaccatgtgtgcctggtagtttagtgtggtggagaataaagtatatgggagaggtgtgggagatgacttaggagaggggtaggtgtctcagtgtaaaccagacttttatttgagaactgccttacctagtgctttttgcatgccaggtacttttccaagagccttacaaatagtaactcaattaattttcttaattctaagaagtaggtgctttctgtttttgacttcaacttacaggtgagaaaactgagttaggggaggttaagtaatttctcacgcttgtgcaacaggtaagtgctacagtcttgatttgaaccttgccaatgtgtcttcagagtctctgctcttaacctctgcgctgctctcccaggtcttaccaagagttccatttgcgaaggtgtatgtgtgagagttcacatgccatcgggtatggatgtgtatatttcctgatcatcccagtccagtagttcttatcttagaacacctttgtcactctgtatatgcttcatttcagtgtttattaagtgtatttctcatctctccaaccagatcgcaaatccctgcaggacaggaattgtcatataccttttatttaattgctttattgagatataattcaagtactatacaatttacccatttaaagcatatgatttattggttttcaatatatgcacagagttgtgtaactgtcaccactgtcatatacctttaatccagtttccattaggatttggactataatatatatatatatatttgggacagggtctcactctctcacccaggtggaagtgcagtggtgtgattattgctcactctagcctagacctcgtggatacaagagatcctcccaccgcagcctcctgaatagctaggacctcaggcacacaccaccacacccagctaattaaaattttttttttttttgtagagacgggggtcttgctatgtcgcccaggctttgggctgtatatttaacctccatgtcttccacattgttcacccatcataaaaccctcttcagaggtttgtcattgaggataaaatatattgaggttattaaagatattcttcaaatggcagggttttttctcccctatgtaaaaactctactaagtatttggtgatatcataataaaacaaatcagtttttgtgctaggaatggaggaaagaaggtttgagttgtttttatgctaccatgatgatgattattaaaacaaatatctatggctccactgtttgggttttaggggttcttatcttgttggagctggatggccttggaatttatgttaacacaatgatctttactctttccttcctcagtcctgtccccttttaccaggagagtcctagaaatggagtcccagaaacatttgttattggtccaaattcccatgaatgcctttgcttttggcactgctctaggccagtgattccctacatactgaagtcttctggactggtataaaaaactgctgatgcctgggtctccctccagagatcatgattgaattggacttgggtgtggcctgagcctcaggatttttgaaagcttgacaaccactgttattttggtgcacattgcttcaagagacctgctggctccttcttggagtaagaatggaatgcagtgagattaagttaaagtccctggtgtgtcagttcaaaggaggggtatgtaggggtttctccaaatttctcttctttcttgacagctttgtcttagtcctgcctggtgtctccagggtgcttaggcatcaagtttatacagttttgtgataatcctggaatagaggttttaatcccaaacttgactgaaagctccatttgtctcctgcagagtctcagtggttttttgtgatcagagaaggtgctggaggagggaagcattacaaagagcaaacctggtctcagagccctctcctgggctaacctcatccagggccatgtggtgccagtgttccctggcttaggtcatatggcttcacagcaaatagagggttggaaaggtgtggggagagttgaaaggtgatatgtagcgtaaaaaagtcagggagcaggtcttttttggatattgagttcttttagaagattgtccgaggagctctgactcctctgtgctttggtctcttagacctttagtcccatgaccagtctctgcttttgatgaattcttagagggaaccattcctccctttgttctccactatgtgtgaggattatctattatggcattcctgctgagcgcttcctcctctctggttggcatttgctgcctcataaacacctacagatttcctcataagactctgtgggtttgccttagggtggaccttgcaacagaggaatgtgtgacgctgagacatgtgttggttctgcttggaggtaaggagggggatatgcctttgtgtagtgatacaattcctttagcaaagtatttaacagctactgagcaaactctattttcatggcctgtttaaccagacagaccctctaattgggtgaaatgaactaaattaaatgtccttctcctaaaagtcaccagtaacctcagttctaaacctgttggcttgtcctcatttctggcctcacatgaccctgtgtcctaccctttctttctcgccatctgctttcatgatgtcccctctcattattggcctctagcatctcatattacccctttattctcctttgcaggcttcttcttcttcttccttcttcttcgtccttcatcctttctcctccttccttcctccttcttcctcctccttctccttccttcttctttcttctttcgtcttctttcttcccagcaaagatatatttttattttagtgtttagcagcatgacatatgcatatagaatgatagtacactttaccctaatcttcaaaacagaatgtactagtttaccaatgaggaattttggccaaaaatgtagtgtttttcccttccctgtacaggtcaggtatatgtaggtccagcactaatgctgcaccttttgagaagcattactttagcaaaaatctagaaatctttcactttttctgaatctaacaaagggtcttactttctttttttttaaatgtacattttaaaaaataatttcaacttttattttagattccggaggtacatgtacagatttgttacctggatatattgcatgatgctgaggcttggggtacagttgaccccatcacccaggtactgagcatagtacccaataattagtttttcaacccttgttcccctccctcctccctctagtagtccccagtgtctattgttgccatctttatgtccatgagtacccattgtttagctcccacttataagtgagaacatgtgatatttggttttctgttcctgcattaattcacttaggatcatagcctccagctgcatccatgttgttgcaaaggacatgattttgttctttttatatctgcaaggtattccacggtggatatataccacattttctttatgcaattcaccattgatgggcacctaggttggtttcctgtctttgctactgtgaatagtgctgtgccttgtgggcttctcttcattctgcctggacacctggaaggttagtgtcccccaaggctgtgcctgagattgtctcctccctccagttcctgccgcactacctgcccccttaatgggtattggctccttaacactcctcagcctgggtggctgtctcaagctctagccctgcacttttagctgtttagtttgagctggaagactcaacttgtctgtctcaaagatatttcaaactctgctgacctagaactcaccagttcttataactgaatccatctttttggtcattcctgacttcatcctgcagcttcactttcctgataaagtttctagttagttcaattaagtacctgttatgggcagataggagagacaccatcagcctgaattggatgtggcaaaagaggtggatcagtgaaacccttctacggccatggagcatgtatgtcctatcttctctgttcaaattcagggcctctttattttgtagctgtaccattgctgtagctcccactgatccccttgcttttgatctcatccctacaccttcctctccattctgtccagactgccaaaggacttttctaagattggctcttgttgccatgataatagcactaccgtgttcatgggtacagtacttagcagctttaaaaagtgcattcaagggcataagtgacgacgactgtttgtcagtgcctacactgtgctgggattccaaaaacaggtaagctactagatttgttttcaagaagctcaaagtcttcagggattaatataaccagataatataaagacccaagcttcattatttgatctttataatcatctacaaggtagcagggaacgtgttgataacctcatttgtcagataaagaaacctaaggctcaaaaaggttatgcaaataataataataatattagcatatgtttatataacacttgtaaaagccggacactgttccaagcactttatatctactaatgcaatcttcataacaatcctatgacatgtaagtgctctcaccttcataatatacatcgagaaactcatttgtacagagtagttaagttctttgaggtacagagagattacataacttgcccaagatcacatggcttgtaaataggagagctatgatttcaacacaggcagcctggctccagagcccaagcacataaccagtgtgctgcattgccctctttaatttatcttgctatgcagtgtggcttctgttgcctgcagaataaaatttaaactctttagccagctaaaatctccttggtcttggctgcattttcaatacttttaatttagtactttcccagtattaccccagactcattcgattttcatattcttcacagcagtttgtgaacgggacataacaacctctgttcatatttcttgccataaagctatggcaacagggtagcaggataaaagagagcctgtttatttgtttgtttaacatagaggtcagtcagagacagaaatgtttctttttttttagcctttgtcagaaagaaatacttcttttcatttctctgtattggtgggcagatatatatatatttgtctgagttcttctcttcagttttcagaaggggttgtggttctattttcccatttcttgaagtccctgtaggaatgctaaaacccatgtcctaagattacagtttttatagttggtttgttctaatcaatattcagatatagtccacacatggctggttgatacgtcttttaaatcttgttaatctataggttttcctgccccctttttggttgtttccttgcagtttatttgatgagggaattgggtcgtctttcctgtaatttcccacaatttggactttgctgattacgtctttgtggtgttgcttggcctcagtatttcctgcaagtgacagtttaatctaaaagcttgatcaagttagagtcttttttggttttggctagaatacttcctagatggtgcttagagcttcccatcacattgctgggtacttggtactgggtactcacatgaggaagcacctaattcttggttgtttcttgtgatgttacgttttggtcagtggtttcagatgttgttatcttaagtccaccagctttttgcataatggttttaattagctaactttaaatattaacatttgcccttcctggtacattgagttaaaagtgattttcattatttaaatacacactcttgtgtgtatgtatgcatattatgtatgtatgtatgtctatatatgagtatatatcattgttataaaaaataatggcaattaaaattcaattggatattaatgggtttagagtttatgtttgggatgatgaaatgggtaatggtgatgtagaacattgtgaatgtacttaatgccactgaattgtatacttaaaaatggttacaatggtaaactttatggtatgtatattttaccacaatgaagacaaatcaattggaaagggattgtaacacatggaattaaaaaaatccaacacaacataatgagtgataattattgctccctaaaaggagccaaagtgagttggagaatagactgataaagtttctttactgaagaatgctagctaataaaggtagaagctatgctagaattagaaaaaggaaaaaaaattgactttgccacctgcaagtaataattgattcaggcatggatcatcattggatgctgaagcctttcagtaaaagactgttggaattcccattgtctgaatgcatctcctagtaaattacttgctgtttacagaggggaaaaagtacctttacaatggagaaatctgcttcaaccaagtgatcatcagcaaatgggataaactagcattatgttaccgactgatattatgcattgggaagtatacaacatgaacctaaaaatgttcttgccaaaaatatttaatctggatctaatcgtgaggaaacaatcagacaaatccagaaagtaggacatgctgcaagacctctggcttgacttcaaaaatgtcagtgttatgaatgaagaaggctggaataaaggaaactcccaaagagacctgatgaccaaatacaatgcttgagcctgggttaaaaacaaataaagaaaagaatcgaaacagctggaatatggggaccatattaaaagatattgtattagtttgctagggctgccataacaaagtactagagactggatggcttaaacagcagaaatttattttttcacagttctggaagttaaaagtctgagatggagaccccagcaagtttggtttctcctgaggccttctctccttggcttgtagatgggtgtcttcatgtggttccttctctgtctgtatcctaatttcctcttcgtataaggacaccagtcttattggattagggtccccttcatcatctcattttaacttaataaccttttcaaagaccctatcttcatatatggccagtcatcttccgaggggctgggattggaacttcaacatatgaattaggtgtgggggacacagttcagcccataacagttattgaatcatttaaaaatggcttgggtgagataatgatgtcaaggttctgaagggaagtgatctttgctgctgatttattttgtttcctcctagattttgaactcttgaggacaaggaccttctctggacacagatatgcctcagagtaactgttgcatagcattcagacactgctggttgaattgtccatttacttggcatgccaacacatggcaaagtaaagggggaaggagattttctgctgcatgtatgtggtttgttgtaaacctttttctaataatccatttgctcaatcctctccatcccccaacaaagtaatatgatgagaatttggaaatacttgaggagttgtgcatgggtaatcgccaggtgagcacatcatggagaatcagaaattcagaacagaccttggcaggggttgtgctgtcccaaggtagatgaatctctatgactacagaaaggctgcttcaaaaggaggcacctagagaaactctcccttgtgattaaaaaagcccaggtacattagagggcaaaattcccagcaggtccaaacaatgtgttccattgctgctgtttcagccctgctagtctcagtagtaccctgggtcatcagatggcttgaaggacaagagggtgatatcctgtctcttctttgactttgttgtgctcactggcaaggagtttcattcacttctgagaattcacacactcattttattgcaggctgatgttgattctgagtttgaggatgccaacatcttttcattgcctcccagctcagttccagaagtgaaagctcagtcctagattctttttttatggtggttcatgaagatttcagttaatccatttgtggtgtccaacagcaacttgagaagagcctggtcttgacctttgcccaattttctattggtttatttgccttttcacattgatttgttctaagagcgcttgtaaatgaagaacattgcccctttgtcctatctattgcaaattttgttgttgtttttcttctcagttgttgtttaactgatttatattcactttttaaattgttatgtcaaatatttatcatttttttctttatggcttctggattatatggcttctgagtttgtcatgtttgaaatcagcttccctacttaacattacataagaaaccacctgtgcgtttttctagtactttttgaaattctctctctctccttttaaagattaactctgatccagctgtagttcttttggtataagatgaaaggtagggagccagtttaatttttgttgctcaaccccaggagttcgtgacccttcactagtgccacatcatcagctagagagacctgctgctaattcagcctgaatctgctggttcagccttcagaggaaatctgattagttcagaaagccaagatcacctccccacaggggtcaggtatctgctgctgcctcaatcagctaggctgctctgaatatgaagagtaactgggaagcaaggcgctgctagattgtctcaagttgtgctgttttcattcaattgttattctctattctcttacttttagcagatgagaaaacaagaggtcatgctgctggttaacagtggagtcagattttttttttttttttttttggagatggagtttcgctcttgttgcccaggctagagtgcagtggcacgatcttggctcactgcaacctcttgaaccctggttcaagtgattctcctacctcagcctcccgaatagccgggattacaggcatgtgccaccgtgcccggctaaatttttgtatttttagtagagactgagtttctccgtggtggtcaggctggtcttgaactcctgacctcaggtgatccacccacctcagcctcccaaagtgctgggattacaggcgtgagccactgcgcccggccgcagtggagtcagatttaaatgttccattgcaaagctcatgaaataggaaacattctatgaggggaatctggttggagaatcctggaggaagaggcatttgacttagtccttgaaagaacagcatcattttttaaacttctcattatggaaatttcccaaaaagtgcaaaactggaatagtataattaaccctcatctccctatctagccagtagtaatcatcaatttatgtcctcaatattgtttcatttatgccatgccctctttcctccttccatccctacttttttttttttaattaaatttttgtttttggagacaggatgttgctctgtcacccaggctggcgtgcagtggcgcgattatggctcactgcggtctcaaccaacagtcctcccacctcagcctcctgagtagttgggactacaggcacatgccaccatgcctggctaattcatccccatatgtttttcaaagcaaactcagccatcctatctgtaaatattttatgtatctctaaacaagatttcttcaaagcacaatcacaatatcattattatactttaaaaaattataataattcttcaatatcttcaaataggtgttctgtacacattgtacacatttcccgtattgtcttaaaattttttaaatagttgttgaattgtgatgtatataaggttcatgcattacaactgatgtgtcttaattttctttatttttttttttaaattacaaagctacctttatacttttaagccccacaggaataaaaaacactgggaagggctaaccccctcaccccaggagtggcccatagggagagaggctacctgaggggaaggaagtacaaaagggacccaccgcagactcatggcaaagggaagccatcggtgctgggacctgtggtcactacaggaggaaatgcgagtgtggtgggactggctccaggcacacaagtgaagggcaagagagattggagtgaagccacaaagctacttgggttcctccttcttctcgtttgcctttttctgcttctgctgcatgatctcctgagtccctgggggtagagatgatagggcactaggaggtatcagagggcaaaaagaacaaaatgcagagggatgaagggcacaaaagagaagatggaagtggatgggactaagctcaccgtttggctgctgtactcccatcctaggagaagaagaggaagagagctgaggctcaaaaggcaatcagtctccatcctgcagttgcccaagaggtcagaagtctggccacataggcccaaggctctctaccgtttggctgctgtactcccatcgtaggagaacaagaggaagagagctgaggctcaaaaggcaagcagtctccatcctgcagttgcccaagaggtcagaagtctggccacacaggcccaaggctctctattcttacaccagtaagaaggttgggagaagggaggagaaccgggaacagcaaggagggccagaagcactgggctgtcataaccacaggtgtatctgaaatgggaagctccctgcccttgccctgaaggtcagactgggggatgctcagaaatcagactcttgtgtcctaattttcttttgatctctggattctcttgcctgctcaatactgtgctttcttttcctctgaaggacagtgtcacataatggctgaaatcatagatttgcaatcaaattagggctctgccacttgctaactgtgtgacttggggaagttactcaacctctctgtgcctcagtttcctcatctgtaaaatggacataacggtgtctactcctcagggctgttgagagtgtcagtaagctaatgtttgcaaagcattagagtcatgtcaaaagctgtgggctgtggaatagggcccaggagggctcactcaagtgagatggtgtgtcgtctttgagatgagcctccagctgtgcagagagcccctttccttttcctttttgcttccttctggttcttgacgtgcttcagttagatgaggttgatagcaggaatttggacaggtaaggcatatttaatggaagcaacttctttattgtcctttcatttttggcttcctcttcctctgtatttattaaattagcttttctctctcagaagtgtttaactttttatggcattatctgggcttcagcaacttgtgatctcctaagtagagcttttcagcactttataaatacgtcatatactttttatattcctttgttccccatcaggaacatagccccagtcttcagaatagcacaatcagtttttattcatttaaggagcagtagtaatttgacacttgctaatatgtaacaaattatattgggcgtggtaattacaattgcagctggttcctaattatactgtaaccttgatgcttacaaaaattgagactgaattcagcataaaatactggagaataatattctgcactaggcatttctgccttctactgagccatgggcatttatgaatcataatgccaaattaaaaagaatttattttaaattggttacaattacaatgttgtccagtgtctccattcttaaaggtagctttaaagtccccctttttgcttgctaaactctgggaatatccttcaggtattataattagtgtctaaataacctgagctcaggggtcatttctggctgtgtgatctactggtattcatttaagactctttagtacctcagcttctttatttgaaaagtggggatattactcactcttccccttaaagagttttaatgatacagtatataaatgaaataagataaaaagccattagcataatgcctggcatagagttaaggacccagtaaaagttagctggtcattgttatcgttataattaataataagtgatccggctccaaagactgcctctgtgaccctcaactttagcagaattagtgtattaattctcctgccactctgccttatgatagcatgtatcatcatacattttgtaccaaccacttgtcgataagtcagctttccctgcttggggcagggtttctgatttattgggtgttttctcctcggtgcctggcgctgggcctagtacactgcagctttcccataggtgattgtgttgcatggatgagcaagtagagcatcaccatctaaggagtggttgttagctggggggtggggtagtttggcccccaagaggatttcttttagcaacctctggagacagtttcttggttgttgcagcttgttggggaaggggttgctactcccatctagcaggtagaggtcagcttaataacaataatagtaaaatccagaactagtatgtttcaggctcttttggcataacagaacccagctaaaacaccaccattcattcttaactgttatactctgcctcttaatatcagaattttaatgatgatggctttctagtttatgttctacaacagagcagagtgaaatctaacatacatcacaacctactgaatccttctgataaacatctctagtgcctctgaaatgactcgctgatgtaattacccagtgggttaacatttgtggtgtctgatactttataagtcaactgttgagtgaaatgaagttttgccagctgattacatagaaatgttgtggtttgaagaatgcttaacagggcatcttgtctttgtactaatttatatttcagtaacttttcccataatgactgctcttcatttattaggtcgtagggaaactgtaggatgaaggatgagtgactcagtggtttcaataaaaaattattttcttaagtttgagatacctttttcttcttctcaagttaatggtaactgtggttttagggaattccaaactttcttttgcaattactgattgtatcagtcagggctcactcgcagagaacagaatctactctagctggtttaagcagagagagatttattacaggatattaaatggcttacacaatttgttgggaaggtaaagaaacagacttgaggttgagctctaaagaatgacgtctagagtctcaagcagagcaggccaccaagacagcagtgacctcctgtgcagtcacaatgctgcctgccaagtggagagtgtttcaggaccatgtggccactgacatgggagggcaggaggttgccacaggaaaactagacacttccagcaatggtgcgtgcttggcagaaacagcagaaggtgccccccaactcccaaacatttgccaaatctcactcaatttcatctaattgatggcacataggccgcatagcagcaagggagtctgggaattgtagtttcagccttctagtgtctttagtataggaagataaagaaggagggtgggcccctgcttctaagtggttaggttacacccaagaatacttttctttgggattcagggccatctactgcactatttcctcaggttcaaaagactatgcaggactgtttctccttctctctccgtttcctgcttgtcactgcatgcttatttacacccacccacccacacacacacccagaagcttgcttttgatgagctacctctttgagtttgtagttcttatctaaggcaaatatttactttatgatagtagaattttcagtgtaagtctgtgcttgtcttggctttcagatgtttcaggtttgggagggtgactggggaagtattgctgaggaagggctgtgctgtacagttggtgacgtagcagctgaggttgggcctcgggtcctaacgcagttgttctcagtccacccacacatggtaatttcttgagggagctctaaagatatccattctagaaattttcatttgattgacctttggtatggtttgggttttgtaaaacctaaaagcacctcaggggacttgaatatgcagcgaggactgagaacctacatcttataatccgtacattaaaattggacattatctaaagctgtggttcttaaactttaactgcatcagggtcacctggagggcttgttaaatcataggggattgctgggcctcacccagtttctgattctttgggtctgggatgggtgtgataatttgtatttttaaaagttcccaggtgatgctgatggtctccacactttgagaaccattggtctgaagagagttgcctattttcattgtaaatgtcagatttttactgacctgaaagactttattctatattcagcacttccagagaatctactttgtttcctgatctttgccagagttggggttgatctgaggagtaaggtgccctcacagagatggtggtctcacatctctacagcctcccagtgaaagaggagagctttgcttttctttgcattttatttttcaaattagcatttcttattttcgtgtaggttttcttatattcttccccaccatcctctcttagatctgacaactattttgaatacaccattctataccactgtgatttgttaaagtaatgagcctgcaactgtggcttgattcccttgtaagaaagtctgtttaaaaaatattcctacaggtaggaattttctggtgaccccctacctatggctgctctaactcatattaggagagtgaattcatttgtcctgaaagatgacttttgtattcttcttgccatgttctcccctaccccctgcctttttaaaaacaccagttcttgaaattgtgttattgtttttctttttatttctaggatgtacctacctagtatgtgttttgcaaacgctattgatgacttacacaattataaccagtgtttatcttgtcaaaaagttttacatattcagtgattctcaaattttgctcctgtggagcatagactcattgaatcgacctgaaatttccatactaaatttaaataatgatagacttttcccagtttatggaagaaactatgcatagagtttttctgttccaacattgccactttctgggccaggcatggtggctcatgcttgtaaacccagcactttgggaggccaagatggaaggatcacttgaggccaggagtttgagactagcttgagcaacatagtgagactgtctctacaaaaaaattaaaaaattagtggggcctggtgacacatgcatttagcctcagctactcaggaggctgaggtgggaggattgcttgagcccaggagtgtgaggctgcagtaagccatgatcgcaccactgcactccagcctgagtgacacaatgagacccccaactaaaaaaaaaaaaaacaaaacaccaaaaccctctctttttcccttaaatttggaatcagagtaaaatgttatcaaatttcaacaaaattctttatcttgttagcaaataatatttcatagtaatctgtaaaggacccctttcttcttagtgaattactctgtatgtttgaaaaccagttacttgatttaaaattcttgatataaaatttttgttttaatgttggaatccattcttacaaatgcaaattcagaagaagaatcataaagaaaatcaggcagttataacaatagtagctgtaaatatttgcatgctattaatatatgagaaaaaaatgtaacagtgaaagtaagccttctggaaacaatctaaagtttgatgactcttctaaaccccaagaatgaacgaagtctaataattccaggcttctaaagcccaagaatgaactaagtctaataatcccaagcttatgtgatgcaaagtatgcatgctggacagctgttctgaattgactttaaaagggtggctacatttctgtggcttcctttttccagctcatagaacttcctgggtattggttttgccaccaggtagaattcattgaaatacacctttaaaaaactggtacatctcatggtaactttgcattgtcttcaattaagttgtgtaagtgttcttcattcatagcaaatgacacttaaaacaagaagataggaatgggaggtagcagtataaatggaaattccgaacagccacacagcatttgactggtgaataatagatggaattactatagagatgaggcccaggaggctggtagtaatttttctgaatccatcccctgttgaaccatacttatctatccttaaatagaatgtaccaggacctgagccaaattttagtgggcctcagagaaatcttgtggtgatcattaaccatttgctgtacctggaactctgggttgggggtagggtagctgagacaattatcagttaggatggccacaatgtttatttagtggtttggtgagtgtgtttgaagacccatgagtttctcttctcttttgctaatttatcccttctaaattatgagccagtttacccatcatttagatttcttaaggagtaaacatggtagaacataaacatctttggataaataatacaaatagtaatagataccatttattgagcactttaactgtgtggcccttttggtgctaagcactttgtgtaattatctcatattacttttctagctgtctaggactccccattttataaatgaggaaagtgaggctgagaggtcagggcctccaagtcacatggccagtgagtttatgaggttggtcctgctccctatttgaggatgatctgacactaaggccatgttctttttttttaatgaagatggggtgtcactatgttgcccaggctaatctcaaactccagggctcaagtgatcctcccaccttggcctcccaaagtgctgggattataggtatgagccaccattcctgtaagatcatgtccttaatcacagcattggacagacactacacactgttaggagaaattgggagagttttgatttttaggcttgtactatattgcagttatgtaccacataaggatgttttcatcaatgaaggactgcatatatgatggtggctccataaattatagtggagctgccctgtacaggtgttccactttttatcttttaaaaccatatttttaccacaccttttctatgtttagatacttgttttacagttgcctacagtaatcagtataggaacatgctgtatagatttgtagcctaggagcaataggctatctcatttgcctaggtatgtagtaggctacaccatctaggtttgtataagtacactatatgatgttcacacaatgatgaaatcacttaacaatgcatttttcagaatgttatcctgttgttaagtgatgcatgactgtattatattgccagctaatgcaagttatcaacactttgaagctgcctgtaatgtgggtctgtaggaaggccactacggtaagagatggaatatttgggatctgatctcagctcagaaaacatttagaaatgtcagcacagattggcacttaatctgactttttgggggaaataattgatgctttctgagctttggtttcctcttctgtaaaattagggcagtaatatccatcttatctgactgatttgcagtgagaatccaacgagataatagtcttgcttagaaaactgtaaatgttaggcaacatgccttataagtgttgggtcattctctgtctttgttttgatttgtgttctctgccctagaccctgagaaggttacaaagtgaacactttttttccccctttgaggtgtagttctgatggggagcactgaatatacatttcaggatccttaagcagaaatgtgctatgaaaattgagggcaggggaggttcactctgaaatagcattgcccaggcaagaccttacaaagttcatggcataaagaattaattctattttagaattacgaagaatacttcattttgtggaaaatttattttgcttttaagaggaaaacagttaagaacttagggtaccatatgcttttgaaaaaagtgttatgtacttccatgagatgtgggactcttaccatcaaggaggagatttttctgctcttaaagtggaggatgggggcattttatgctgtcccatcttctcttgtgttcgtcctaccctacctttctcagaatagagacctgagaggagggagtcctctctgaagcttttagggcagcagagtcattcatcttaggttaactagcagtacattttcttctcctctattgaacagcagagaacacttactaattcaggatttttaaaaagattaaaaattcatggctgggcacagtggctcatgcctgtaatcccagcgttttgggagtctgaggcgggcagatcacctaaggtcacgagttggagaccagcctggccaacatggtaaaaccccatctgtactaaaaataaaaaattagccgggcatggtggtgcatgcctataatcccaactacttgggaggctgaggcaggagaatcgtttgaacctgggaggctgaggttgcagtgagctaagactgcatcattgcactccagcctgggcaacaagagtgaaactccatctcaaagaaaaaaaaaaaagtattacaaattcttatgaatagccttggtggttacaagcactcagctgaaatgaagagttatcagtcttgctttgggaaacaaggtgaccaaccatctggtttcagaaagactactcccattctagtgattagttaataaaattattcctgacagtggagagcctaggagctcaggcagttccatatttagagacagagaactcattgtccaaagatctcagaacagccttcactagctcacagaagggatttaggacaatttgcataagtttccctgtggatagcaacatgggtccagtgttgggtggttccaggaacctctccttggcttcatcatggggtggctctgtgcttggtgggaacccagtctcatgatgttttttgctaggaggattgggtgttgggacattgaataaacccactgtttggttccacataagggctcttttgtgttggcctgaggaagccatgttgaagtttgtcttgcttttccccagcaatgtttttggactttgtggcctgcagaattaagcacaacacccattctgagctaatctgtcaatttttgctcttcaaagataaccacagccacttgtatttctaaaatatgtagaataatatcatacctttggagacctatgatttattaattaaaaactgaggagaggaggagaggttctttggcatgcccaggtagtgaggtatacatgcctgttcatggtgaaactgtgagaagtaactcccttgagttaatatgatttccctagttcactgacttctttaagaaatatgttctcttggctgggcacgatggctcacgcctgtaatcttagcactttgggaggctgaggcgggcagatcacttgaggtcaggagtttgagaccagcctggccaacatggtgaaaccctatctctactaaaaatacataaattagctgggagtggtagtacgcgcctgcaatcccagctactcaggaggctgaggcaggagaatcgcttgaacctgggaggcagaggttgcagtgagccgagattgcaccactacactccagcctgggcaacagagagagactgtctcagaaaaaaaaaaaagaaatatgttctcttgcatagttgacaaacatttgtttacttaaattctcctgtgaaagggcatggtttacactggattataagtaaaaaatgacaggtgtttgcaatgtttcaccttttctttttaagaaatgatatacattcaacattagatattaagagattttgctactggttccttgcataaaattttatcattttagaagctgcataaggagtctaatttaaaatgggaagggggcatagtttatgcactggggcaacatggtatttaagtacaaaaatgaaatgcactaatttttaatctgagatttattttcctttagtcggctagcttgatttctcagctttgttgtaataacataaacatttttatgtttatttataggtggctttaaccaagagagcagatccagctgagcttagaacaatatttttgaaggtcagtataaaggaatctattttgtttcttgtttgatttgtgttctataacttttaaatattattttcaaacagctctttatttcgttgttatattttgaaaaagtcccaaagtgtcagcccggcacggtggctcatgcctgtaatcccagcactttgggaggctgaggtgggtggatcccctgaggtcaggagtttgagaccagcctggccaacatggtgaaaccccatctttactgaaagtaccaaaactagccaggtgtggtggcacgtgcctgtaatcctggctattcaggaggctgaggtgggagaatcgcttgaacctgggaggcggaggttgcagtgagctgagatcgtgccactgcactccagcctgggcgacagagcaagactgtctcaagaaaaaaaaaaaaaaagaaaatcccaacatgtcttaagaggggagagccttacaaatacgtctgctttttaaaatgtaggtgactgtgatgacaacatggcttatattttaatttcttttatctcatgtggtgtaaggtatgtgaataaaagcggttgctggagtattcagttttgcaacccatttacctttccaggattgacccgtatagctttttctcctaggaagtttaaagctcattgtaaacatctcagtaatccttcactcatccatgggactatactgtctctccctggtagaagcctattgttgtggtcatcatcattatcatcactttatgatgactgcggtatcctgagaggaggctccagtatggataatactagatactagagcacaacagacaccatggaagtttgtgtcttatactggcatcttatatttccacctattttgtgatagtgggcagtgaatgattaatagaataaaagtctgtctcaggttccagacaccgaaacacctttatgttattcagctgaaattaaagtactcagaaaagaaaaggccacttttgtaagataatatacacacatataatatatatgtatatatacacacacatatatgatatattattaataacatatattaatatacacatattttatatatatatgtttttctaaacattatgaaaaggcagctgagttgtatggaaagaggaccagggtgtcaaatgagaaatttgatgtgtactgaatatggtgtagaaaggtattaaatctatgaacctctctttcctcatcacaatgtgttactattaaaactaattgagacatcaaggactttgaacatggacaggatatttgatattaaggagttggtattaatcgatgtttaggctgataatattctcattatgggaaatatagagtctatgttttagagatatacactgaaacatttttacagatgagactaccgtttctgagatttgcttttaaataatccagttttgttgagttgaggaaaatgagtaggcagtatgatgataacttttgaaattgggaaatggaatattgggtttattacactgttctctctactttgtatatgtttgaaaaattttcttttcttttcttgttttctgagacagagtttcactcttgttgcccaggctggagtgcaatggcgctttctcagctcactgcaacctccacctcccgggttcaggtgattttcaggctcctgggtagctgggattacaggcatgtgccaccacacccggctaattttgtgtttttagtagagacggggtttcaccatgttgatcaggctggttttgaactcctgacctcaggtgatctgcacgccttggcctcccaaagtgctgggattacaggtgtgagccaccacacctggtctgaacatgttcataataaaacatttttttaaattgtaacgattcagtgaggtaacttatatgaaaggtgtcctgcatctgatatgtgttatgtattgattcagtaaatgcttgaaattaagtaatgatttaagtaaaggagaaataaagactccaaaagcaaatgaattaaaagcagggatagttttgtggggaggaaaaaaaaggacacatttgtaaggagatttagattatacataaaaaatcaggattctggacacctgtaatcccagtgagaggctgaggcaggaggatggcttgagcctaggaatttgaggcttcagtgagctatgaatgtgccaccacattccagcctggatgacagagtgagaccctgtctcttaaaaacaaagcaatgttctttataaatttgtttttagcccagaaatacagtgtagagtttcttttttttctttttttttttttctgagacagagtctcactgtgtctcccaggctggagtgcaggttgcgcatgtcagctcactgcaacctctgtctcccgggttcatgtgattctcatgcctcagcctcccgagtagctgggattataggcatgtaccaccacgcctagttaatttttgtattgttgttattattatttttttattatactttaagttctagggtacatgggcacaacgtgcaggtttgttacatatgtatacatgagccatgttgatgtgctgcacccattaacttgtcatttacattaagtatatctcctaatgctatccctccctcctccccccaccccacaacaggccccagtgtgtgatgttccccttcctgtgtccaagtgttctcattgttcaattcccacctatgagtgagaacatgtggtgtttgtttttttgttcttgcgatagtttgctgagaatgatggtttccagcttcatccatgtccctgcaaaggatatgaactcatcattttttatggctgcatagtattccatggtgtatatgtgccacattttcttaatccagtctatcattgatggacatttgggttggttccaagtctttgctattgtgaatagtgccgcaataaacatacgtgtgcatgtgcctttacagcagcgtgatttataatcctttgggtatatacccagtaatgggattgctgggtcaaatggtatttctagttctagatccttgaggaattgccacactgtcttccacaatggttgaactagtttacagtcccaccaacagtgtaaaagtgttcctatttctccacatcctctccagctcctgttgtttcctgactttttaatgatcgtcattctaactggtgtgagatggtatctcactgtggttttgatttgcatttctctgatggccagtgatgatgagcattttctcatgtgtcttttggctgcataaatgtcttcttttgagaagtgtctgttcacatccttcacccactttttgatggggttgtttgtttttttcttgtgagtttggctgagttctttgtagattctggatattagccctttgtcagatgagtagattgaaaaaattttctcccattctgtaggttgcctgttcactctgatggttgtttcttttgctgtgcagaggctctttagtttgattagatcccatttgtcaattttggcttttgttgccattgcttttggtgttttagacatgaggtccttgcccatgcctgtgtcctgaatggtattgcctaggttttcttctagggtttttatggttttaggtctaacatgtaagtctttaatccatcttgaattaatttttgtataaggtgtaaggaagggatccagtttcaactttctacatatggctagccagttttcccagtaccatttgttaaatagggaatccttccccatttcttgtttttgtcaggtttgtgaaagatcagatggttgtagatgtgtggtattatttctgaggcctctgttctgttccattggtctatgtctctgttttggtaccagtaccgtgctgttttggttactgtagctttgtagtatagtttgaagtcaggtaacgtgacgcctctggctttgttcttttggcttaggattgacttggcaatgcaggctcttttttggttccatatgaactttaaagtagttttttccaattctgtgaagaaagtcattggtagcttgatggggatggaattgaatctgtaaattaccttgggaagtatggccattttcatgatattgattcttcctatccatgagcatggaatgttcttccatttgtttgtatcctcttttatttcattgagcagtgatttgcagttctccttgaagaggtccttcacatcccttgtaagttagattcctaggtattttattttctttgaagcaattgtgaatgggagttcactcatgatttggctctctgtttgtctgttattggtgtataagaatgcttgtgatttttgcacattgattttgtatcctgagactttgctgaagttgcttatcagctgaaggagattttgggctgagacgatggggttttctaaatatacaatcatgtcatctgcaaacaggacaatttgacttcctcttttcctaattgaataccctttatttctttctcctgcctgattgccctggccaggacttccaacactatgttaaataggagtggtgagagacggcatccttgtcttgtgccagttttcaaagggaatgcttccagtttttgcccatttagtatgatattggctgtgggtttgtcatagatagctcttattattttgagatacgtcccatctttacctaatttattgagagtttttagaatgaagtgctgttgaagtttatcaaaggccttttctgcatctattgagataataatgtggtttttgtctttggttctgtttatatgctggattacttttattgatttgcgtatgttgaaccagccttgcaccccagggatgaagcccactttatcatggtggataagcattttgatgtgctgctgaatttggtttgccagtattttattgaggatttttgcatcgatgttcatcagggatattggtctaaaatgctctttttttgttgtgtctctgccaggctttggtatcaggatgatggctggcctcataaaatgagttagggaggattccctctttttctattgattggaatagtttcagaaagaatggtagcagctcctccttgtacctctggtagaattcggctgtgaatctgtctggtcctggactttttttggttggtaggctattaattattgcctcaatttcagatcctgttattggtctattcagggattcaacttcttcctggtttagtcttgggagggtgtatgtgtcgacgaatttatccatttcttctagattttctagtttatttgcgtagaggtgtttatagtattctctgatggtagtttttatttctgtgggatcggtggagatatcccctttctcattttttattgcgtctatttaattcttctctcttttcttctttattagtcttgctagcagtctatcaattttgttgatctttcaaaaaaccagctcctggattcattaatttttggaagggttttttgtgtctccatctccttcagttctgctctgatcttagttatttcttgccttctgctagcttttcaatgtgtttgctcttgcttctctagttcttttaattgtgatgttagggtgtcaattttagatgtttcctgcttctcttgtgggcatttagtgctatagatttctctctacacactgctttaaatgtgtcccagagattctggtatgttgtgtctttgttctcattggtttcaaagaacgtctttatttccgacttcatttcgttatgtacccagtagtcattcaggagcaggttgttcagtttccatgtagttgagtggttttgagtgagtttcttaatcctgagttctagtttgattgcactgtggtctgagagacagtttgttatagtttctgttcttttacatttgctgaagagggctttacttccaactatgtggtcaattttggaataagtgccatgtggtgctgagaagaatgtatattctgttgatttggggtagagagttctgtagatgtctgttaggtctgcttggtgcagagctgagttcaattcctggatatccttgttaactttctgtctcgttgatctgtctaatgttgacagtggggtgttaaagtctcccattattattgtgtgggagtctaagtctctttgtaggtcactcaggacttgctttatgaatcttggtgctcctgtattgggtgcatatgtatttagaatagttagctcttcttgttgaattgatccctttaccattatgtaatggccttctttgtcttttttgatctttgttggtttaaagtctgttttatcagagactaagattgcaacccctgcctttttttttttttttccatttgcttggtagatcttcctccatccctttattttgagcctatgtgtgtctctgcacgtgagatgggtttgctgaatacagcacactgatgggtcttgactctttatccaatttgccagtctgtgtcttttaattggagcatttagcccatttacatttaaggttaatattgttatgtgtgaatttgatcctgtctttatgatgttagctggttattttgctcgttgcttcatacagtttctccctagcatcgatggtctttacaatttggcatgtttttgcagtggttggtaccagttgttcctttccatgtttagtgcttccttcaggagctcttttagggcaggcctggtgttgacaaaatctctcagcatttgcttgtctgtaaagtattttatttctccttcacttatgaagcttagtttggctggatatgaaattctgggttgaaaattcttttctttaagaatgttgaatattggcccccactctcttctggccagagatctgtcgggagatcagtttctgtcgagagatctgctgttagtctgatgggtttccctttgtgggtaacccgacctttctctctggctgcccttaacatttttttccttcatttcaactttggtgaatctgacagttatgtgtcttggacttgctcttctcgaggagtatctttgtggcgttctttgtatttcctgaatttgaatgttggcctgccttgctaggttggggaagttctcctggatattatcctgcagagtgttttccaacttggtttcattctccccatcactttcaggtacaccagtcagacatagatttggtcttttcacatagtcccgtatttcttggaggctttgttcatttcttttttactcttttttctctaaacttctcttctcgcttcatttcattcatttgatcttccatcactgataccctttcttccagttgatcgaatcggctactgaagcttgtgcatttgtcacatagttcttgtgccatggttttcagctccatcaggtcatttaaggacttctctacgctggttattttagttagcctttcgtccaatctttttttcaaggtttttagcttctttgctttgggttcgaacttcctcctttagctcggagaagtttgatcgtctgaagccttcttctctcaactcgtgaaagtcattgtccgtccagctttgttccgttgccggtgaggagctgcgttcctttggagcaggagaggtgctctgatttttagaattttcagcttttctgctctgttttttcccccatctttgtggttttatctacctttggtctttgatgatggtgacgtacagatggggttttggtgtggatgtcctttctgtttgttagttttccttctaacagtcaggaccctcagctgcaggtctgttggagtttgatggaggtccacaccagaccctgtttgcctgggtatcagcagcggaggctgcagaacagcaaatattgctgaacagcaaatgttgctgcctgatctttcctctggaagcttcatttcagaggggtacccggctgtgtgaggtgtcaatctgcccctactggggggcgcctcccagttaggctacttggggctcagggtctcacttgaggcattctgtctgttctcagatctcaaaccctgtgctgggagaaccactactctcttcaaagctgtcagacagggacatttaagtctgcagaggtttctgctgccttttgttcggctatgctctgcccccagaggtggagtctacagaggactcctggagctgtggtgggctccacccagttcgagcttccaggccgctttgtttactactcaagcctcagcaatggtgggcgcccctcccccagcctcactgccaccttgcagttggatctcagactgctttgctagcaatgagcgaggctccgtgggcgtgggaccctccgagcgaggcgcaggatatattctcctggtgtgccgtttgctaagaccgttggaaaagcgcagtattagggtgggagtgacccgattttccaggtgccgtctgttaccccttcccttggctaggaaagggaattccctgaccccttgcgcttcctgggtgaggcgatgcctcgccctgcttcggctcacacttggtgggctgcacccactgtcctgcccccactgtccaatgagccccagtgagatgaccctggtgcctcagttggaaatgcagaaatcacctgtcttctgcatcgctcacgctgggagctgtagactggagctgttcctattcggccatcttggaaccatccaccaatttttgtatttttagtagagacgggtttccccatgctggccagactggtcttgaacttctgacctcaagtgatctgcctgccttggcctcctaaagtgctgggattacaggcacgagccaccatttctggccacaatacagtatacagtttctaagttggaaaaggattctggaggatgaaagtccagaaaacagaaaagcatttgttccttacctaagctgatctctatggttgtgcatgttgggaccaccatggttggaatgaggtctgtatgagagaaccagagaaggtcttcgtatgtgcatttaaggtgtgttgatattgtaaaactccagtgacagaaatctgaaagatcacttgcagaaaagtaactaagtgggctgccaaagatcctatcaaaatggaaagtagctcattagcttaagctggtaaagaagtcatcgttctttgaaccgaggacctatctgttacttctgttttctaaacaagcaagagtggtgggcatccttctgacaggaagtgggaacaccatagagggtgtctcaatacatggtgcatcttacaatctcactggttggtgtgatccattgataagactccacttaaaggctgtgtccacctttcgaggaggccacatggtccctggagaagctaggctgagaccttagtttggaacgatgtatctttgtcagctgctacatccactttcagcagccagcaggactatactgggggagagtctaattgatcaggtagacctagagagggtgagaattcatgcagagttctggagagacacctgtagtgtttctgtttaagtgcacttgaaggccgagggtggaatctttggtataaatggggaagtactctcttcccttggggtggctgggactatgtgacttttgagtaacagtttgtgtggcttggagtcctaagagatgacgtcagggggaccatacctgaagaaaacagcagtcagcagtttgtggaaaggattgtggatctggcaaaagttctggtgatctcaccaggcctggatagtgtggtaccaacccaaatctgccttggcttagcatgctaaggatgtcaggtttaccatttatcacagatggtattgtggtgaggggaagaacgggaaacacagcaatgtggggaccgtgccaggccgagcttcttagttaattatggatcagcagtaagcattctgtaaacctgtctactttgctgattttctgtgactttttcctgacttgactttcttcctagtaaaaattccatgtgaaatatcccagccttctctctgctaacctgtgtaaagagaggattcttctttagcttgggaggtggaagggagcttcattgcagccttcacaccaggtgtgatggtagcaggaaagttggcagctctgtagatcagcgacagccagtggaactgagccagataaggaaagagggctcctaggggattaaaatgagcccaattctgcccttttcatttgtttgagaatttagaatcagttccactgtttttttgaaggtacctagatacagtgtcatggactgggtgtgtatcaatgcatacatcatggctcctgtccattaatatcagagtgagaactgtgtgtaagtgtaaaaaaccccagaagccatgatatgattgataagtagtgtacaggattaattagcagaagatggtgtggtctaattatatctttctatggagagtcattaagttatggagaggtggtaatgtttgaattacgctcgaagatgagtaggtagagaagggtttgttggcaatggaagacctttttaggcaaagaaaacaacacatacaaagtaaagagctgtcagagtgccacaggtgtggagggaatggctaaacacttgggctggctcggggcacaggatcctgggtggtggtagtcaggacaggacttgttataaaacatgtggggctaaggcatacgacagattttttttttttttttttttgagatggagtcttactctgtcacccaggctggaatgcagtggtatgatcttggctcactgcaagctctgcctccccaggttcatgccatcctcctgcctcagcctcccaagtagctgggactacaggcgcctgccaccatgcccgggtaattttttgcatttttagtagagatggggtttcaccgtgttagccaggatggtctcgatctcctgacctcatgatcctcctgccttggcctcccaaagtgctgggattacaggcatgagccaccgtgcctggccaacgacagatgttttcttatggaggatgttcttgtggcaagtgtcaggtaatgtttcatctagatgtagaagttaaagtctaggaagtcagttttgtttctagtcttaacgacatgcgtttttctgtttgcctagtacttttggtgttgcttcctgttagtttaaacagatgtgtattgagtgcctgccatttaaataaaacaccaggaaactctgtggtgagtgggaggtgcaaaagatgtataacaatgaccacatcttaaaggagctcagattttatataagagaccagatggataggcatgcaggaggtaacaaagaatcttaaagttggcataccccaagggcctgcgttgtggttaaagcaaatgctgtaggaggtggaaggagggagcagcccccattgtggagagtggtcagggaaggcccttaggagagagaacttggggagtctcagggacaagttggagaggcgacaaggaacacgtttgagggaaggcctggagatgagttgaggagaaaacaacctctgcaggttgaaggagtattgctcatcctttaagtgtttatttaaatacaactctggctcaaagtatgctgagtatcacagggtgtgggtgacaggattggaaaggtaattgggggtttggaattccactaaacagtaggaagcattcgaggttttttgacgaggagatgggtgtgagatttgattggtgcagcaaggccacaagttaggcagccttagggttgcggcagcaggaggaatggagaatggcaagatagagtcactttgaaagaatatttgattaagatggctgattttttataatggatgagagagagcagagagaaaatacggtctgagtgcagagaggtgccagtaataagaatagagaaagtgagagggagccagtagctcgagggaggaaaagagatgatgcgtgctattgtattagtaacagagaaagtgagagggagccagtagctccagggaggaaaagagatgatgcctactattagtaatagagaaagtgagagggagccagtagctatggagagcaaaagagatgatgtgtactattgtattagtctgttctgttctcatgctgctaataaaggcatacctgagactgggtaatttatcaggcaaagaggtttaattgactcacagttccacatggctagagaggcctcacaatcatggtggaaggcgaatgagaaacaaattctcgtcttatattgtgacaggcaagagagcttgtgcaggggaactcccatttataaaaccattggatcttctgaaacttatggggagaccgcacccatgattcagttatctccacctggccccgccctggacacatggggattattacaattcaaggtgagatttgggcggggacacagccaaaccatgtcaactgtttagaagtatatagtctcaagtaactaaatctctgtagcgaaagatgggaaaattggggaaaagggctgaatgagaaacagaagacatattacagagtaacatagtgaattacacttggatttttataattgttttgtcagcaaaagcatgatatccacttttaaaatgtctgtaggcaaattttgaaaaacagttaattctgtttttggaaactttttatcacatcaattttatatgcattgaaaatttaaaaggcagatacataaacaaaagtaacttgtgatctttgtgtaggaagatagatatttatatatttatttatctctcagtctatgtgtctctctgtatgtatataattttttttccccttaggagaaaaaaatactgttttctatctagttttttcccttacctgctatgttacaaatactttttcctataattcagtgtgcttctatattttttttatttttgtaaattattttgtttcttccatgatgatttagaggaactacttttaaaccagtacaaatatgtcataaataatatctggccatcttctaaccagttgagtaatttcttgcgcagtaagttacctcacatcttttggtaagcaatacgttaaatttgattagtaaagacattatacagttaattaggacacaattaaaatttgctttaaatatttctttgagggagtggacaccacatttttacaatccagaggtctttttttttttttttttttttttttaaacacctatttgccatgaagtcataggaaatagcttccagcaatgcaagctccttcccgtgagttctcacaaagtgtgcttctctgcgtggagcaggctgacaccaggtacaccttctttttctgatcatttttcttcatgcatttcaggaagctatctcagctcttagagtgcttaatgtgcccagcacacacattgattctcttagcaagagtcttgcccttaacttgttgtttacaacagtgccaacagcatgctgggggcattgtagactcctctacttttgccatggtaacacttgtaaagcattcctttttgaacagtactcattcccttaatgtctacaatatcacctttcttatagatttgcatatatgtggccaaaggaacaactctatgttttctaaaaggcctacagaacatatattgagtgcctctcctctttccctttgtgttcatcccattttggtgaattactggaagatggtggttccagctgaaaggaaccctactacaatatttttaatgctgcataatattcctacatatggctgtttctgttttgccctaacttattgaagcactatttaattattgaatatttagttgtttcctgtgctttactatcatgacagcactgtaatgatagtattgtacctacatttttgcatatagctagcattattttcttaggataaattcctagaagtggcaccattgggttagaatgggtttagaacatattaaggcttgtgattccccttggtagactgcctctcatgaaggttatttcaatatttattttgggtgggaacacggaagtgttcatttcctacattatatcaactcagattattatgagtttttgttgcagcagcaacaaaaaagactttatgccaatctgttggttgaaaaattgtatcttatttaaaattttcatttttaaataaatagagcaatatgtttattggccatttatgtttcttaaatatgtttttaactttattgtgacaattttcagacatacagaaaatagaatagtaaacacccacataaccaccatctgatttaaagtaatacttgtcatgttagtttatacatttttttctgatttatgttaataaatataacttagctatcactataattcaccctaaataatttagcatagagcttcaaataataaaaacaatctcctacacagtcataataccattgtgcacctaataaagttaatgataattccctaatataaaatacccaatccagatgcaaatccttaaattatattttgttccatccctataacagggaatcaaagtaaaggatgggcagatgcagtgacctgttgtgtgcaccttctcagtggttggaaaacaatgtaggggatttgtccttcagtcccaggatatgagtgattcatgacaaaatgggtagctggatgattatggttctaccctggctcattcacagcttacaaacctttatcaatttactgtgactgatggtgagcaggccagataggacccctgccctcggggtatgggcatttgtagtgataggttccttctggtttcctttgctgtcatcttcactgagtatggtggtatttcttggtgatgacaataagtattatacaaggttgcatgaggaatcctaaaactcttcccattttgcaggtgtatgtttaatcataataaaactcctgaaaattgcaagggaggaaggcttcagctcactagtgaaaaatattcccaaagaaggattaatgacattttaaagatgtggtggatataaggatatagtccgttccccctatagggaccctctgctcactgctgcagggagagcagagctgcatttatcactaccctcatacatatttttattatggtctgcctctgtccatcaatcctaaggagcaacctttgacatgtttacttaaatcacagagcagactgcccagccgtggtgatgagcttgttttaaaaactggagaaaactatttctgtgcccagattaacatgctcttatatttaagaaatgatttctttattgcatctaaaaaaatgaagctgataatatctctcaaagacttctaaaatgtaaactgttgaaatataaattgaatgcatacatcacaaatgtacagccatgaatactcagaaagtgagtaggcccatgtaacgagcatcccagaggccctctgatgccccttctgatcagcacccaccaagggtaaccagttgtctgaattctggtcactgtatgttaaaactaactgtatgtaagttttgcctgtttatttcactttgcgtgaatggaattatacgctaggttttcttatgtttcttttcttttacccttaggattcgtctgttgtcatatgtagttggagttagtttattcttttttttttttttttttgagatggagttttgcacttgttgcccaggctggagtgcaatggggcggtctcagctcactgcaacttctgcctcccgggttcaagcgattctcctgcctcagcctcttgagtagctgggattacaggcctgtgccaccatgcctgggtaatttttgtatttttagtacagacggggtttcaccatgttggccaggctggtctcaagcgcctgaccttaggtgatccacctgccttggcttcccaaagtgctgggattacagatgtgagatgccgtgcccagctggagttagttttttctcattgctgtgttgtattccattgtgtgaattcaccacaagccattaatgtatcctactattggttgacatttgtgttatttttagttttttggatactacaaataatgccgctgtgggcattttcacatagtttttgtgtatatgcacacttctgttggtgatatacttctgattgaaattggtgggcttgtggttgtatgttcagctatagcagatactgcccagcatttttctaaaatggtttactcctttattctcataccatcagtgtgtgagagtaacatttgctccacatttttgccatcacttattattctttttcgttatcttgggggtatggcatggtattgcattgtaggctttttgttttatgttttgagacagggtctcactttgttgcccaggctggagtatagtgatgcaaacatggctcactgcagcctcaatcttttgtgctcaagcgattctcctgcctcagtctcccaagtagctgggactacaggtgcacgttaccctacctggttaattttttattttttgtagagatggagttccgccatcttgcccaggctggtcttgaactcctgggctcaagcgatctgcccaccttggcttcccaaagtgctgggatgacaggcatgagtcagtgtgccctgccttgcattgttttattttgcatttcagtggaatttttttagggagcagcaacttgataatgattctaaaggtcatttgtggaaaatcaaggagtgatcatggccaaaaaaatttccaagtgtaaaataattcaatgtcttttttaaacctttcattcttttaaaaaaatatttatttgaacatgtttcactatctaccaggtactagtctgggaatttgaggacacagcagtaaaaatgagagaaaaaaaattctgtcctaacagaactttccctctagttatagcatgtaatcttgcaagagtagacgagacaattgaaaaggatggtcctgaaacatctctgactgcagtgatgacaagagctgtcattcgatcccagcattctcccatggagcgtaggtcagcctcagaatacatgttggccctaggaagcctttgccagttcatcagaactggtactgcagatggagccattttgtcacgcctttccctggtgaccatatgataattaagtatgtgataaacatggcatcctaaagacctggaagagagaatgatttgctttgtgttcgtgggacaaccaagagattaagtggaaaaattaaagttgggggattcttaccttagatcacacacaaagataaagtactaatgtactaaaacttaaaggtaaaagataaacctactttaaaaaaactcagataaactctctgatatttagtcttgaaatgaagaaagactggtgatatggcttggctgtgtccccacccaaatttcaccttaaattgtaataatccccacatttaaagggtggagccaggtggagatcattgagtcatgggggtggtttccctcatactgttctcgtagtagtgaataagtctcatgagatctgatggttttataaatgggagttcccctgcacaagctctcttgcctaccgccatgttaagatgtgactttgctcctcattcgccttccaccatgattgtgaggcctcccagccatgtggaactgtgagtccattaaacctctttttatttataaattacccagtcgcaggtatgtctttattagcagtgtaagaacagactaatacagctagtgtctaagcttagaaaagtaatggaagaaatttcaaaggagaaaaaaattctatacactcaattatataaaaatatcaaactggaaaaatatttgcaacaaatataatagaccaaagtgagtaaagggcatgttcacacactgttggtgggagtgtaaattggtacaatcttttccggagagcagtgtgataataagtaccaagagcccagaagttcctctcctttgactcaacaatttctcttctgggagcctagcctttgaaaattgccaggaatttggacaaatgttatattcaaagcttactaccttagctttatttaaaaatacaaaaaactggaaatgtctactggtaggagaaaagttaaattgtatagtaaaataaattattcactatcaggggcaaacttaggtataattactaagtcataagattgctgtaattagcagtgatatttcctttatattttcatcttgttttggctcagttaggaaaatcaaaatataattctttacatgtccaaaaagccgaattaaatgctaactgaagaatagtaggatcactggggcatctttgagcctttcccttgtagtgtgctaaaaaaaatgttaactgtaagacaatactatagaacatttatttaatataaagtacttattgtgtatagggcgttgtgctaagtatatgacatgagtatctcatttaaatatttctagcatcagtcttatgaagctgtaatgttattctattcattttgcaaatgaggaaccagaggtaccaaaagctttagttacttacctgaggccattcaagtggtaagaggcacagtccagacccgtgggatgccaaagcatattactactgagtatctgagcaaagccttagtctgcattggaattaaaatgtagaaataacaagtgacttttaaaaacagttttaatcaggtttaactcagattagagagagaggggagacactgccctggcacttcactgcgcaccctccatcactatggctaccagtgtggttcttatcacccagctaggcttgttcttgtagatgcactatccttgcctcctcagtccccaaaccactgctttgtccccaggatcaagaggccgtctcctgcttcataaggacaccacatgatcccatgtcgtttctcagcatttctgcccttagggctccatgcaacagaaattaatgggctctctcttatccaggctggagtgtatcacattaaaggccagacctaggagaacactgtgaggaagcgttgtttgccacctaattcttactgagcatttctgcatggtaatgccttagaatggagaggacagtaactagagcagcatttactgcctccctccataagattgcccaagatgacacgcacttagtagtttgctgtccagcttagcttgtttgccatcctttcttgtatcattgatgctcttaaagcaggaatggggcaaaggaattaggttgtttgcctccatgacttcgtaattccactttttttttttttttaaaaagctatgtgcctttgctaaaaaacaagacatagtttgtctttccaaatttctataaaccagggtttctgaacctggacactgcccacactttgggctggagaactgtctgttgcagggagtcatcctgtgtattgttggatgtctagcaacatccctggcctctacctgctggagccagtagcacccttcctcacatgttatgacaatcttaattgccatcagatattgccaagtgtccctgtgggaaaacattgctcccagttaagtttataaacataaaacttgacttgttttttctttgaactgttgggagataatggtcattatgaagcgtacatgatcatatctgatattttatcgtttggatattttcaactttttcacatatcactctcatgattatatactgttgaaaatcaaatatataaaatactgtttttcttttttttaaacagtatgcaagcattgagaaaaacggtgaatttttcatgtcccccaatgactttgtcactcgatacttgaacatttttggagaaagccagcctaatccaaagactgtggaacttttaagtggagtggtggatcagaccaaagatgggtatgtttatttttaattattttatttaattctttttgtttgaaacagctttcttttgctctaatgaccaggaagtcattaaatgtataccttcccatctcttaggaccattttctgtacttactactattattattacattatttgagtaataatgtagttccttcaatcattgtttcaagttggggattcaatatgtatatatttgactcttttaaagaatgctttatcgtatcagagaactattattgtcaacaaggtggtgatgtgcagatgtatgagagtatttatatgcctttggtatttttcaaggcagctgtaaaattgtgagtaaatgtacaacatagctctatgaacgttacttttctataatctttctttctgagcaaatcgcctttaaaaattcacaggtgattccaaagccccaagaaaggcactctgcaaaagctagaggaaagaaactgtaccatatagaatcaaataggacacgttgcagaatgcctttggattctttttttccctaccagtcttctctgcttccattttgttggaacttttttccctccttcttttgaggcaggttctcactctgttgctcgggctggagtacagtggcatgatcttggctcagtgcaacttctgtctcccaggtacaagctatcctctcacctcagcctcctgagtagctggtatcaaagccgtgcgccaccatgcccagctaatttttgtatttttttgtagagacgggattttgccgtattgcccaggctggtctcaaactcctgggctcaagccatccgcttgcctctacctcccaaagtgttgggattacaggtgtaagccactttatctggccttctgcttacattttaaaaatgggttttccttaagctgtataagattgcaatggcttttaccattacacgaagaattttggactctgaactcttgctaatcaaacaccaatgtctgctaatagccaaagtataatgtacaagaactaaccttctctaggtaaactgtaaaggaccttgccttcttccttctctaggtaaactgtaggagactttgcttctgtccctgctgcttgccagcacccttttgacagattgcagttacctatcactctgaggtggagttctctagctctgaattttctctatttattggaatcttcatgtgtctgattttcccacatgcagcagtttgagatataacccatgtataatgtctttatgtacttcgaatactctcagttttcactagcactttccttttcttatttatgcacttgtcacccaatttttttattatactttaagttttagggtacatgtgcacaatgtgcgggttagttacgtatgtatacatgtgccatgttggtgtgctgcacccgtcaactcgtcgtttaacattaggtatatctcctaatgctatccctccccactcccccgaccccacaacaagccccagtgtgtgatgttccccttcctgtgtccatgtgttctcattgttcaattcccatctatgagtgagaacatgcagtgtttggtttttttgtccttgtgatagtttgctgagaatgatggtttccagcttcatccatgtccctgcaaaggacatgaattcatcattttttatggctgcatagtattccatggtgtatatgtgccacattttcttaatccagtctatcattgatggacatttgggttgattccaagtctttgctattgtgaatagtgccacaataaacatacgtgtgcatgtgtctttatagcagcatgatttataatcctttgggtatatacccagtaatgggattgctgggtcaaatggtatttctagttcaagatccctgaggaattgccacactgacttccacaatggttgaactagtttacagtctcaccaacagtgtaaaagtgttcctatttctccacatcctctccagcacctgttgtttcctgactttttaatgatcgccattctaactgaactacaaaccactgctcaatgaaataaaagaggatacaaacaaatggaagaacattccatgctcatgggtaggaagaatcaatgtcgtgaaaatggccatacaaggtaatatatagattcaatgccatccccatcaagctaccaatgactttcttcacagaattggaaaaaactactttaaagttcatatggaatcgaaaaagagcccacattgccaagtcaatcctaaaccaaaagaacaaagctggaggcatcatgctacctgacttcaaactatactacaaggctacagtaaccaaaacagcatggtactggtaccaaaacagagatatagaccaatggaacagaacagagcccccagaaataatgctgcatatctacaaccatctgatctttgacaaacctgacaaaaacaagaaatggcgaaaggattccctatttagtaaatggtgctgggaaaactggctagccatatgtagaaagctgaaactggatcccttccttacaccttatacaaaaattaattcaagatggattaaagacttaaatgttagacctaaaaccataaaaaccctagaagaaaacctaggcaataccattcaggacataggcatgtgcaaggacttcatgtctaaaacaccaaaagcaatggcaacaaaagccaaaattgacaaatgggatctaatcaaactaaagagcctctgcacagcaaaagaaactaccatcagagtgaacaggcaacctacagaatgggagaaaattttttcaatctactcatctgacaaagggctaatatccagaatctacaatgaactcaaacaaatctacaagaaaaaaacaaacagcgccatcaacaagtgggcgaaggatatgaacagacacttctcaaaagaagacatttatgtagccaaaagacacatgaaaaaatactcatcatcactggccatcagagaaatgcaaatcataaccataatgagataccatttttttttttttaatggaaagaacctcctgtaaaatgaaggccttgatgactgggagggagcaggcagggaattaggtgatctacttgttgcagtattctggaggattgttggattatgccttctctctctgttccagcggcagaaggtttcctttttaaccttcttacctttgttttctaccctaaccccaagggggattctttgcttggtaggaaaatgtaatgtatgagcagggtggtgcaggaaaaggctgggctatatttcacactagttcatttaagctgaaactatgcaaaacacagacttatgccagcaagcatttttctgtggaaaatctagttgttttttcacctcctagaatggctcatgtttcagaggaagtgtgaccaagttcacatgcaacatggattatctgccttaatatttgagatcagttttttgtaatttggaaaaattttaaactacagaaaaaaaaatctgagtcacaaaaaagttgagagaagaatatggtgagcacacaatctatacccttcacctagattgactttttattaaaatttttaccatctttgtgctgtctttgtacacacacattttctacacacaaacacgtacacacataatttctttttatggttggaacacttaagtgtaaattgtacacatcacaatatttcagcatttatcttctgagactaagaacattctcctacataaccccccatgctattattgcacttaggagaattaatgatcatgtcaagtatcagctaatgtctattccatatttaaatatactagaactttcaagtatatttgcagatctggtgtgttcacctcccttcccaacctcaaatggctctttgcctattcttgtttctttctttttttgttttttgattgaagattatactgcagttagttatgtctcttttactctaaaacagaacagaaatattatattgtttttcgtgatattgacttttgaaatccaggcgagttatttggttgaaggtcctgcattctggacttgtctgattgtttcctcattgtctgattcaattcaggataaattctggggtataggttaggagctattctatactacccattgtatctcctcaggagggatcgtgtccaggtgttggtgatgctgtttgataagttggtgaagctggcatccacctgatatttccattgtaaaggctacattttgttgttatatgagtagataatttgtgggatgatatgtcaagatcacatggatattttctccagcaacctttcacctgatggttttagcatccatgatgattctttgctgaaccggttattctattgatgtttaaaaggtggcgatttttctaatcctataatttctcctgtatatattgtccaacattccttggtaaacagaaactttctttcctcttcccccttttctttgtcttttaatcttttttatcaacataaattactggatttgcatactttaattctgtattatactccattaccagtatgcccttacaggcaaagcgtctcataactggtcagtgggagggctgggcctcaagctggcttctcattctcagctttcaggtgctccttgcttttggcaaattagttgttccaggctcaccttggaccgttcctgcctttgacctggaaatcacttttccccccaacaagaagctctgattccttttatttaggaatggtgcttaggaacaaagctctgggcactggcttattgttaccagggtgttactgcttctctgacttttcagtgaaaagagctgggaaatatataaactttaaaaaattgaaagttcataataacatctccttttaaatttaacattacaggatttttctttgttttttaaattttgtgtctctctctgcgaaaattttggttgctacatacattaatatgtttatgggcctttatttgatagaattggaagacctctgaaggtataagaaagagcaaaaatgtttaaaaaataaatgaataaataggctgagcgtggtggcttacgcctgtaatcccagcactttgggatgccgaggcaggcggatcacctgagatcaggagttcgagaccagcctggccaacatggtgaaaccccatctctactaaaaatacaaaaaaattagccaggcatggtggccgtaacctgtaatcctagctactcgggaggctgaggcaagagaatcgcttgaacccaggagctggaggctgcagtgagccaagatcacaccattgcactccagcttgggtgacagagcaagactctgtctcaaaaataaaataaaataaaataaataaaataaaataataaaataaattggaataccttctgatgtgctttgtgttctattttatcccccttcccattaatagacatgctttttctttttttaaacatataatatccaaaaatacagccttacatttatcagataacaatgtgtaatatatattttacatatatagtataacataatgtgtgtattttctcaaaagcttgtgacagatttgaaaggccgactttgttttcttggttttatcgatgagataactgaagctcttggtatttaagcagtttgtagctaaaaggtgctcaggcctgtcaggttttaaattccttggccttttcagtgttctgagctgcctcttctcataatctcacagtcctcttttgacattttcttttagattttgtattatcttaaatctcagtgttttactgtgacacagaaaatgttagatggccttaatcctttgccctataacaaaccttttagttgcaaaaactgtgaacatctcagttatttttttcctttcatttctagttggcgtgtagtaattgtacatattagatacagagtgttagttcagtacatgtatataatgtgtaataatcaaatgagggttttatatcaatttgttgactaaatttagttaagtgtactaagaagcatttttacgaaagcccgggaatagaagctgtattttgaattctgttactcaccttaacaggctgaataatggccacccaaagagatctattcctaatccctggaatttgtaaatgttaccttatttggaaaaagggtctttgcagatgtcattaaatcaagaattttgagatgaagatattactctggattgtttaggtgggctctaaattccatcacaaatgtcattagaagatagaggcaaagggagagttgacacagaaacagggaagaggaagagacggggtgaccacagaagtagaggttggagcgttgcagccataaaccgaggaatgcctggagtcaccagatgctggaagaggcaagaggggattttccgcaagagcctttggagagtctgtggccgtactgaactcttgatttagggcttctcatccctagaactgtgatagcataaattttgttgtgttattatgggaatttgttttgtttatttatttatacttatattttattttatttttagacaaagggtcttgctctgttgcccaggctgatctcaaattcctaggctcaggctatcctcctgctttagcttctggagtagcagggattacaggcatgtgccactgaaatcaggtatttatatttctcttttttttttttttggagatggagtcttgctctgttgcccaggctggggtgcagtggcacgatctcagatcattgcaacctctgcctcctagttcaagtgattctcctgcctcagcctcctgagtagctgggattacaggggtccgccaccgtgccctactaatttttgtatttttagtagagacagtgttttaccatgttggccaggctggtctcgaacttctgatctcaagcagcccacctgccttggcctcccaaagtgctgggattataggtgtgagccaccgcactcagccccagctatttatattttctaattgacaaaagttgaatatatttatgatatgcaacatgatgttttgaaatatgtatacattgtagaatggctaaagcaagctaattagcatgtccattacctgatatacttatttctttttgtattgagaacacttaaaatctactcttagcaattttcaagtatacaatatatgattattaagtatagtcaatatgttgtacaataggtctcttgagcttactcctctaactaaaattttatattgttggaccaacatcactccagggcctttccccatactgtccccttcccccaagggaggccctggcaaccaccagtctgctctctgtttctatgagtttgacttttttagattccatgtgtaagtgagatcatgtagtatttgtctttctgtgcctggcttatttcacttaacatattgtccttcaggttcatccatattgtcacaagtgagaggattgcctttttaaaggcttaatagtattccattgtgtgcatgtatcacattttcttcatccgttcatctgtaatgggcacttgagttgattgcatatcttggctatggtgaataatgctgcagtgaacctgtaagtgcagatgcctcttcagtgtaccagttttattttcctgttgtaatttgtcacagcagccccaggaaatgaatacactcatgtagctgttttttccgggacgttagaaagcttatagttgtgaagaattttctttgccaagggccagcctgatccggaaaaaaacctttttctagtggtagttttggcttgatccagacattttccagtcagtgacccctgttgtcaactgtctctgtgagggcatggctgcttcctaaagacttcacctatgtgtgggctgggatggaactctgggcagggaatttaaatgcctgtgcacttacggccttaacacctccagcttgctgagagagggatcctgttttctgtagcactcttgtttctagtggaatgatgcatgagtgccttgggtacattggtcagccttccatgttggagcttctctctgaacactctccagttattcagcagctctttgggaacctcatctctgtgcttggcacagttgtgtatattgaggataacatggtgaatggaaaaaaaaacacagtgcttgttgccctcttggagcttctaatttaatggagcagacaggtattcatcagggagcctgaaataaatgtgaattgatgtagtgatactgctatgaaagagagagatggtgtgagtaacaccaaataagggcttcatttggactgggaaattgggaagactttccatgagtgacatctgagttgcaggagttggaggtgggagtacagaggacagagagttgcaggcagagggaacagcagttgtaaaggtcctgtgttttgaaatgcagaggctggcttgcctggagcatggaagtgcagggcatggtggtgggagaggtgggctgtgcccagactgtgtagggacttgtacctcatattaaggattggggttctttatcttgagagtgctggagagccatcaaaggctaatttgaatgaggggattggcacgatttgcctgtgtaacagcatacttgctgttaatactctttgttgtgtttagacctccctgcattccactgttttaatctacttaatgatggatttaatcaatttatgaagttccgtaagggagatgagaggagactttgagtgtctagggctggaagccttttgtttttggtgggccttaatgaatgaagagggcttgtcccagcatttgaggaggaggtgggactctaaggacttctcagggcctagaccttactgtaccacgtaactgaactgtaccttttagatttggttgtgattattattttttcattcaaaatgagaataaagctttgtatatcttctaagtataatttttatacattgttcatacaacttacctgttaagagcaaggtgaaaattcttcctttgatctttgcacacgttctatttgttgttgttactgactgttatctcgttaaagggagtcaaggctaaagaactgtcttcacttgtgactgaccttctcacctgggaagaccacatgggactagaataagctggaggtgttgagtgcctgacttactgagggttacgggtaccaagcactgtctgtgaggtgggcaccgggtggctcagggatccagttggcttgctagggtcacaaaggaatttaccacacatatgtctttcatctccagtgtggaacctctttgcactccatgtgcaaacagaagttggcacttcttttggaaaagggaatgttagatatctcagtttgctagtgatgaagctgacagattcaccataccgccttgtcagccccctgccactttgttgtaccaaaatgacagcaatataatcaaacccttaatttttttttttttttttgagacagagtctcaggctggagcacagtgggatgatctcagctcactgcaacctcccttactgggctcaagcaattctcctgcttcagcctccccagtagctgcgattataggcatgcaccaccacacccggctaatttttgtatttttagtaaagacggggtctccccatgttggtcaggcttgtctggaattcctgacctcaagtgatccacctgcctcagccctcccaaagtgctggaattacagacgtgagccactatgcccggcctcagataattcctttctgttcagagtaaagagattgagtcctgggacagttcctgttttgatgcatgaagaataaaggcatcaaagaagaaaagatgaaaaagaaatctaaagtttagaaatatgtggcctatataaataaagcatgttctctgcctttcctatgtttgctattctttttctgaggaaagaatatatggccttttaaagatttcacaaggtgaaggaggatataataatgttgatgataaaatcatttttatatacctgttttcattttgtgaggctgtcgtgatgaaatccaggccttggccacatgctgggagttaatgaggtttacaattggcaatacttaaagaatattagggtaatatatttaaacatcagcagttcacagcctgaagtgctcatcatctgtcaagttataatacagaatcaataaggggaggtctttcaatttgctaatgaggaaagttttctatactattagggtagacatagatttcagataaacatctaaaattcataaactatagaatttggcgaaagcatctcttcgattaaaaagaaaccttgataataatcaatagcagtcacctgagaagcttagattttcttcttagtcatcagactcccaaattaatctaccaaaacaaaaagcctcattaacagctctcattgaatcagtgttattttttcctttctctcaaggtgtctgattaaccccctttctttttgcattactcactttgtgttaatatttgatgtctgaaatcatggggcaggggaggggttgtgcaatgtggtggctagacactgtctacaagcagtaaattaaaaagaatttttaaaaaggtttgtattatgttgctgatgtattagaaaatctctaggaatgtcaggtgcctgggttttctttttctttttaatttcagaaagggttgattgctgattgggtgctgattttgcttctcattcatatgtacagatagcgctcctcctcctcttacccagctcctcttgcttaccaatccaagccttcttttggagagttttattgaaaaggaaaggtgagaaataaggccataactggagggaaaagggaggttgaaggagggtcttttctaggtgaatgccaatgggaaagactcacttgagagtagataagattgacaatgtaggagagaaaggaaagacattctggagcattgtctaggaggttggcctcttgtaagagcatggagagttcatccagaacacctgacctcaaagtgtagccagtggactcctggaagtccctgagaacttttcagaagtccaggaggtcaaaactatttgcacagtagtaaaagcatgatctacctttttcaccatgttgatatttgagctgaggtttctaaaagcaatagtgcgtaaaacttctggtgtcttaacagcaaataaggttttgtctgaacattgatgtccctccaaaattcatgttgaaacctaacctgcatggtgatagtgtgaagaggtagaactttggggaggtgattaggtcatgagggctctgctctcacagataggattagtacctttgtgaaggaggcttgagggaatctgtttgccccttctgccatgtgaggatggagcaagaaggcaccatctatgaaggagaaagcttttaccagacaccagacctgctgctgccttgatcttggacttcccaactcctagaactgtgagcagtaaattctgttacttataaattaccaagtactaggatattttgttataataacctgaacagaataagacagacaccaatccaaacagagtaagcaatcattattttcttcattacacattcatcatcttcgtcatactgattctgcttcagaatgtccttgaagaagcagtcaaaatcattgattttattaaatcttgctcttgattacacaagattacattttaaaattctgagtaattaaatggcaagtatgcataaagaactctttaatgtagtatggtggttgtctgaggaaaagtacttgagcagttgttttgaattgctagttgagctagtcttctactagaggatacgggataccattcttatttgaaagaatgacttttttgaaagatttaaaattttcatgtttcatcttcctaatacttaaagactttctgatgtcattggtggtgatgttaatgaatgtggcttttaaatatagtttaatgaagtttcctaacatttggatgatctgcataatatagagaaacagtattttcccagttgaccggtgtgcatggtgttacaaaattatgcatgggtaacagatagtttgaaaagtgctcatagacccatgaattttaaggtaacagagaggagaaaagttcactgatacagtttcagattgcacattgccactagtctttaagaaactttacttgttgggatttggtgttgtatcaaagaagaacatccccagttatctaaaaaggccattaaaatacttctttcttttctaactatgaatctgtgtgaggctgaaatcctttcatattcttcaaccaaaacaacatattacagcagattgaatgcagctgttttccattaaagtcagacatttaagagatttgtaaagatataaaactgcttttctcactaaattttctgttttagaaaatatagttctttggctgggtgtgctggctcatgcctgtaatcccagcactttgggaggctgaggcgggaggatcgcttgaggccaggagtttgagaccagcctggctaacatagcgagaccctgtctctacaattaaaaaaaaaaaggtatagttctttttcatacaaatatatttatattaccatgtaatagagttactttttaatgaaataaatattttctaaatttcccaattttaatttctagtatggtaaatatgatagctataatccacataaataaaagctctgtggggacctcaacaatttataactgtgttaagaggtcctgagacctaaaatttttgagaaatgctgagctagaagagaagatagagactagagtagagagagagtgtagatgtagtggtgagatttggggacaggttgtcttttggtttctttgatttttttccaggaaatagatgagatggaggtgcaggttgaggtattggcagtttgtggagagagattcgtatactacatagttatctagaagtgggagggtgaatgtgtgaggaacagcatgatggctgggcaggacccacttgagtgcttacctgaggattagtggtcatgaaatttaaagtgagaccagttagtgtggctgtatgtttttcagataaggccagtcgttcaggcccaggtagtaagggttggatgtagctagggttgaggtcatggccactgaataatccagagtaggtgaggttccagggaggtaggtgcaggggcgtgcaagggagtaattatgatgatagactatagatttagtctgggcaaggagcaaagagaggacattgggtaggacgcaatgagggatggtgagaaggtgacatgcttaatgaattgtgagtttcagcatggttgaaggttgttgatcaattgggatgtgtttatgagggactgaacaggaagactagaatatagtggccataaagtgagatgcatgaaattgagaaaaaggagtttttggtaatggcaagtaaagtctagagtgtgaccatgggagtgagtggctgaggaaggatgaaagaaaggccatcggaggagatgagttaatgtaattggaggccttagtgtttgaaggatcagtatattgaaggataagtatgttgaaaatattgagaactaagatagaagttgagagagtgtcatcgagccaagagctaaaatacggggtgagaggggaatccagggttattagatcacagaaacaagaggtatgctgagtggtatagtcagatgatgggaatatttgaatgggtgggggttaggaaggagaatatgggatctacccaacctgcttataggcctggtgcaacctaggactgcaagaggaaagctcatccctacacgtaagaggggtctacagtggaagcattgtcctcaagggacagccaggtattggttagagcaagaaagtgaagagatattttatggaaggattgaggaggagattttggtcactatacactgaattctagagaacacagttggagggtttctgggagatggtgacagaataggcaaagtccagggcctctcagggattagacgtgagtggtaaagggtaacctgggtgtccgggactgttggtcaaggctgacattcacggaataaagagaagaatgcagttagtcctggtagactccagattgtgcctgctggttgatagggatctttgcagagaggcaaggaagcttggagaggggcaacttttattacttaaagaacttttaaaataaaaatattttgtgagcagtagctctgctgtttttttttttttttttttcctagatggttggaccaaaggatgaaggaaatgaatagttactgagcatatatagggttccatatctggtgctaacaatttccacctgttttcttatttaatcttcatacaagaccttaaaataaatattttcactgcccatattataaagggaggtggagaattagagaggttaaataatttgctcaaagtcatatagctaatgagtggtggaactagcatttcgacccagttctttctggcttgtgctcaatctgctctaccatgaaactttctatgcatagagaagaatatttaaaattgagctttgcacgagaactttgcttatgtctttgcttagaagttctgatggcctttgcaagattctttgcccttgagactagtcatttagccctcatatttggccaacataaggtgaatataaaacctccatgagaggctcttcgtcacccatacccacacttatgaaaaactggccttgcttacctcttactctttttttttaaactgaggagtagtttttggaacacttttccctttttactgttcttatattgaaccttgagttaccattgcgtatcatattctcagaataagaataagtatcgttactgggccaacttaataccaacagttcttccatattcttcccagcatatgatgctgcttagtgaatgcctgaaagagcaaatactgttctttcctctttctttgtttggtgttagtgtagaaagataagctggattaattgtttgatttgcttgatctagactgtaggtgtttaaaacataaatctaaaattttaaaggaaaggaaatcaaatgtaagctctgtttcctagctacttgagaatctgcttctttaccactgtcagaattagaggtacaggatgtggagttgcttaaattaaaacagtcttgtactgagctatgaggaattcatgaagcaaaactgctatagtttgaatgtgtcctgaaagttcatgtgttggaaacttagtctattgcaacggtgttgggaagtggggacctttaagagatgaacatattaatgcttttatcgcaggcatgtggtatgtgggagtgggttctttatctcaggagtgggtttcttatcaaaggatgagttggtcctcttccccgtctctttcccttgcccatgtgatgccttccatcatgggacaacccagcaagaaagccctcaatgtcagtgccttgatcttggacttccaaatcccacaacagtgaggaagtaaatttttaaaatgaattactcagtctcaggtaattctgttctagaagcataaaatggactaagacaaaaatgttaggagatatagtacccaactttcccattgattgtggcataattgtgccatgattgtcagtgagttgcttcctagtaaatacagtgagattcagagattttaatgaaggtttttgagagtaaagtaagacttctcttgcaatctgatgtaaaggttttgagatcttcagtctggaataagcaaaaggtgaaagaagataactgatgaaagaacttaattgtcagaaattttagagtaacttagtctgaaataaatgatatatggtaaggtaaaatggccttctgctacaaatctgagacaaccttgatacttgaaaaatatagattaatttcagatttggtaactcatttaacaaatatatattgacaccaactatgtgccaggcactgttctaaacagtgtgcttttatatagcaaacagataatgtaaacaaaagatatatatagatgatatagaggtaggttgttatatttattaaagtgctatggtcgataaagtggtcagggaagatctctctgaaaagtgacatttgggcaaagacttgaatgaaggagtaagccatgggagaccctagggattgagccttctcaatagagaagaatagaggggataacaggtgcaaagagcctgagaggggagggtgcttggcatgtttgagaagcagcaaagagaccagctagtagagagggttgataggagagtgaaagaagtataaaatgtatcccagggccaggttatgtagatgttgtagaattgtattttgagagtagtagaagtcattggagggttttgagcatgggaatagcatgatctgcattacattttgaaaggttttgcctggctgatttgagagaatgggatgaagtgggtgacagtggaagaaagggaaattaggactgtgctgcagtaatctgtgtaaaaggtgatggcaagactagagttgaatggtaagaagtggttggatttgggattttattgatggattagatatgaaatatggggaatggcgatataagcaaatgagatagggaatgttgggggaagagtaggtttggaagcaaaattaagagttctttaggacattagaatattgacctccctgttaaacatgcaattagagaggcaggctgtgagatgtatgcttagagatgagagtcaatgtaattacttatttggtctgagccaattctcagcataaggagttggtgctgttgtaacttcagtgagttgtgttttgtagggtgggggaattggggtcttttttgtattgattattatgaacttacaggtttttatatgtttgtgttttaattgcaatatctcatctttggccagtaggaacccttttatattatctcttttgtcctttttgatatgatccattgatttttggtagcttccttgtttctggcaaaataggttgttattttatatatttcctgccctgaacctggaatcagttgctctgcttgaatctcccccttttttaattattattatattttaagttctgggatacatgtgcagaacgtgcaggtttattacataggtatacatgtgccatggtggtttgctgcacccatcaacccagcatctacattaggtatttctcctaatgctatccctccccttgctccccaccccccgacaggccccagtgtgtgatgtttccctccttgtgcgcatatgttctcattgttcgactaccacttatgagtgcgaacatgcggtgtttggtttgctgttcctatgttagtttgctgagaatggtggtttccatcttcatccatgtccctgcaaaggacatgaactcattctttcttgtggctgcatagtattctatggtgtatatatgccacattttctttatccagtctgtcattgacgagcatttaggttggttccaagtctgctattgtgaatagtactgccataaacatacgtgtgcatgtgtttttatagcagaatgatttgtaatcctttgggtatatacccagtaatgagattgctaggtcaaatggtatttctagttctagattcttgaggaatcaccacactgacttccacaatggttgaagtgatttacactcccaccagcaatgtaaaagcgttcctatttctccacatcctctccagcatctgttgtttcctgacttttaataatctccattctaactggcgtgagatggtatctcactgtggtgttgatttccatttctctaatgaccagtgatgatgagctttttttcatatgtttgttggatgataaatgtctttttttcagaagtgtctgttcatatctttacccactttttgatggggttgtttttatcttgtaaatatatttaagttccttgtagattctggatgttagtcctttgtcagatggataaattgcaaaatttttctcccattctgtaggttgcctgttcactctgatgatagtttctttcgctgtgcagaagctctttagtttaattagatcccatttgtcaattttggcttttgttgccattgcttttggtattttaatcatgaagtctttgcatatgcctatgtctgaatggtattgcctaggttttcttctagggtttttatggttttatatcttacatttaaatctttaccatcctgagttaatttttgtatacagtgtaaggaagggatccagtttcagttttctgcatatggttagccagttttcccaacaccatttattaaatagagaatcctttccccgtttcttgtttttgtcaggtttgtcaaagatcagatggttgtagatgtgtggtgttatttctgaggcttctattctgtcccattggtctatatatctgttttggtactagtaccatgctgttttggttactgcagccttatagtgtagtttgaagtcaggtagcatgatgcctccagctttgttcttgttgcttaggattgtgttggctatacgggctcttttttgtttccatgtgaaatttaaagtagttttttctaattctgtgaaggaagtcaatggtagtttgatgggaatagcattgaatctataaattactttggtcagtgtggccattttcacgatattgattcttcctatccatgggcatggaatgtttttccatttgtttgtgtcctctcttattttcttgagcagcggtttgtagttctccttgaagaggtccttcacatcccttgtaagttgtattcctaggtattttattctttttgtagcaattgtgaatgggagtttgctcatgatctggctctctgtcttttattggtgtataggcatgtttgtgatttttgcacaagaattttgtatcctgagacattgctgaagttgcttatcagcttaaggaggttttgggctgagacgatggggttttctaaatatgcaatcatgtcatgtgcaaacagagatcatttgacttcctctcttccatttaaataccctttatttctttctcttgcctgattgccctggccagaacttccaatactattttgaataggagtggtgagagagggcatccttgtcttgtgctggttttcaaagggaatgcttccagtttttgcccatttagtatgatattggctgtccgtttgtcgtaaatagctcttattctttttgagatacgttccatgaatacctggtttattgagtgtttttaccatgaagggatgttgaattttatcaaaggccttttctgcatctattgagctaatcatgtggtttttgtcattggttctgtttatgtgatgaattacgtttattgattatcacgtatgttgaaccagccttgcatcccagggatgaagccgacttgattatagtagataagctttttaatgtgcagctggatttggtttgccagtattttattgaggattttcatataaatgttcatcagggatattggcctgcaattttctttttttgttgtgtctctgccagattttggtattaggatgatgctagcctcataaaatgagttagggaggagtccctctttttctattgtttggaatagtttcagaaggaatggtaccagctcctctttgtacctctggtagaatttggctgtgaatccatctggtcctggactttttttggttagtaggctattaattactgcctcaatttcagaacttgttattgatctattcagggattcaacttcttcctaatttagtcttgggaggatgtatgtgtccaggaatttatccatttcttctagattttctagtttatttgtgtggaagtgtttataatattctctgatggtagtttgtatttctgtgggatcagtggtgatctcccctttttcattttttattgcatctatttgattcttctctcttttcttctttattagtctggctagtggtctatctatttggttaatcttttcaaaaaaccagctcctggattcattgattttttttgaagggtattttgtgtctgtgtctccttcagttctgctctgatcttagttatttcttgtcttctgctagctttcgaatgtgtttgctcttgcttctctagttcttttaattgtgatggagtgtcaattttagatctttcccgccttttcctatgggcatttagtgctataaatttccctctaaacactgctttagctgtgccccagagattctggtacgttgtgtctttgttctcatttgtttcaaagaacttatttatttctgccttaattttgttatttacccagtagtcattcaggagcaggttgttcagtttccatgtagttgtgtggttttgagtgaatttcttgatcctgagttctactttgattgcactgtggtctgagagactgttttgatttccattcttttacatttgctgaggagtgttttacttccaattatgtggtcgattttagaataagtgctatgtggtgctgagaagaaggtatattcttttgatttggggtggagagttctatagctgtctattagttctgcttggtacagagctgacttcaagttctgaatatccttgttaattttctgtctctttgatctgtctaatatggacagtggggtgttaaagtctcccactattattgtgtgggagtctgagtctctttgtaggtctctaagaacttgctttatgaatctgggtactcctgtatgggctccatatgtatttaggatagctagctcttcttgtcggattgatccctttatcattatataatgcccttctttgtctttttggatctctgttggtttaaagtctgttttatcagagactaggattgcaccccctgccttttttttgctttccatttgcttggcaaatattcctccatccctttattttgagcctgtgtgtctttgcatgtgagatgggtcacctgaatatagcacaccgacgggtcttgactctttatcccatttgccagtctgtgcctttgaattggggcatttagcccgtttaaggttaatattgttatgtgtgaatttgatcctgtcattatgatgcttgccatttattttgcccattagttgatgcagtttcttcatagtgtcgatggtttttacattttggtttgtttttgcagtggctagtaccagtttttcctttctatatttagtgcttccttcaggagttcttgtaaggccggcctggtggtgacgatatccctcagaatttgcttgtctgtaaagtattttatttctccttcacttatgaagcttagtttggctggatatgaaattctgggttgaaaattattttctttaagaatgttgaatattggcccctactctcttctggcttttaaggtttctgcagagagattcactgttagtctgatgggcttccctttgtgggtaatccgacctttctttctggagcccttctttttagtaggcagttgtatttatagaccacaatctggggattaggtatgtttccttcttttgagttgtcactactttgagaccttttgtttttctcttctctttatttattattattattttgagttagggttttgccctgttgtccaggctgaagtgtagtggtacaatcatggctcaatgcagcctcaaccgcctgggctcaagtggtcctcctgcctcagcctccggagttgctgggaccacaagcacacaccaccatggctggctaaatttttaaattttttgtaaagatggggtttccctgtgtttcccaggctggtcttaaacttctgggctcaaatgatcccgccacattggcctcccaaagtgctggaactacaagtgtgagctaccgcacctagctgatgccttttcaattcattagagaaaaaattttccattcatgctgatatttcaaatgtaaagataaattgacacagttaaatccaaagtaattttattgttttgatttttctatctccgctctttcattgaaaatcctggttaccagcaacattcacagtattacatatttgccatgtgtaggatatatccaaaatagtaacacctttattgctgccaacaattagatactgaatgaagtttaagatttctttttagttctgttgtacttagactgtgttccacaaagtatatatagttaaaatactgtattctaaagttattggaaagaattcatttaattctgtgtggttttgccaccaacttaatatatatatagggaggttcattttttcagtttattttcaatttttagggattgtcttttttattttcaacttaatttaatttttgagtatgtaaaacatatgtttcccaaatcaaaactatacaacagaaggaaggtatgctcagggaagtctgtcttaacatgcccgtccttttcaccctgactcttccttcctttttataggtcattcttttttgtattagttttttggtttctcctcccacagggtattttttccccaaatataagtaaatttatatgtgtatttgtgttcatctttccttccccattcgtatccaaaaggcagctctatcaactctatatactatatatacgctcctttgagggagtgtgtatgtgtgtgtatatatgtagtatatgtgcatgtgtactagggtttgctcatgaaacagatccaatagggtatatatacacacacatatgtgggtatatatgtatatttatataaagagagacaaatacacatgtaaatgtacatgtaaataataaatgaagacatttattataaggacttgtctcacatgactgtggaggctgagaattcccagtatcagctgtctgcaagctggagatctgggaaagccaatggtgtaattcagtttgagtctaaagacctgagaaccagggagccaatggtgtacttcccagtctgagagcaggagtagatccatgttccagctctaacactcaggtggagaaagcaagttatccctttctccacctttttggtttattcaggacctcagtggattggatgttgcctaccacattgggagggcaatctgctttacccagactgcctatttacatgcaaatctcatccagaaacacccatacagacacactcagaaataatgtttaatctgactaccacatgttgctatcgaggtaacacataaaattaaccatcacagcatttgtataatgtttgtctccagggaagacagacagacagacagacatgcgcacacacacatacagcacacacacacagttgcttttatctcttagtcgtgtgttttgaagataattctataaatatgtaaagaaatcttcctcattcctttttatggctgcatagtgtaagcatatacatttataattatttttccagtttattccaatatctgttaaagtttacagaccagtgcttttaaggtttacattatttggctcatcaggatcttttcccaaaccattttagggctgttgtcaaagagcaatggacaaaccctaatgatgagatgaactttactctcagaataccgtctcacttgctcctatgttctgcattccctgcaccaaacacttcctatgctgtctgcttccctgtccactcatacaggaaagggcttcgatgttatagagtcactcttattgctcctgctaactgctgtcctgataacaatgggtcttttgcatgggaaaagcattatagagtgaaaggatcactgatagcagtcaaaaaaacacattttactatgtcttttaaaatctgtgggatcttagacaagtgacctatcccatgtgagcctgttttctcatctgattaaatggggttgttacttgctcggtgaatgcttgtgttgtcacccagtgaaataaactccagggaagtttagttagctttcccttctcaatttacctgcagatactgtttcaacattcctctctcctctcattccttccctctcttattcctttcctcacctcctacttttcttccccaattcctggcatctttcctggtggcaaacagaccttccatgtgaagaaaaactcctcataattgcactttcctcttcagattctgccccatttctcttctttctgcaacactcatcaaaagcactgtctgttctggcccttacaattaattcctctgcccattgattcttttttgagatggagccttgctctgttagccaggctggagtgcagtggcatgatctcagctcactgcaacctccgcctcccgggttcaagcgattcttctgcctcagcctcctgggtagctggaataacaggagcatggcaccatgcccagataatttttgtatttttagtagagacagggtttcaccatgttgtccaggctggtctcaaactcctagcctcaagtgatccacccacctctgcctcccaaagtgctgggattacaggtgtgacccaccgtgcccagcctgcccattcattcttgaatccactctccccaagtttcctctgctgctctactatgctctaatctgcccttgttacgatcttcaaagcagaatccaatgataatattagttctcaggttaacacacttgcctcttacccctttttgcaatactcacttcacgttcattataccatgttcccttgcatccctcagacctcactggttctcacatctctagtttttcctaactactttttgggtgatcttgtcccatctcatggtgctaaatacttcataacttctacttttatgtcttcagccctctcctccctgctgcttctgtgagagtccatttgcgtacctaataggcccctcaaatgtcacatgtcctgacctaggctcctgagccttctctctccaagcattctttcctattgcttgctcagtagattctgtcttgcagttgctcaggccccaaactctagggacatccttgcttccttcttttctttcacacctcccttcaaatcttacatccagtctagttggcctcactatcagtatatgtatcgtcagtactccctctgcccaatttcttggaaaggtgacagtagcagcaactgctgttcaggcttcatgataccagcaaggataatacaaaaaaaggaagatgctggaaagttgaccaagaaagagacccagtaaataagtctggactcaagtccccaaataaaaaaagattcaaaggcaaactctaagacaagctctgtttttggtcttgtttcataaagtcatatagaaaaaaaatataaagacgtttccaactgtagttcataactgctgtattcatctgtgaaggattgatgacttgaggctctctgaccagggtgtccaataagaagtgcttagtaaagactcatcaggttggtttccaacacacagcccacattcagtctatacccaaaatagcaaagatggtgctacaccaactgctagtgaagatgcttcaaatgggcagtaagatagtaaatgtacacacccctgcaggtctgcttcacttttattttctttccaagtacagtttcaagaacagtttattaagtaaagcaaaaaaatagaaaagaaaatagtacgactcaatcagttcactccatatcaatgcaaattcagatgcaatgcaactggtgattggtgtgtggcttccagttggccagttctgtagaatcattcccactgagtgattcaacacccaatgatgtgaccctgcattttacttgatttactttttaaaaattctgctcagcattatggaggatgttactccataaccagacgcaggcatgaccatctctcacctggattattgtaataacttctcaccaaatcttcttgtgcagccagagtgattctgttaaaatctgagttggattatgtcactctctggctcacaatcctttatggctctccattttcactcagagtaaaagccaaagcccttctcgtggccaacaaggccttgtggtactctctccttacgttacctccccagcccctcacttcatctgctgctctttcccttaattactttgttctggtgacattggtcttcttgccgcaccttgaacacaccgtgcttgccgtgcttggtcccacctagaggccttgtacttcctcttccttctgtaaggcacttcccctaagaatctcactcacttcctttagggctttctcatggtggttatcttgtataatacatgtgggtttcattaattttttttttgtctcctcctctttcccacacacttgactgtaagctccacgaaagcagggatttttgtctgtttagttcactgctgagtcagcagatcctagaacgtggctggcacatagtagcactccataagtatttgtctaatttgaatggattgaacacataatgttccatgcacatgtgaggtattatccagaagaggtgggattcttagatttctctctatggttccttctttgaatttttacatgttaaaatctctgctgtcatttttctcccaggaccactgtaatattttatggagcctctttttttttttttgtaacaggtctaaaacttttagcaaatcttttttcttctcctgtcttcacttttctcctccccaagtagactgcttccacagtattttggggttgttctagtttttgtaaactttttctgaggaattctttgtgttgaaaaaaccacctatatataggattagattctcatatttttgagaatcctgccccattcttcagcatccttacaagggactggactcatgtcccaaagtgttggtggattccaaccattcggcatgtcctcgctcatttatgtcttatggtctggtaagttaactgccttctgccgtagagttaagtaaagacagccatgtcgctgctcttttagtgaattttggctgttcacattattcttcaagttatttagaatataactttttagattcactgaggatattgcatctacttgggcaaaaccctgaaagcccctaaggatttagctgaacatgtaattcatattgaaacccaccttctcttgccttatgattttctgattcagtactttcttctagagttttttttctttttttgagacagagtctcactttatcacccaggctggagtgcagtggtgtgatctcagctcactgcaacctccgcctcctgggttcaaacaattctcctgcctcactcagcctcctgattagctgggatcacaggcgtgtgtcaccacacctggctaatttttatatttttggtagagatggggttcaccatgttggctaggttagtctcgaactcctgatctcagatgatccgcccgccttagcctcccaaggtgctgggattacaggcgtgagccaccatgcctggcctagagtttttttttttttttttgctaagttaagaaataaaacagtaaccaatttctgaaggaaaaagcattaaaatattgatgttgcttttctgcaatacttataccaagaaaatgcaagagagtctcaaaagttgtgtagcttaatttcctcttgcaaaaatataaagtactcccaacagtttctaattttgatgatcttttacaattactgttctgtgttgtaatggcctgcgttttaaaaaagcttgaaattgttaggagacctttagacatagaacttggtaagaagtgcagagataggatggcatagaatggggaaacatgccagatcaattgggacagaaaatttttcttaactgcttttcagcatttatataggttcttccatgagcaaaataaaatatgaacctaaatagaatgggctcaaacagtcataataaactcctttggttattttcagaaaatctatattcacaggtggcctgtgttaataggtgaattcattgtattttggtgtggctatttgtataacaaaacatgactaaatatgaaagatgtgtatgtctttttctttaccagatcttgcgccagtttttaagcaagcaaattatgttcatgtagtaaaattttaatctgtattgggaatagaggtgggaatagtagtattctgtttactgtggatttggagtaaaatctagaaatgctacttaatcagcatattgtaagcagaaattactttttgtcttttttacaaaaaatggacatgagagctcactccgttgcccaggctggtctcaaactcctgggctcaagcgaccctcccacgttagccttccgagcagctgagaacagaggcacgtgcaattgtgcccagctttagaaatcactttttattttaattcttatttgtaacatttcataaggtattaggctacttttcccagtcactaccgtttatacaatttagttttaatttcttaaaattttatttgaaattgtagaatgtcttaatcattcagaatgtgaattgtcatggaggtgtcagagatgcaatttaatttctcctgatagcagtatatcttgaaaatattttgcttaaagatttatttatccttgctgtcaatttgtttcttataatttgcctcatagaaacattcattcaaaacagagtgctgaaaccaaaatggaatatacaattaaaaccaaataatttttttcctgctaactacttcccagcccccagactgaactcgtgattgaggttctatttacttttgcaaacagatgaatatttttggagcagtggaggtaggagcatggtacctaagtccaagttgcaccattttgtgtggctgtttctttcttattttgcattaggaaacaggtgcaagaaaaagaaaaaaaattccacttcatcatcgtagtagtatctggaatctcattccccataaccaagaagaactcatttattcttggccaccctctctcttttgttattctaagttgactgtggacagctttgatgctgcccctgaacttctatgagtccccctgcccttgctgccaggattttagaatctacccttctcctatactaggagtggtaagaaaataaattcgggtagtagtgccatttgatgattcattttctttttatatgtgtcctttaaaattaacattgacaatttggagcccctttgtaatgtggatgatagaggaaaagctgtgattgcttataggctgaatttaggttcatctgaaattatgatgtatctcagaaacatcataattccttggtttgggagtggtaataggattaggactgttgagactgtagaaaaagcacattgtttttcttagatgtggatgcttgtttggggtggtgtaggctgatggagagtatttgagacagcggctactctttcttttttttttttttttcccagctgctactctcaatgcagacattgctctagaacaccctgtataaactatatattgccacatctaaaccatatagtacttcattaaattttgaacatttaaaatattttaactatatgagacaactatgtggtgcatgtgttaattagcttgattgtgataatcatttttcaatgtatatgtatataaaaataacacattgtacactttaaatgtatacaatttttgtcaattatatgtcaataaagctgtaaaaaaattttagataatgcacaatggatcccatactttgtatttattcctatataccttgatttttaagcaccttattctttaagttcattttgttgccgaatttgagtgcattctccctagtccttattaaagagggtacaataatctttcatctgagatacaattgatggaattattttataggatcgagtacattttaaagcctaatctttctttgcttacattgaatattatgaccataatattatgaaatgttattctgaaacttggtctgagttctcttacgtcatcagaaatttctgcaaattcaatctgaaatcaacacatgggcactttttttttcttttttatggtcttaaatacagaaaatcataatctattttaagcttagataaatgatggaacacttgtttacatgggtaaaatgactctatctaagtagtatattgaagttcatgttaatgtttgctatttaatgacacctaatgatattcagtgaagggttatgctaaaccggagagaaaatgtgttacccaggcaactgcctctggcagactagagattcgggcatatggctctatagtacacattatttcagcatctttaagcataaagaaccacacatgtaattgactgtgaaaaattactgctcagttactgtattgtatggtcataatagaagtaaatgaatacgtcattgttgttggaacaagtctgttgggaatcacttgtagactctactatttaagaagcaaaaatacaataagaagaaaatagctggtttaattaacatgtaaaaattgggttaatttgaattcagctggcacagcagatattaatgttggcttttttttgtgatattctggctcaagcctgggtatttttatttcttcttgcccacaccatgaataattttatttcttaaaatgataagggctatttcagtcatttaatttttgctttgccagggacttttattacagtcacatcaagagaggttttgtgtgtatccaaaatgtaggaattacagttgaatgaaagaaaatgccaaaatgttcccgagtaattgataatgtttctcaaagaggaatcagtataattttgatttcatgtattttttaaaaattttagtttactgctgatgtatttttatttttttaacagtgacaaactaggaattgatcaacggcagatgcaagaaaatagcatgttcttgtcactttttgtgtgcctatgcttatgtgccttttgttcgttttagaatattgttttaatcatcattaccttgcttcagagattcagaaaaacctattgagaaaggcattgtgttccaattaaaaaatcgtttagctcaatcaatttttggtattttaaaatgttatttgagctgagaacaaacataggtaatatgggcattaactaaaagtatgtatgggaacattctgttccttgggctgtgccttcggtaccctgtaggtacttttgtgcttttcagccctaaatcaagggaatgatcaaactggagactatggttagagaagtgaaggatttggcagtgtgtgcccttgcatgcaggccagtctttctgtccttgggtgcattcaaagtacctggttatccagtggtaatgagaataaaccaacatgctgctttatatagtgtaggccagtatacgctgacaaattcatatgcctgctggcttttcagttactgatttcttatttgtggtttccccactatccttcttcatttgccattttaataacattgagacctttttatccagccttaattagtagaacaaagaaagatttaggaaacctaggtttttaaatctgctttatttgccttaatcagttttccatcatggtttacaattacttttcccttttttcctcaatggtctttctttacctcttttgatttcctcctgctttgaaggcaatacgtaatttaaaatgaggtatttatggtgttttttgtttgtttaaacttagtagacttttcctttaaaaagaagtctttggtagatctcaaaatatccatgatgtaattaaaatgcagactatttgtcatgcacattattaaattctgctctcagtgttggtaattatacaaaataggaacaatgtagtataataagatagcttttcggggtttttaaatgatgtctactagtatttaagaaataaaggatatttatctaaagaattgtggagatggtgaatatgatttgtctctagttttaaaagcttgtaggcttgtagtggttcttttccttgatgtagaatcatctttgtagggattggccgtgatcggagcatttttgtgacttgaaggttaaaagagaggttgagggaggtggcaaggacactggggcagattctcctcatctcattgagtaatggttattttacagggagggaaagaataaatggggtataggaagagtaaagacattttctagtgttacttgaattaactacgtactagcaagtgagaactagaaaagggatgaatcatacctgtcaaatgtgcttgatccatcttataagaaagagaatgttggaggtataagaataccccagtaaatccccctggttggcacagtcagccttgggcaacttgactgctgtttggagtcagctgcaaggcgatgggctgccaagtagagctggcagtatggacagatcacttactgagttaagctcacaattacgagagcctatatatatatatatatacttttgccaatatggaggcagtgatatatgcagaggtgatatttataggccaaatttgtgataacgatacagtaaaattgccaataaaaatctttaataggtttttaaagccaggcagtagcctgcttgtttgaacaatattcaatctgccagatttcactggagccaatgaatttaaataggcccttggcaaacactgcagcgagatttgaaccagagtacatagtagagctgaagagccctgctggcctcagaacacatgcactccagggaatgccaaggtcctttctggagccagggtgggcacagaatggctgcctgtaacctaaaatggaagaaaacaggattttagaatgaaaggcatccgagaaaagcaccttttatggaacaagaaaggatatctgttccaacttgtccaacaaggtcattcagccagttaggcaaaggtaagaccctataggactcagcttctgtccaccttattcctgatggtttttagaagattgggtaatcactcattgtctcttttcagatcagattagaaacaatagtcatgaatttgcataattggagtcgtgagtcttcgtttgtgtgcttgctgaccatcaactaacatattaaataaaaatctttacttaggagcatcctcttcatctgcctaactggtagtttccatatcctcagtgacttccaagcctcagagtctgtgcctgtgactgccatagcccctggccactgggcctcctcttgatggggaggggctgagcagctcctgggctttaaaaactgcttgctgtgacttccaggacaggacccccccagaccccacgtaattaagccttaacagctgtttagaaaatgtatcccagatttgactgctccttggttctcttgctacgacccaggtttagcctactgtagccgcttctaactgggctcactgcttcacccggcggcccgtgctccacagtgtcttgagtgttcttcgtaacctttctaactctgaggcgagtcacatcactcccctgcataaaacccttcaacagcagctgatttccctaggaataaaatccaggcatccttttatgcccggcacctccctcatcctcatcccctttcccttcccctgccttctctactctccagctgctcgaggtctccctgccctttggaacttaacaagggtggcctgctttgggcgctggcactgatgtttctcctcacatccctgtcctccaactcttttcctggccgctgcttttcaccattcagatctcaatacctcctcaccagaggcttttcctgaccgctttaggcaaagtagccttatctcccaaccccattactctcctgaagttgattttcaagcctggctatgtagtacaatcacttgagaagtttaaaaaaaaaccaaatgagtgtttaggcccctctacagaccaatgaaatagagtatctggggctgagaagcatgattccaaggcgttgctctattttaccctatgcagtggttgtctaattctggaatttttatgtatgcatgtgctcatcctccacccatctgcaaatgtggttccttgaggacatagatgttgtcaattttgaggtatccttagtgcctggggcatggcttatcatataataggaacagggtacacatttgctttgttatcaaaaagagtcagactctggggccggtgtggttgctcacacctgtaatcccagcactttgggaggctgaggcgggtggatcacctgaggtcaggagtttgaggccagcctggccaacatggtgaaaccctgtctctactaaaaatacaaaaattagccggggatggtggcgcacgcctgtaatccccagcttctcaggaggctgaggcaggagaattgcttgaacccgggaggcagaggttgcagtgagccgagatcacgccattgcactccagcctgggcaacaagagtgagactccgtctcaaaaaaaaaagagtcagactgtaaaatattggaagagatttattctgagccaggtatgagtgaccatggcctgtgacacagccctcaggagatcctgagaacatgtgcccaaggtggtcggggtgcagcttggttttacacattttagggagacatgagatttcaatcaattacatttaagaaatacattgattctgtccagaaaggtgggacaactcgaagtggggcgaaggcttccaggttataggtagagttaaacattttctggttgacaattggttggagtttacctaaagacctgggattattagaaaggaaatgtctgggttcagataaggtattgtagagaccaaagtgttcattgtacagatgaagcccttaggtagcaggcttcagagggaatagattgtgaatatttcttatcagacttaagatataatgagacatgtccaacccccacttcccgtcatggccagaaacagtcttttaggttaaatttgaagagtgccttggctaagaaggaagtccatcaaggggtcttagaattttatttttggtttacagcttggttgcctgaataatgtgtatttgcaaggaatatgggcgggaaagagaagagctataaaagccaaaagctattaaaagatgttaaaaatcatggagaccaaagctttggataaatttggataaactggtgatcacaggagagtccagttccagatttttcttaacacccacatatacttgtgtggtctgatggttagaactgtgtttttggagttagattttactttcatctctgccattgaccctggacaattgcttggcttctgctgtaacacacagaagaggtataaggagaagttatttttgtgaagtactcttgtggttaggaaccttcagtaaaagtggtaattggattttgatggtacattgtctacaaccaaacttcctgaagtatgaacagaacaattcctatgtgctgttgcttaaactttcgtagccacagagttggcctggagataggagccaggcaggagatgaaagggatcacatggggtctaagcctctgctgagtgagaataagcgaggacagagaggaggagaagaactggaggttgtccgttagtgtgattctttcagatcctttgtttcttttttcaatttgtcttcctctccccaaatctcttatatagtcctcctgccactatctaagttgaggactttgctattttgtttcatatgaatttttatttttttcttactgtaagaacagtgcagtatgtatattattgaaaggattagaaaatatggacaagcagaaaaaaatcttaaatttctaacaatttaaccacctagagatgatatccactgccaacactttggtgtgccttcttcagactttgtgtgtatgcaaaatattattgtccatttttaagaaacaaataattttctacacatcattgtgtaaatgactttttacttactaccatggatttgtttataacactttttagtggttggatagtatcctgcatatcaatgttctgtattcagtccatcacatattgttgtatattgaggttgtttgtacttttttcaccattaccagcagtgctgggtaaatatccttgtagattaaagtttgcacgcatttatgaattattttttaggataaactcctagaagtgcaattgtggtggctgaggagtaaagaggtgtttttttgtttttgtttttttctaactgcttcttgtggggcagggctaacccataggctacccagagtggccataaagacatctttgagactcttgctgtgttgtcaaattgttctccggagatgctgcactcccagcccttggtataaagtgcctttctttctttctttctttctttctttctttctttctttctttctttctttctttctttctttctttcctttctttcttttcttttcttttctttccctcccctcccctcccctcccctcccctctcctctcctttcggctttcgtagctcttccctggattctgccatcgcatctcctcaactctggtctcttccccttaagttcatttaacactcctctgtcagattaaatgttctgatgcacaaattgatcacatcactaaaattatcagatcttggtctaccatcacaggacctcataatcaggatgtgagcaactttgtagggtttttttctttcttttctttttttttttttctagtagatggtgtctcactctgtagcccaggctggagtgcagtggtgcagtcatagctcactgcagtcttgaactcctggactcaagtgatccttctgccttggcctcccaaagtgctggaattatagacatgagctgccacacccaaccccggcactgtattttctgttctagttttcctccagcaaatatggatttcttgtgattcttcatctctggtcttccttccttggtacctggcttaccttctgcccctctggaccaccatttctggggagcagagattgcgtccctagaactgccctctgccaaacatgtagaataggcattgaagtcaaactgcagctggtggactctcctcccgcatctcccatctttacttgatcacatttcacttttattgcaagactgagttcatgttcaccaaacacatcttccttctggtgtcatgtgttcgcaatttcagtaaggctttctccatctcctttcactcaacatgacagtaatctttccctcctctgaattcattgagtcatttatttccagttctcttatgttacttaacctactttttccataatatcacaatttttagtctgtattctctattatatttcagatatctccaggctaagtgctatcccttgcaaagctggggggaggagggacctaaagttacgctacagtgaagaagcaccatcatcattttggtatatatcttgtagtacctttccacatatgtgataaatgattaatatttacattgtgtaagcatagcatacagatgcaattcacttttcaactctttcttctttggcccagtattttatagtactacgcagtgctttggctattttattattacttggactataaaggagttacaaagtcgctactgttataaatggcttccagaaggagaacagcagctctaatgctttgtaaaacaaaaatgacttgcttacagaaaatatctagtagcatcagaaccatgaaatagagtagttagaaacctaccctcccctaatctctgagtggtataggcctgtggaaatgtgacttgtacatttgctttcatgttagctgacccatgttctactattagttcctgcagataagtgtggtggcaaatactgttccttagattctagtcatagagttaatcagagctgcatgattcattttaaagggaatctaacattgtcaaagaagttctgggagttgcgggtggaaaaggaactaagtgagttcaccagccaggtctgaacttgattaagcttgaattctttgttgtaacttacgttaatgctcattaaatctgtaaagcaagacggaagcactgtttgtctatatatatatatgtatatacatatatatatataaacatttttaggtatcatgctgtaaagtaatatagtactacataattattctcatggccttctagtcagattaccttgaaaatccaaaatgatcttggtgaacaataatacattatgattttatggttcatctatatacctcctgcatagatgtataatactcatatctaacaggattaccaaattacataccttttggtatcagtaacatgcctgaaataccagagtatttattggctattctcagttatgaaacattaacattgccagacaaggctttgtatatacatacatacatatatatatatatatatatatatatatataaaatatatagtcatatatataatatatattatatatatgtctttatatattataagctttgcatatgtatatggtctcctatatatgctttttttatataagccttttatatatattaagcctttctttattcagaccatgaaaccaaaaacatcccttttctagataacgcatagtgtgattctatttaatgaacctaatgtctgtgaaggggtaattaagcaaatatgattgttttcggcctcaacaaactgccagcaagttcccctggagagcagcactgtgtggctgcgtggctgtgggtgcctgctcagcagggttgggggatgtgaggaggcgtggcgactgggaagcaaagggccagaaacacatttgtcttctgtccggcttcagaagtctatagtgtggcgggcctgtcggtgaattcctcaaggtcttcttttattacagcatgtcttaaaaggaaaaggaaaaggaaacatctctaaatgaaatgcttgtgggcacttttattcacagctttaagtaacctttctttaaaaactgccagatctgtgtttccaatcttggcctctatattagtttcctcaggctgctgtaacaaagtactctaccgcaaactgggaagctttaaaaaaaaaaacaaattagttgtcctaagttctggaggctagacatccaaggtggaggttcagcagggttggtttcttctgagggctgtaagggagaatctgttccgtgcttctttcctgtcttctggtggtgggcgggcaacctttggtgttccttggcttgaagaagcgtcaccctgatctctatgttcatctttacttggttttctccttgtgtgcatgtctgtttttaaatttccctgttttataaaaaagactccagtcatattggattaggtgcctgccctactccactatgatctcatcttaactagttccatttgcagctaccctatttccaaataaagtcacattctgaggttctaggggttgggatttttggggacgggggacacagttctgcccataccagcatctctcttgagtccattgggtctcttttggcttctggctggacactgtactacatgtcccactgttacctcaaacacagtcacagttggttacattctcccacaggtcccttctttccaatttttacctttttttcttttttcttgtttatctttggtggtggtatcatcatcccactcagttatccaagttggaaatgttgggaacatcctggcctgtttccttggccttggcctccaacatccagtcctaaccacattttataatttctgcctctgctgtgtttctctagcctttcttctgcttccattcctagggcccccactcaggtttagaaccctgtgatccctggctgccaggctgtctcccacatctcatctctcctttaaattcatcttccacaccagttctttttctaaaacaaagttttgaatgtgacatttcttaatccagaaactgagtgatttttaactgtctgaaaaaaaagtcaagattctgttgcttggcccttaaggtccaccctaggtggctggcatctcgctcttgccagtcttttgctcctcatgacctgctagatggagaattggtaactcctacatgcttctccaaatacagcacatccatttgttttcatctctgtactttgcttccccagtgtagaatgtcctctctctacccttccctcctctctccattgtcaccaaaccaaagtcggtccatttgcctgcacaaaatggaaagccaaacacaaagcaccagttttttgcagcaagaaagtttattgccaggcaactgagtaaggggagaggagtcacactcaagtttgactttctctaccagccttacagccatagatttaagggagggcttctgagtgtggagtttaggtggtgaacagtgattagtgattggctgaaaggaaagggggtttggaaagtgtcttgggcatgctgttgcccttccatgctgcttcatgggttgcacctttggacagtggtggcattagcttgaactgagggtgagtttttggccctctaacgtcaaaaggttactcaacaggagaagaagtctattctgcccagactccagtcagctatgttggttccaaccagcctcagtctgtcagccaattttgtggcaaacagagagaactgtaacaaatggttttcttctctgctgtcctgcaagacaagcttaataaatttttgttagttaccaaattctttaatcctgtggggcatggtttcaccatcttcccacagcagttggaattctacccaggttaaatggaagccaggagacctggttttcaggccaaaatgtcagaagccagttgttttgcctaacccaggtcattaactttttccagtttccgtttcctcacaagtaaaatgaggaggttgaagtagataatccctaagatcttctcagctttaaaatttgttcttcaaataccatgccgccatgaagcagtccccaactcttccaggcagaataattcaccccttttatgccccttagtgctttactttttcttttacagttaactcttaatttctagtggttatgtgtgctcatgactatctccccttcctccaaacagctggtggtaagctcctggagttcagccaggaatgcttgactcatatttgccccccttcttgcctcctacgcagagtctcggtgagagagaccttagtagaggataaaatgtccttgggaagtactcccctgtaacacatgctcttcctgagtgttcccaggcattgagaagcatgtgttttggatggttaatgatacagagatgctatattgaacacactgcgtttttcctttctttgtagcattattgtaattgggtgacattctgggaaacagctaagttcactttgtaacagtttttataaaaatgtgttctctctataggatgtttagaagtaactaagttttctgtaaaatatatgaaaaccattcctattttcttcctccttccatatcctccggaaacttggagtatctcaatgtatcattaaagtatttggatacttaaaatagcagttgttaaaaaataaaatctaggaaagcttttatggacccatttcctctttggaagtcaaaacgtccttggcctctcatgttcttcctaaagcttagatttgacccacattttgaccttcggaaagttaaagtcactcctttttcctagagaagaatgaccaggcccttttctttcttcaaggccacctctggtcctatatttctaatcttattttacattgttcttttatgcactccactgtccagacaaaatctgtcactcatcagtttccctgtacactccttagctttcttgcattagccttctgcctgaagtgccctctagtctacacccattaccgcatatccaagttgtactcattttttaaggcctagctcaaatgccatttctgccacaaagacttttattaccatactagttcttgtgttatgatttgtccttcctctatacactagtctgtttctagaccagtgctgtctgcctcactagactagaagtcccttggggtcatgtttcatgtatcatttatctgtattccccttgtactagccctaggtcaattcacaggtggtcagtaaataccagtagtgaatcaatatctgtgaaccgttttttgcatggtgtataaggatactaatgcataacaaagttgctctattttgctgttaggcagtcacatcttagtctaaagtatctgcacttttattatagaacccaaaaacatgcctgaaggaagactgaaacatatatgatgctggataaaacagttatatttgaaattataatgtatttagtgtgtaacttcatggtcaatgctgtcatgtcttttagattctgtgcattattatttcagtccactatatgtaaaagtaaatgctaaatgtttataaatgttttcagtttgaattttatgttttggcagtgatatcttattttttccctcagtgtatgtttgtatatgcttctgttttccacaagctactgacttttgctttatgtttgttttatgttgcagattaatatcttttcaagaatttgttgcctttgaatctgtcctgtgtgcccctgatgctttgtttatggtagcctttcagctgtttgacaaagctggcaaaggagaagtaacttttggtaagaagcatgcttctgtgcacgtctgtgtaagtgtggacttgtgtgagcattttcttttttttttttctaggaacaaaataaagtgtatggaaattctttatagaagatagtatatcccttttagtaaagatacttcaatgttttggagctccagttcaaacatcttcctattcgaaaaaaacaagtttctggcttagtagttttgatactctgatttagttttaaggtgagggagatgtggcatgactgttttcatagagtcatagcatgtgagagccagacaggacttctgtttcttccctgcatcatcagtagtgctttccactgatagaacgaagaagtgaataatctgcctacacacagaagttacttatgcaccctatacttcttgtcttcacgttgttcccatggagtagtttgcggccagagctgctgcacaagatggtggttcagaatggtacatgaaggaccttgttctaaacaacccccgctcccccgacctgactgctgtgctggcagtgtctgctctcctgtggccttctttattttgcaaggcacaaacatcatcatgggaattagctacaaagctgcagaaaaccctgatgtttttcaaattcttagaagaaagggaaggcttggaagtggtgggacagtggtaagttattttttaaaaaactggctactaaggacagatttaacggaaagtaccatgtttcccttggactctgtggtgtccagcatatgttgtctctgcatgcaaatctgcagtagcattgctcatgaagaattttggagccctttaggcatgtggattgtgctttcatgagagatggctttaaagattagggagaatgtggcatgactgttttcatagcgtcatagaacgtgagacccagacaggacttctgcctgtcttgtgcttggcatgtgcccattttaagtgtctctattcatagtttctaattcattcagacctttgggacttgtcttatttgatgtattgtggaaaacatacagatatgggaaaaatacagatggtgtaacagtgttgcttccagaatcagataagcttagccccttccagctctgctgctgttgtctctgagccaaattagtgatcctctccagtcctcatttatcttatcaagaagtgaatataataattagataaagtattggtaagatagtataatagatttattgtgccaacccccttcgccattccgtcatactcatttggcatgacagaattaaaggttaaatcatcttgagcaaagacaaaaaattatatacttgcccggtttctagaagatcagatgctttccattaatacttcatgaggattatttaatatttacagatcctcagaagaaatttatttccatcacccagttcctcttagcaccactgcaaccacaacttttcaatggaataccaatttttagaaagtccccatttaaatcttcaagtaatgagtaagcagctagctcatggtgttattgatttactcaatggaagcgagtttggtgacattgttataatagcgtttcctggggatgaacagaggaaagcctgtgagtgtaagcatgttcagcataggtgtgttctgtcttgtcctcctactttccccagcaagtctggatgtgaggaatggaagagagttcgatttgatattagaggactgagaaatgggcttcaggtagttccttgatatagatccatcttcccttcatgcgtgtgaagtggcaagggatattggtgacaccagctttaccactggtcctagaaagacgtaggagacttccaccattgcagggcaaagtgtgtgtgttagtgtgattagaagaaaatgatagtgaagaagcaggatgtaggaaacaagagctgtctttgaattgtagaaggcatagttgcataaggattttgtttctgcttcttactagctgaaggacaagtcatttcaaccctctgagctttattttcctcatctctaaaatcggggtaataactactttacaggactatgtaaggattaaaagattcactgcataaaaggcactgtctgaaaaacaaaggcctttatacaaatagtgatactaaaagaaatagcctaaaagaggaaaagattttctgtttttttttttttttttcatttttctttgggaagcccttttttttaaaatttttttaaattttttttttttaacgtaagttcaggggtacatgtgcaggtttactatataggtaaatttgtgtcacaggggtttgttgtacaaattatttcattactcagatattaaacctagtacccattagttatttttcctgattctctccctcctcccaccttctaccctccaccctctggtaggccgtaatgtctattattcctctctgtgtccttgtgttcttatcacttagctcccacatatacatgagaatgtttggtttttggttttctgttcccacattagtttgctaaggataatggcctccagctccatccaagttcctgtagaggacatgatctcgttgttttttttaatgactgcatagtattccatggtgtatatgtaccacattttctttatccagtctatcattaatgggcatttaggttgatgccatgtctttgctattgtgaatagtgctacggtgaacatatgtgtgcatgtgtttttatgacagaatgtttatatttctttgggtatatacccagtaatgggattgtgggttgaaggataattctgtttttaggtctttgaggaatcaccacactgttttccacagtggttgaactaatttacactcctaccagcatttacactcctaccagcagtgtataaatgttcctttttctctgcaaccttgctagcaccagctattttttgactttttaatagtaaccattctgattagtgtgagatggtatctagttgtagttttgatttgcatttctctaattaccagtgatgttgagcctttttccatatgcttcttggccgcgtatatgtgttcttttgaaaatatctgttcatgttgtttgcctacttttttcttttcttttttttttttgagacagagtctcactctgtcacccaggttggaatgcagtggcacaatctcggctcagtgcaacctccacctcctgggttcaagcagttctcctgcctgagtttctcgagtgcctgggactacaggcgcgcaccaccacgtctggctaattttgtatttttagtagagacgtggttttaccatattggtcaggatggtctcaaactcctgacctcaggtgattcacccgcctcagcctcccaaactgctgggattacaggcatgagacaccacgcctggcctttcccccactttttaatggggttgttttttcctggtaaatttaagttccttatagttagttgctggatattagacctttgtcagatgcatagtttgcaaaaattttctcccattctgtagggtgtctgtttactctcttgatagttgcttttgctgtgcagaatgccctttagttaattaggtcccatttgtcaatttttgtttttattgcaattgcttttggtgtctttgtcatgaaatctttgcccattccactctccagagtggtattgcctaggttgtcttccaagaatatagctttgagttttacacttaagtgttgtttgtttttcagatgaactcttgctctattgcccaggctggagtgcagtggtatgatctcggctcactgcaacctctgcttaccaggctcaagtaattattgtgcctcagcctcccaagtagctgggagtataggcatgcaccaccatgcctggctgattttttgtatttttcagtagagacagggtttcaccatgttggcgaagctggtctcgaactcttgacctcaagtgatccacccaccttggcctcccaaagtgttgggattacaggtgtgaaccgtcatgtctggccacatttaagtctttaatccatttcaagtttatttttgtatatggcgtaaggaaggggtccagtttcagtcttctgcatatggctagccaattaacccagcatcgtttattgaatacagaatcctttccccattgcttgtttttgtcagttttcttgaagatcagatagttgtaggtgtacagccttacttctgtttataagtatcttgagatatcaacaggtatatgacagggtgttggtatgactggtaaattctagttaatttgtgattctgtatgtgaggagaaaaaattaaatgtttccatttgtatttttagcctattgtatgtgacagtgattttttaaagtacactttgttgaatgacagcatacatgcagaagaatatacaaatggtgttaagtgtacatctttctgaacttttacatctggatctgcttaccacgagccagatcagaaagaggatggtaccagcagtttagaggtctcatcccagtcactgttccccaatcccaatggtaacaactgacatttatcactatcaattggttttgcctgtttttaaacttaatttaattggaactatatagaatgtactcttttggtctggcttcctttgttcattttatttgtgagattaatccatgtcgcatgtattttttgtttttcttcactgtattgaattccattatgtgactctatcctaatttatttatccattctattgttgataaacattttggaacattttcatttttggctgctgcaagcaatatgcttttgacattgctttacatattttttggtgtgtatagacatttctaggaatagacttgctcggtcacagaaaatatgtatatttagcttcagtagagcttgctaaaatgttttccaaagtaatggtgtgtctggaattggtgggttcttggtctcactgacttcaaggatgaagctgcggaccctcgtggtgagtgttacagttcttaaagatggtgtgtccagagtttgttccttcttatgtttggatgtgttcggagtttcttccttctggtgggttcgtggtctcgctggcttcaggagtgaagctgcagactttcgctgtgagtgttacagctctttaggtggcgcttctggagttgttcattcctcccgtccagagttgttcatacctcccggtgggttcgtggtgtcgctggcctcaggagtaaagctgcagaccttcatggtgagtgttatagctcataaaggcaatgcggacccaaagagtgagcagcagcaagatttattgtgaagagcaaaagaacaaaagcttccacagcgtggaaggggaccagagcaggttgccactgctggttcgggcagcctgcttttattcccttatctgccccacccacatcctgctgattggtccattttacagagagctgattggtctgttttacagagagctgattggtccattttgacagagtgctgattggtgcatttacaatccctgagctagacacagagtgctgattggtgcatttacaatcctctagctagacataaaagttctccaagtgcccatcagattagctagatacagagtgctgattggagcatatacaatcctcctgctagacataaaagttctccgagtccccacccgactcaggagcccagctggcttcacctagtagatcccgcactggggctgcgggcggagctgcccatcagtcccacgccatgcgcctgcactcctcagcccttgggtggtcggtgggacctgggcgctgcggagcagggggcggcacccgttggggaggctcaggctgcatgggagcccacggggttggggggacttgggcatggcgggctccagctcctgacagccctgccccgccgggagtcagctgaggcccggtgagaattcgagtgcagcgtgggtgggccaggagtgctgggggacccagcacaccctccacagctgctggcataggtgctaagcccctcagtgcccagggctggcggtgctggccatccactccgagtgcagggcccgcggagcccacgcccacccagaactcacgctggcccacgagcactgtgggcagccacggttcctgcccacacggtctatctccacacctccctgcaagcagagggagctggctctggcctcggcccagagaggggctcccacagtgcagtggcaggctgaagggctcctcaagtgtggccagagtgggcgccgaggccgaggaggcgcctagagcgagcgaggactgccagcacattgtcacctctcagtggtaccagttaacactcatgccatcattgcatgatggttttattttagatctttgccagttggtatcagccatttttattttagtgatatctcactgtgtggcttcaatgagcatttatttccctgattcctaatgggttatatgacatttttccatatttattggccatttggctatcttcttcagtcatgtgcgtattttctggatacaagacctctgagggttatatgtttcacagattctttactctgtgacttgcactgtaactcatttgagtcttgaggaacataagtttctaattttaatgtagtacaaattatcagcattttcttttgtggatagctctttttgtgtcctgtttaaaaaatctaggccaggcacagtgattcccacctgtaatcccagcactttgggaggccaaggcgggtggatcacctgaggtcaggagtttgaaaccagcctgtccaacacagtgaaaccctgtctttagtaaaaatacaaaaatgagctgggtgtggtggcagcacctgtaatcccagctactcaggaggctgaggcaggagaatcgcttgaacccaggaggcaaaggttacagtgagccgacatcatgccattgcactccagcctgggtgacaagagcgaaactctggctcaaaacagaaaaaaaaaattctttgttttcctccgggtcaggaagatattctcctatgttatcttccagaagtttgctttcctttcagatttacattttaatctttctagaatttgttatatttttgcatggtactaaaggtaaaggtcaagattcttccctggccctcttccccaaggatatgtcgattgcctggcaccatttattaaaaagatggttcttttctttattgcactgcagtggtactactatcataaatccagtatgggactgtatctgaatgctccattctttttacattattgtatattctccgctaatactatactatcttaattactacagctttataagtcatatctggttaggttttcaactttattctttaagattatctcggctattcttggccctattcactatcaaaacaattttagagtaagtcattaatttccacaaacatcctgctgggatttcacatgctattgccttgaatatgtataatatctatatgtatatgtataaataaatgttttattcctttaagaatttttaaagtttttaaataaaagtttatttaataacaagtgttagtctgtctatatctcactactctggaaattttgagttgatgaacactacaaattttgaaagagaaaggaacacatctatgttatttgttatctaaagatgctggtgcatgtgtacaattttgcagataggactactgccaaggatgaatcagtgctaagtacctcagaaggaaggtagtagaaacgtgagctgaattttatatttgagataacaaataagtattaccttcttaaaagttcataaatatttcaatagatatattttactacatattgaatataatacatttaaagaaacttcagaattatgtgagttggaatgttaccaatactgtcaaattttggttaccatagtggatgggaggggtattcaaagggagtaaatcatggtggaagacaagcagggtaagaagaggaaagaaaaaatgatattaattgcctagtcatttgtaaccaaagcagagaaataataaataagggaataagctgtcattatattaattataaatctgtgctattatgtgaggagacatttacacaaatttgtttttgaaatttaaggtcttttctctttaaacttagtgtttcgaatgtcaacatagttttctttttctttcttttcttttttatggtgttattttttatactagatcacgggtggcaaacattttctataagggtaagatagtaaatgtgttggtgcagtccctgtggaaaatagttatggagattctgacaaaaatttacaaatagaagtaccatatgatccaccaatctcacttctggatatttatccaaaaatcaggatctcaaagaggtatcagaactctcatgttcatcgcagcactgttcgcaacagccaaatgtggaaatgacctaaatgcccatccacagctgaatgggtaaagaaaatttatatacatagaatattattcagccataaagtcctgccatacatgacaacatgaatgaaccttgaggacactacgagtgaaataagccagccacagaagacaaatattacatgattctacttatatgagacacctgaaataggcagattcatagaatcaaagagtggtggctaccaggggctgtgaggagggggaatggggatttactaatcagccggcataaagttttggttaagcaagatgagtaagttctagaaatctcctgcacaacattgtgctgatagttaacgatattattttgtacacttaaaaatctattaagggtagatctcatgttaagtgtttttttccaccaaaaaaaaaagattttattttcattttttgaaagaggtgaggtaattggtcgtgtagatatggggatggaggaggggagactgtcgcaggcagaaaataatagccatttcccgggttctaagcgcggagtctgtttgatacatttgaggaacgttttagggagagagactataaacaaatacaaaaaatatgatgtcagaatatcctgtttgtatgtaaagcaggctaagtgggtagaaagcatggaagctatctgagcagatctagaggagtgaccaaagatgcattaatactgaactggcatgatatgggctttgtattccatgaagggttggagctgtgggggtctggaagtgatggccactttggaagtgccacaaacagtggaggctgggaataacagaggcctggactggagtcatatctcgggaccccacctgggccattccttttttttttctttcttggtttctttcttttttttttttcttttgaaacaaggtctgtcacccaggctggagtgatctgggttcactgcagcctcaacatgcctgactcaagtgatccttccaccttagcgtcctgagtagctgggactacaggtggcgctaccatgtccagctaactttatttttattttcgtaaaggtgagtttaactatgttgcccagactaatctcaaactcctaggctcaagcaatcctcccgccttggcttcccaagatgctaggattacaggcatgagccactgcacactgggctgttcctgagagctaatctgtatgacttggctcccgattggccatgggtgagaggaagggggccaaaggaaaggaagaagaaccaggtggtagctactggtcttgttctgttcccaagatatgtggttttacataatctcatgagagaagtaaggtaaccatcatttttattttaaaatacatgccaacctctgggctaagtatttttggtataatttattatttaattattgtagcctagaaggtctatactattataattctcattttctgtagaggaaatagacatggggaagttgagtaagtggccacagtcatagtgttgcctgtgatggagctgggagagcagcctgatcctggctgactgttcttcactgtgccacactgcctccctctggtgttgatactcatgcttttggagcaagcccactgtaatccagataggtgtcagttagcccattgtggtctcagtctgtatcagacattagaaggatttaatatttttcatgaagtaaagaacaataggcaaatgcattagttacgattttttttcactatggtggaaagtaataaggaagagaacgtacctggcttagagttaccagtgtacatagaaagttgccttggttccagctatctggataacttgttgagatgcacacgatgtgagttttacccagaaaagctttatcttttgatatgaacagaattctgactgaaggggagaatcacaggacgatagggaagggtgaggagatggtctgtgtccaggttgaggatagaggggaaccatagtagaggaggcccttgattgaggggtgcagcttaagagacctgagtacttgggagggtggttgtcagggcaccaacgacagggccgggcccttaagcaagagtaattatttcatatgagaagcaattaggagtcactacaaggtctttggaggacagggataggatcagaatgatgcttggaagagatgatttttgctgagttgactagagtggggcaaagccaggggtaccatgccagtgatcattatttaggcttcacagtatctatgtgaagccagcgtatagtcaccccactttgtgagtggaagagctgaaagtcagggtttggaaggacttacctggtgtgtgagcaggttggtacagacatgttgtgagtgatagtttctcagacactttcctgttactgtatttcttatttaatgttgcggggggtgcaaaacatttccattgtgggttttaagaaagagtacctgtgtggatgtgtgggtgtgtttaatgaaactgtcgatctgaactatttggcatatataccagtgatgtatcttataatgctaatttaagacattacctattcctacttactgatatttcttaagttgttgtaccacattaatagcctagctccacagtagcagagagattgaatactacttttttttttttttttttttttttttcagagatggagtctcgctctgttgccccggctggagtgcagtggcacaatctcggctcactgcaagctctgcttcccgggttcaagcaattctcctgcctcagcctcccgggtagccgggactacaggcgcacatcgccacgcccagctaatttttgtattttagtagagatggggtttcaccgttgttgcccaggctggtctggaactcctgagctgaggcaatccacccgcctcggcctcccaaagtactaggattacaggcgtgagccaccgtgcctagccgagagcttgaatacctgcttttatctgaggaaagtcacaagtagaccccctgaaaattcaaagtatgatctatacaataccagtttcttaggttaaactcccaaatgttttcttgcattatgctattacatgtttctctcttcctttgactttttaaatttatttttcagtacactgaacaagatttcatgaaatatgttttacgtgcaattttaaagttatccttaatacctgaatgtaacccaatttcattacaagtgttggtggtaatgatggtgtgtgcatgtttatgttctgcagtttttaattaaactttaaagtcaagggttctcaactctttgcctggataagtatcagggagtctgtgaatggctatggttgtttgtaatatttcgtctaaatgagctttttttttttcctggggaaaaattgtgtaggttttagcaaatctcacagaggtcagtgagctgccctttaaagataaaagctgctttttatagaggggcagttgaactagtagacatatatcttatttaacacttttccagcattgctgttaaagacattgattgtagaatagtttatgtatgacttcaaaatgtaatgataatcagtttttggatgccttttggttttggatatatgaagaaacaaaatgtatcagacaacctatatataatacaagagacagattggaaaatacatttttctgtaactgaagtaaatgtagagtaactaacgaattattaaaaatacaaaaagagccgggcgcagtggctcacacctgtaatcccagcactttgggaggctgaggcgggcggatcacaaggtcaagagatcgagaccatcctggccaacacggtgaaaccccgtcgctactaaaaatacaaaaattagctgggcatggtggcatgtgcctgtagtcccagctactcaggaggctgaggcaggagaataacttgaacccaggaggtggaggttgcagtgagccgagatcgtgccaccacactccagcctggtgacagagcaatattctgtctcaaaaataaataaacaaaataaaatacagaaagaactgtttggttggctggctagtgagacctctgaaagggaattggttctgattctcatgaagaccaaaatggaagaaactagtctacaccctgtgccacactgggaggcctgggctggctcgccactgcagctctgccagttagcatggagtctgaaagaaactggtccagttttgccctttattggaaactacagtgaccttttgtcctttaatcttcactattgaaatatattgtaagtttagtaactatagagaagcgtttcttgtttatgttaataagtggcatgtggaaaagggctctcctaagagagaatcataaagcctggaacttttaatttattaaggctctgagaagtcctgcggaaaaaataaatctatttaactttgtttaaattgtagtttagcaaacttattatatttgcaccaacttttctcttgtgtctctcccactaaacaaaacccacagaaccggggcgatttctaagctagttaattcttaattctaagcgagtcctcagttagttaattctctgatgtggatgtaattgtttggagggaccctttctgagttcaacttagattgtgtccaggaacacctgctatgatgaaattggtgtgctttgggaaaatgggtaggctagatgacattaggaaatgtgtggaaacacccactcagtcacttcgattcaggttgcagaaaatgatgggagttaaaagtatggaaatgagaagtttcgaagttaagcactcaaatttaatattaaatatataaagctagaggaatgctggtattggattggaagaaggcagactttacccatcatttttaagcttgctggaaaggaaggtcatttgttactgtctttgtaaagacacttcgaaaatgaaatattcgaaaagatagctgagggagaaggtggtgaagaatcagaagaaacgttacttggggaaagttcttcattaatattggttctgattttggtgtttcacaaaaataatgtgtcattttgatgaaagaaaaatattgccctgcagtagatttgattttattttatgagaggtaaagagggggctgagtatattctcttatacatgcttacatcccaaatagagagtaagaatttcgaataagaacagtatgagttttgaaagtaaatagtctctatgttgataagaattgtggcatgcctgggtactgagtatcttttcagagatcctagagactgtccagaaactgttccagttcattgggtcaaaaatccactatttacgaaaagctaaatacggatttgcacgattgaccataatggcttcaattttgaaagatagtagtatcagagagcacttccagttggtgggataatttaagaatcgcccgtgctcaaatggctaaaatattgtactttttgctacttcatcactccattttaaaaatagagagggggagaaaagaaggcagacctgttgagaaggtggaagaatgtcagttggagagcaaatcaaaataaccatgtgaagccactccttagttaactactgcctgaaggttaactgttccttagaagcctgtcagggagtggagagactggactgggggctgctgtccctgtgtgtgcatgtgcacctgtgtgtttgtgtgtgcatgtgtgtgtgtgtatgtgcatgttcatgtgcatgcatgatgaagggtgaagagaacttgtgagtaggaaagaaggtgtagagaacagaaagctaacataaaatcctgaaacttagagtcctaggaaaatttgactattttaaactaactgtactgcttatttaaagataggaaaattataccattcttcttctggtataagagagagataaaaatacagtttttctaaattggaaaatttgctgtaatcttgctgctaatgactgatttcttccaacagttgcaaggcagtttttgctctgataggttgataaaggaaacaaaatcaagaacatattggaaattctcagagaaaattacagtttaggtatatgttgggggtggatacttagacattttaattgaaataaaacagttttatactaatatgggatcactgtgggtgtacatttgtagtacatctgctcttgaagcatttaagtagggttaaatgtatgttaatgcttttgcaagaaaattttcgataatatccgtctaaggaaactagcttaggaaataggtttttgaaaacaatatagatattatatttgcatttagagagtgaattaggactctgtaatgctttaagaattttaaaacattagttgtattctctagtggtaatgaaagttaacaataattaacacacagcagatgattaaagcaagcttacacatctggagagtggccacagtctgctatatgcctctaaacaccattttaattgacctacttttgatattatgaaaggctaataatgatttattctacccagttgaaaatactttttctagcagataattggaaacatctcagttggcccctctgttgatttagttagtgtgtgtgacagatggttaatatcttacgctaaatatctgccagccttgagccattttgttgttgttgttgactcacagtcactatgatgacttaaatagtgtatgaatcttgagaattgatagatctgtcagattatagaggaggagggagtcttatcaatgaggtagaccatgggttctcattgtaatagtgtagaatgttggttaactgtggactccctggctctgtctcaaatctactgattcataatttttgggtgtggggcttgggaatgtgttttaaacaagctctccaagggaatgtagttcctacttcaaatgaacaatggctgagtatagtttatggctttctttcatggatgaggaaacaggcccagaggggaaaaggtgactagtttcataagaatcacaactttgacttctggcactagaaggatagggttctttcctgaatgccacatgaccttaactcaggctagttccatccctaagtacagaactggaagagttttaaattagccctaatttttacatacaccaataccacatatgactttagtataatatttggctcagcttggctgtgtgtgtgcttattttttgaaagatacctatcaccactgtacctacatgttcagaataataataataaaaagtttacaggggattatagagaactcaattttaatgtgaagtacttatgctctacttactatgttttaatggcaaccattttccccctagaagtttcttgagcgactctgaattgtagccagaatacgtctttcctcttcagacccttagctgtgattaatgtaaaaaggcacttgtcaaaagggtttgaaatggcaaccttgatattggagcatatggcagtagagataggtctgcatccacttactccattatgttatttaatgtacgaattcaacaatttgtcttttgctccctgcttaaaagatgatggccgtagaagctggttgttaaccatatcagcagggtggaatattacttcccttagagaaaaaccacaactttctttgaggatttagcatgcattagaaaaagcatgaaactgttcagagataaaatgctgggccttcagcagtcctctctttgcctccaagaggggttacttttatgtttaacacaaacatcccttttgtgtttattgtattaatggaatttttaaaatccatgagaaagagagagagattatggtttagtgtttgaaataatatagcttgatgaatcttttttattttaatgagaaactctttttcatagatatgctgcttcaaaaagtgaatcttttagaaattaaaatgcattaatttagttattctgtatggaaacaaaaacatggaaagttaaaatttgcataagtgaagaccttgatgatttcagattatagtgtggtggaggttaaggaataagagtccatagaatttgtaaaaacaaattcagtctaaccacttaatggcatgtgcaagtaatttgccaattaaatatctctagtgtctgaaagatcttcagagaaaagagtggaggttcttaatctttcttaattttatactttaagaaacataatagaaaattacttagtttttgatcacttttcattcaaaattttagcatatgagctcaagaaaggatggattttaaatatttgaggaaaattattgctttttgagaaattaaaaactatgatacttccaaatcacactgtgctcatttaaaaaatagtatttgtaaatatttggtgcccagataataattttcattataattaagactttatactttggagttttatgattttgatggtcacctactatgtttagaacattgtactagtcatgcttaactccagaaaaactgtctaagatagatattcccattttaaagattgagcgaattgagtcagagtaagtaatttgcccagggttactcattagtaagaggcagatctctgacagttctaggtgttttttgtttttttttttcagagaaagctttgttgagatataatttacccatttaaagtatataattcaatggtttttaatatattcacagatttgtacaattatcaccacattcaattgtagaacattttcatcaccccaacaagaaacctcgtaccacaccttagcaatcaccactcccttccatccagtccctccatcccctggcagttgttaatctactttttgtgtatatggatttgtctattctagacatttcatataaatggaatcataaaatgtgggctttcatgattggtttcttttacttagcataatgtttccaaggctcatccatgatgtagcacatatgttattcctttttattgataaataatatttcactgtgtagatatagataggtcacattttgtttattaatcagttaacaggcataagagctgttcccagtgcttggctattatgaataacgttgctgtgaacattcatgtatgtgagtttgtatgggcatatgttttcatttctcttgagtatatacctgagagtggaattgctgagtcatattataattctatgttgaactttttgaggaactgccagactgttttccaaagtggccacaccattttcttaaatatattcccaccagcagtgtttgagggttgcagttccttcacatcctcaccaacacttcttattatctctttttgattataaccattgtagcagggtgaagtggttatctcatcatggttttgattttcatctccctgatggctaatgatgtttaacatcttttcatgtgcctcttggcaattttatgctgtctctggagcaatgtctgttcagatcctttgcccatttttaaataggattatttgtccttttattgtattgtgagagttctgtgtgtatactagggttccttatcagatatgtgacttgcaaagtttttctcctagtctataggctattttatctttttcttttctttttttctctcttttttttaaacttttttattttaagttcaggggtacatgtgcaggttcattatataggtaaacttgtgtcataggggtttgtcgtacaaattatttcatcactcagatattaagcctagtacccattagttatttttcctgatcctctccctcctcccaccctttaccctctggtaggccccactgtctcttgttctcctctgtgtccgtgtgttctcaccatttagctcccacttaaagtcagagcgtacagtatttggttttctgttcctgcattagtttgctaatgataacggcctccagctccgtcgacgttcctgcaagggacatgatctcattcttttttatggctgcatagtactccatggtgtatatataccacattttttttatccactctatcgttgataggcatttaggttgattccacctctttgctattgtgaatagtgctgcagtgaatgtacacatgcatgtgtctttataatagaatgatgtatatgcctttggatatatacccagtaatgagattactgggttgaatggtatttctgtttttaggtctttgaggaattgccacactgtattccacagtggttaaactaatttacactcccaccaacagtacataagtgttcctttttctctgcaacctcaccagcatctgttattttttgactttttaataaccattctgagtggtgtgagatcgtatctcattgtgttttaacactttctttttttcttttttttttttcttttgagacagtctctctctgtcgcccaggctggaatggaatggcatgatctcggctcactgcaacctccgcctcaggggttcaagcaattcttcctgcctcagcctcctgagtagctgggattacaggcacgtgccaccatgcctggataatttttgtatttttagtagagatggggttttgccatgttgcccaggctggtatcaaactcctgacctcaggtgatccgcccatctcggcctcccaaagtgctgggattacaggcgtgagccaccgtgcctggccattttaatactttcttaatggtatccttggagtataaagttttaaattttgatgaagtataatttatttttttttctgttgcttgtagttttggtgtcaactaaaccatttcctaatccaacatcacaaaaattatgtctatatttttttctaaaattttcttgaaaatatgcctatattttcttctaaaactattcacggttttaagtcttgtagttaggtctttgatccattatgagttaatttttgtatacagggtgagataggagcccaacttcattattttgcatatggatattgtccctgcaccagttttttcttattgtctgttacctttgttggaaatcaattgactataaatgtgagggttaatttttttactctcaatttcattctgttgttctctgtgtctatcttataccagtactacatagtcttgattactctagctttgtagtaagcttgaaatccaaattcgtgccaggcgtggtggatcaagcctataatcccagcactttgggaggccgaggtgggtggatcacgaggtcaggagttcgagaccagcctgaccaacatggtgaaaccctgtctccactaaaaatacaaaaattagctgggtgtatcaaagcgcctgtaatcccaggtactcaggaggctgaggcaggagaattgcttgaacctgggaggcagaggttgcagtgagccaagatcatgccactgtactccagcctgggcaacagagcaagactccatctgttcttctttttcaagattgttttggctcttctgaattgcttgaattttcataatggattgttggatcagtttgccaatttttgcaaacaagccaaccaggattttgatagggattacattgaatctatagatcattttagggagtattgccattttaaaattaactttggagagttttgccatcttaacaatatcaagtcttttaatccgtgaacatgggatgtgtttctatttatttagattttctttagtttctttcaatgctgttttgtagtgtttagagaatcagttttgcacttattttgttaaatttatttctaagtattttattgtttttgaggctactgtaaattgagtttttttaaaattaattaattaattaattaatttttttgcaacggagtctcgccctgtcacccaggctggagtgcagtggcactccactcactgcaagctccgccttccgggttcacgccattctcctgcctcagcctcctgagtagctgggattacaggtgcccaccaccatgcctggctaatttttgtatttttagtagagatggggtttcaccctgttggccaggctggtctcgaactcctgacctgaaatgatccgcctgcctgggcctcccaaatgctgggattacaggcgtgggccactgcgcctgaccgagttgttttttaaatttcatttttggattgcttatttcaaatatatagcaatacagttgatatttgtatattgatttttctgtcttccaaccttgctagacttatttattagttctaataattttttagtgatttcttaggacttttctgtatataagatctgtgacccaacttttaaaggtctcaactcttttcactataaccataccctgtagcctgggaaacttactaacttgggagaaataggttgactttttgaggttatctttaggaagtaaacaactgccactttgtaattgtcttctcatgatataaacaaatgcggcagacttttaagatggaaacttttgtggagaaagcaaggttccacaagtaaaaggaaccttgagcttatttggtgaggtcttactttaaataatatcactattatttggtgatattatgggaactacaggccttccaaacatagcttgtttggcacagactgaaataacaacaattatactttactttaaaaaataagcattctaatttggctttacttttaggaggagtggctgaactaagaaaaatatgactttatatatccaaaatatatactagtgctacatgcacattttaatgctaattagttttgtttctttgcctatatgacctcaacatggggaaaagagtataagccttgtattttagaccagaagagacctaattctaattatttttacatttgagatagatctagcaggtggttcttacctgaaagtcttccacgactgagttacgagttattctgaaccaagtaagcaaccaaaaaagctaaaacatgttgggtttcttctttcctctccaggactgcaagttaggtttggaatggtcagggaatggtacgggtttggtgagagggcaactctaagtttgactcctggagtctttcatagtaaggctcatggaattgcccatgtgggagccagagtatagagtagaactgggcttgaaaatcgctttggattttcatttctgatttttcagctataaaatgagagctgggacttgttcctcttacctctgagagccttacaagacatagaggaatcttaaacaatcaaatgttaagtgagaaagctatttgtgcctcctaaaaggagaaaagaatattaacctgacgtggtattataatgtctcccagagtgagggagaaatgcaaggaacccatagtgattattgagtttatagatgtttctattcatgagcctgcaggaaaacgtagagaccaaacatttcagaaaatgaatgccctaggatgattcattagagcagaatgaaatattcagaaacttatgagtctataaaatatttttggagaaaatgtgtgagttttccagaggaacaagatttaatattttgttttaaaagactttattagttgtgagatgaatagaaatattggtaggtttcctttaatcttttgcatatcatttggcttctccaattagaatggcttggcaatcttatgatatttgagtacataatcctgctaggtaggtcaagagagtaaaaagtaaatttcgtagaaattatgccaagtggtaaacaacttcaggcctttttttccctgcagagtcccatggccaactgttctttccatagcaaacttttcttcaccataaacatagcatcatgccccgggggctttaaaataatgtttgctgctggcaggtgatgccaatgtctgtggctacctggagcaggatctatcatgtctcagtgatcccaggtggctttggtccaaagcactgtaactggacctttgattcacttcaaaagaaatgaacctttcttcatgccattgatcgccattgaaaagctccctcaaaggtccctcttagtaaatccttgacacctttcaggtcccagatcatggtttatctgctccagtaagcttttctctcttacttctctccttaaatctccatttccttaccatgaggccaccctgtggtttagtgctgatacagtgtactgtttgaatctgctgttgaattatttctcaagtattagacttggatgtagcctcataccttttactacccttcctcttcccacaggacctagtacagtgctcccaagctgtgctacttagaaggttgctagctagctagctaagccctgacattcctacaatagccagtatattggaacagccacaaagctaataatgggcctacatcctcagggtcatgtgtttgatacactccccaactccaggaggcaccagtcacatggaccatgaagtgaatgccatccactagagttgtgcagcatgggagccctgaatgacctaggtcacacatgatctgtgtttacacattcctgcattacactgcttggtctggagagtcttctctacctccttccttttaaatttttatccatttcaatgagaagttaaaaattaggagtgaatctaacccttccatactccctgataatgctttcagaatgaggtcctggacccttgcatcaggaaaacctggagtgctggctaaaatgcagttttttcagcccctcaacatgtttaaatcagtttaggaccgggcctggggattttgataaacgatgttgactgatgatttgtatgcagtgcactgaagtggtgagaaatgactgttgaatagtttctcagcaagggaaactgtagtgccccaaagggttaataccgctgtccttaacctgttgcattatctgttgtaaaccttttctggctcatttaaattcagcaactacttagtgagcagttgctctctgcctaccactgtgccagccatagtggtagaatcagatgcgaagaatggggtctttgctgtgaaggggctaataatcaattaggaaataaaagacgtgcaataaatatgcacaaacacattaatatgtgcatacatatgcatactatgtaatgatttatattacatcatatagagatcttttatatacatctagtatagtatactctagaagatttatagagagatcttttttcaaacaaatcattattggtagtacaggcctataggattgtcagattttagatctgagagatatcttagggataatgtatagctctatcctgcagaggagatttcagtacatcagccaggcatttcatagaggcacacacacagtctatggtgtagtccaaaaaactatagcgtttagagtttcggattcaaatgtgagctctagtaagaagtaaatggtagttactttaattatagataaataagattgttgtttatggtgagacacattttacatgcattcactaattttagaaaaacttaaacctactttcatgtatatttataattttagaccatataaatataaaaatggataataagtgccttagctttacataccagctatttagtaaaaaccttctgttactttctatgggaaacagagattgaaggagagatcaagaaggggaaaaatcttatttttgacaattatcctatgattattacgttaaaactttatttcactggaatgcttggcagaaaggaatttttaagttaactgaggataaaccagaaaaccattttttcttgcatattatttctctaaaattttattctagtataaaattttatttacagtgtgaattttttttcttttggtcacatctttatcatttgagcattattttcattagataatttattcatctagattagaaggttatgggagcctttattaaaactttattgggcctgcttcctacagagatacagacacttacacctggaaaggagtcacagattatctcggttaatatgttttgcactgaagaaagtcatgttttaagatattaagggacttacagccattagaacaatacttggcacatggtgagtgcccaagaaattttagctgctgttagtagaatttgaatccaagtcatttgaatttcagtttggtgatttcttctcagaaatcttctacttaattccttttattgacccctggtcagactcactgagaatcttttttgtttgtttgtttttcctttaaatcctaattctggattcacttcattttccttatatcttatctcttttttccctaaaagtaaagaagacagaataaattcagtacttgtactttaaaacttttattgtcctcatcagggccagtctgaggatttctgccatgttttataaaatttatgcccagcataatcctgattttttactgccttctctgtgcaaatacacacctaaccttatgctaatggtggcactactgtttcttcatgacaaggctttaaaaatttctggaaactttaaaaacgtggaataaaaactgtgggtataatgggggtgggagcaggaaatttgaggggaaaccatagacacattatgccaaaggttttggcacttttcagaggactaaataactttcttcttctttttttgttttaaatagaagcaaaagagaaaaaaaggtatcaagcacagtttgctcatagaaatgagcaggtttggtagatatatttaaagatgtgaaagccaggaaaaattattaatatgctaataatttgtatttcctccattctccaaacacatacttttatcaagaggaggaggctaaaaataaaaatagaagctttagaaaagtaaggtttttcatgtttttttcttgtttgtttgttttttctctgtcagtcctcttacagtttttctgtagaggctaaaaagagatcctaagccaggaccagcacattcagtggcccatcttaaatgggattatttgaacaatttgagaactcttgggtcaagccaaaagagtgcagtagaaaatcaaagacttgggctgctgctggcttttctcctcattttctttgtcttcacgtgcagctcgataaagtgttggactttttcaaacacagaaacagccttaggggtgttaaatatgtgtgtcaaattttttcctaatggatttctaaatcttccaaaaacttttaaataacttgttaaaggctatatgtaacgcttgtatcgtgtgtgtgtgtgtgtgtgtgtgtgtgtgtgtatgtgttttcctgccactaagattgaattctgtcctctgtacctagaaaataatcattatttcttgaaacaaaaacaaatgagatgataatagttttagctttctacttgggtttcctacagcctttaggttgtgtgtgtgtgagagacttcttgattttccccccctttattttatttggtgggattcttgaccttgatttcttaactgattccttgagggttcttttatttctgccatagtttgtaatctgtatgtctatttaaaattgaattactttttttaataagaaaaagcgatatccattcaataacagattttatcagaaagaacttcatttactttgttttaatcaacctgtcttttctcttttcagaggatgttaagcaagtttttggacagaccacaattcatcaacatattccatttaactgggattcagaatttgtgcaactacattttggaaaagaaagaaaaagacacctgacatatgcggaatttactcagtttttattggtgggtctagctcttaaaaagttaaaagggtatggccgggcacggtggctcacacctataatcctagcactttgggaggccgaggtgggcggatgacgaggtcaggagatcgagaccatcctggccaacatggtgaaaccccgtctctactaaaaatacaaaaaattagccaggcgtggtggccggcgcctgtggtcccagctacttgggaggctgaggcaggagaatggtgtgaacttgggaggtggagcttgcagtgagctgagatcgcaccactgcagtccggcctgggtgaaagagcgagactccgtctcaaaaaaaaaaaaaaaaaagttaaaagggtaaataagtaaacctggaatcaaattgtgtgtaaaagtcctgattggagtcttgaactgtgatttacttactacatactgtgatttacttactacatacttactacagtttagcctggcaaaactgtcccattgagaagtatttctttattaatatgttgaaatcatagaattaaatgggatttccacagatttatgtagaactcctccatgtttagaaggaatacacattgaggccccgggaaatcaagtgattttctcaaggtcacttagatcaggaggggcaaaattacaacttaaaattttggcttgtgactcgctgtgttactacttaccaatattttgttttcccctggaaatggacagatttgtcttcagcttcagaatcatttcatctgacaccttttatagataagacactagtctcaaacttggctgcatgttggaatcacctggaagctttaaaaactaatgttgcctcagtcccacctctagagattagatttaatgggggcaggggggaagcctgggtatttgagggctatttaaagcttcttgggtggccctcatggagaaccagtgtgctaagggcacttgcgcactttcttatgtgggttaaccgctgtagcagttgtctacatttctggggtgcactttccctaacccagtccctgctgcccttctctcgtgacccccttcccccacccatatgatcatatcattgggccactgatgatgcaaggagaagagtattcacaaaatatgattataacttagttttccttcagcagcattatttaaaaatactttaaatacaacattatcatgtagtcactagaggtcaatatctataggctatatagatgtttatgcatttgctttgtttctaacagttacattttatttatactttattaaatatgtttaaaaagactcatgtaaggggactcatttggtatgtttacattttgggtcttgaggaaaattttcaattctttgttactagaaatgtccttagtgggtatcctggtgcccctggctttttcgtgtgttccagaccttgccagagccctctggggagtggttggaatcctgttctgggtagaggtggagggtgcacgggttgtggtgctcacttggtaaagattttgtggtgtccattcttagcaactagcatttgtgataggttaacttcaataggtacttctctttttgaattttcatggtattattatgattcatataatttgtcctgctgtctagtttgcttttattttccaggcctttggaaacataaacaagatgccctaaacctgcctttgtattttttaaaaacaaagcgttaatgtctgtgaatccctgttttcagttctctgtaaacataaacctacttacgtaactcagatggagaatgtaatgtgagttgccggatttttgctgctgtttccacaggacattgttgtgctgtaggaggcggtattcattttgatgaggaataatgacaataatgttattgagacaaatgcctcaaattgactttatggaacacagcctaattaacttttagttttaatgggatgttagcagtagtaaggatgatcgtgtttcctcctctaagcaagtgtcaattatactgaattgagtagattttcaactgctcacagcagcctctgggccttcctccagatatggggaagccagagtccaggattaaataactcagggactatggttatgtttccaaacaatttgtaaggcattcacttaaatttgacttataatggtaaatggaaacatcccacagtgtcctatgtgggatgattttgcctctgtagccagaatagaagtactgaacttttactagattacaatggttatagtggtgaatgatctcagtcagggccttgcttttgtgtcctagtccagatccggacttataggaattaatggatggaccatgataggctttacctgaatgccagttttaatgtctaccattgggtttcttccttccttccatttcatgttttgtttgcttcatttgaactcttttctgaatgtaggtagagcttcagacctctacttcagatgctttgtttgcttcctttgggctctttctggatacaggtaacttcttaaagatattagtgaatttaatctgctgtgtttcaggctcttgctttgtcaggcaggtatccgcctttctgttcttgggcaggactcagaaataggcaccaactccctggctgatgccaaagctgtgaaggcagatgcttggttgcttgaaatgtgaacaagctgccactgtgcatgctgctacctgtcacatgatgaggaaggggagcagccgtagggacagccaaaaagtgcttgtgatttcagggaacttgtatggcatgtagagacagcactcctctattccactgagggtccctagaagatagctcaggttggttccggccagcacattacctgtgcttattatgtatgtatatacatgtgtgtgattggtggggcagtgcagttctctgcagttcctttttttttttttgtcacttaataaatgttttactatatctaagcaagtgtgagcttcttagaaaccaccatgtggctgtgaggatcttacttgggtcatgtgtttatctgtgtagagtctggacaggtccccacccactaaggtgttggcagtcctgggcattgcttacatggtgagttgctatgtccttttctgtgctttggttgtaaaagtcataaagtggtgaatcaatttgatattatttgagctaaacttgactgatttgtactttgcaagtggtaaatcaattcgatattatttgagctaaacttgactgatttgaactttgcatctagtaacattgaagcaagtggcagggatacaaagcctccttcctgtagtcttcttcctcattggaatggaaagatttcagcagggagtggggtcacatttctcttaccccattatttatactgttacatctgttgctgctattttttaatgcccagttaacttcatctccatataacttcatgaatgatggtatgtgtgaatgtgaatacagttgtatatgtgggtaggtatgtgtattttaaaatattctgtaaacctctccacgtatgtctactcccagctcctagagcaaagcctctaattttatagccgctagttttaaaatagattttaatattctttgtattttagaaaataatttggagaaatttttctattctaatctgatggaactgtaattgataaatagtattaatgggctgggcgtggtggctcacgcctgtaatcccagtactttgggaggccgaggcgggtggatcatgaggtcaggagttcgagaccatcctggccaacatggtgaaaccccatctctaccaaaaatacaaaaaaattagctggacatagtggcgtgcacctgtaatcccagctactcgggaggctgaggcaggagaatcgctgaacccaggaggcagaggttgcagtgagctgagatcaggccactgcattccagcctgagcaacagagcaagaccctgtctcaaaaaaataaataaataaatagtattaacctaaaactcggtattttttgtgtgtcatgatgattactcatgtcgggcaaaccatccaattcagcaaatatttgctgagcatgtcgggtttgtcaataggattttgcaaaggtttgaaaggtgcagagactataatcttgagacactcataatgtaaaaatctaggacttgtatctgggtatatccacctgacagtgcaaaaggagcaactacaagtaagtataaaatgtttgccctatgagtttgttgttttgtagcaaaaacccttaaaggtttgtggcataaaccctaatggcaggtattcacatcctttgccaaatttttttttcctttttcttttctttcttttttttgtttttgagacagggtctcactctgttacccaggctagagtgcagtggtgcattagcgctcgctacaactttgaatgccagggctcaagtgatccacccgccttggcctctcaaagtgctgggattacaggcatgagccaccgtgcccagcctgctttgccaatttttttattgggtgactgtcgtaggcacttgggggcacagaatgaaaggtttctaaaacttttctaccaaattattgtgtagtcagtactgagtcactttcaaaaaagttacaataactaatatctgtataatgtttataatttacaaagtgcttttaaatattatttctgataatagcatcctcccaataacctaaaaggtgattatcattatcacatattgtatgcaaaagaataaacctactctatggtaaaattttgcatttaccagtaattttccagggaaatggcccatagctttcattatgtttccaaagaagtatcccaaaagggtggtaaagagcagctgttctagagcttagcttctgcagtcagatgacaggtgtgtgacaaattcaagaatacgatgccgttcccactctgttgcactttctccagatctaaggctatagacagctattttctgttcctagaagttaccatgcatctgaatggcagtgcccagtcatgcattgctaaacatctagcattcctgacccctacccattaattgccagatgcgatcatcaacaagttcttaggggtgcattgtactgtcatttccaggtttttttgtttgatactgttttataatcttgggtatctattttacatgtaattactttaatttgaaaacagtctacacataggagtttccactggttccaatctcaggatagaaaagtctaggattactacaaaattcaatatttctgttaactagaacaacattgttattagctacctctcatatagcattttctagctaagaaagttcttgtattaatatttgtccttacagtcaccttaggttgttggtgttgtttccctatgaaagctgagtgaacagaagcctaaagaagttttctggatttgttcaagattagacaggtggatttgaagttgaaattaatttttctaaatctctggcagtttttaccccccaaattttagtgtaaaaattatctgagatgcgtatttagaaatgcagagtcccaggcctctccaccgacctcccctcccaagactcaaatttagtagttctgaatagggcctaagaagctgcctttccaataagcatcctaaattgcgatgctctggatggttcaggaaccacattttggcaaactttggtctggactaggcaaccctgaatgtgtaaaggtaaacggctctttatcctaagactaatgggaagtctgtcgaggcaaacctcataagatttgtgcttcagaaggatcactctactattgtgtggtaaatctaatggagaggaacgtgaccaaggagagggagaccggttggttgctttttaagccaagagtcaaacaactgtggtctcagttggatggtaacagtgatgggccagagtaaatggagtcaagagaacttacagggataggccagacaaagcttcatgatttaatgggaaggggacagtcatagatttgcagaactcaaggttgactcttgggttttagccttgggctagtgggaggatggtggtgtttcattgaaatagggagtacaagaagaagaggaggttttaaggaggggctacagagtagtgctttatatgtaagagctgttcacgtgtgttggtgtattggctctgctgcctcttttcaattctttggtgttgagatgatttactgtaggaccctacctacggcccctgtatagttgggttttttgaaggaattttgttctgcactttatgtcgccaggaaatttcttctgtttccaggggtcatccagctattgctctaaaagcatcatccagaaattgcaatgctctgaattgtggagaggcctgattttgaggttgtggattccattccactggctagctaagagacaggatagctgacctgagagggaatgaggctaaaaatcctatctaatggcttctcatcaaatagagtttaagaatgaggtcacctgacccaacagagagctctaatcacaagggcttgagtattttatcatagttttactctggtcctcattttgtcagaagaggatgatgaaacccaaagacatgaattgtagtaaatagagctaggaatagaacctggggatcaaagctgtgtctggcatcccagactggtcattcatattagtaaggatccttgtcctcagatcacgagtcccgtgataacctggttggatgccaaagcatacccatgctagtaatgcaactgaacaattttggttctttttaagaaagcagattgaccattattttggcttcttggtcagcacagtgtagaggtcagcctacttcttttctgtgtaacatgaacattttggttatttagatcctgagccctagagagtagaactctagaagtctgctgctcccgggtgacggtagttgccaatgtccctctacaagccagagattcactgctgctggtcagatgtggtcctggctttttctcaccatcagttacggtttgcgactctatttgtcatagcatcctggtgtaaggcaacaatttcaacacaagaggctataggtgttaaaaacaaaattgctactacccccgcccaaccaccaccaaacaaaacataccttcatccatggcaaccccaaattttctagctttagaattaataagcgatttcatgtgttcataaaaaataatcgcttgtagtagaactggctgaagccgtaattctttacagatgagtggacaattaacaaggtccttgcttaggtttaggtttgagtaatctgagccatttgcctctcccttttgtcccccaacttgtcttgtttgtattagtgaaagtatctagaccatgaatttttttttttttttttgagacagagtctcactctgtcacccaggctggagtgcaatggcgtgctcttggctcactacaacctccacctcccaggttcaagtgattctcctgcctcagcctctggagtaggtgggattacaggctgcccaaccccatgcccagctaattttttgtatttttagtagagatggggtttcaccatgttggtcagactggtcttgaactcctgacctcaagcaatccactcgcctcaccctcccaaagtgctgagattacaggcatgagccaccgtgcccagcccgaccatgaatttttagtggcccaagaacccagttgtattttcattttcactatgtgaatgccttttatgttgattctaagttgtatcaggtggggtctgtgatgtagctttggtattgtttcataaacagcatcatttggtgttctcaaatgaactagtgagtagagcacattagtgttgtttgccttcaactcttccactagatgagattctgttttgtgtccaaatggaagccattgctagtttggtgatgagtaactagagatgtgatcacttggacagtaagatgcaggacacgttccagccacagcacacactttctactctctgggcaaagaaaatcaggattcattgtgctgttgtgtttgtggtgttagcttgctgttttgttgagcagcctgttgtgcagggtttttacagtagcatcctggtaaaaatgaacactctatacagcatctccccagctgttacccactgtgaagtttaacgttaaattagaagagcaaggaaattgagatggaaaagctctgtatttggtttctgccaaggtgttgcagtgcatgctgagccacatgtgacactgcttccaaagacccttttaattaaaggcctcacccagtgaattggggatggaatttcaccctcaactctgacactgactgcatggccaaatggggggtggggggaggtacacatagaacaaaattaagaatggtaactacttatctctctacctattttattgctatgtttcatttttactttgttaaaaaatatgtggatcttcattttaattagaatgtttttcttcaaattagcatagattatgaaaataaagtggatatttatatgcaaaccagtatacaggtactgatatgtgatgtaatatagaaattgtttgggctaaatgtgatatggtattttttaggcaaatcgtctttctacatttttgtttcctgtttcgataaacaattagctgcattttgcccagaattcttctattaccatgtctaaaaaggaattattttgaatcatttccttattaactctttgcttttattaatattttagattttgttaaaatttcaaaacacaaaaatgcaaattaaccagggttcaaaaaatatatatatttattttttggcatttttggctttataatataaatcacctggctctcctgcttgttttgagggactgggttttttgggtttttgttgtcattgttgttgttgttcctgataaattgttctcaggctaaagcacaaacttgcatgtctgaatagagatggagagaatattttatattcaaaatatacctacctgaaaattggagattattaaggaaatgacaggcctggaactattagaagcacgaatgttagacctaaagtagtgtaacccctatatatgtttattctgtacaactagcaattttgaagagtttgattttttttttctacagcagtctgaatgggtgtgttgaagtagttggaaactgctgcaataaaagcctgttgcattaatcatcatgcaccagaatagagggaacagaaaatagttcactggcacatattaaagagaaattgggcctcctttcatgtacttgagtggaactgccttagagatagctgcagaactcctgctcttggaccttctggccttaggtgataggaagggccatttgtcttcagttggtaactgtcttcggcagcagcatttagtaagcacccattgcctggtactgttaagagctctctttagagagacacttcattttctcagctctctggatttgctacaaggtttcaggccctgtgtcttattttctttattcacttatttaggtatcagtttgatttttgttgtctgcctgctctttgtatgcactgtgggatgatctcacccatttctacaatcatctttttcttcatctggtttttggtaggtcccctctaaaaggaacaggcagtctgtgtaggctaacatcatggctccagaagccgactgcctggatgcatattcagtttcatccttgcccgtgtcacccttggctcattcttacctcatttttccatcttcagaacagaggtgatggtaggaccacctcggttgtggagaggattcaaagagatgaagcagggaaaacacaacagtccctgggacatagcatgcacttaataacttagtaaacgttctccttgtgatgttttctctaaaatcctgttatctgaatttcccagatctgtatttctacctgtaccttcagctttcttttgtgtgcctcttaactttttgtttataactgaaactcacttcattccaggtttttcatcatggtcaaccacctcatctctttccccttaagtattttcctttgtggtagagtatcttccccatcattcaaaatgtggatttttgagatatatcttacttcatttatatattcaaatcatcatcaaaattttcttaaagtctcttttcctacctgtccaaatctagttatgacccccttatttatgattttgcctgaggcagcataagttagtagttaagaatctcagttttaaaagctgacatcccttgctttggatcttaactcttccactttttagttgtgtgactttaggctagttacctgacctctctgaacttcaggtgcctctgtgtaaaatgaagataataatcattacttcacagaagtattgtgaggcttaagtgaaatgctgtctttgaagttcttggcatagcccctggtctgtagtgagtgttgaagcattcagcttttgttatcctccatcctggctgatgttcatttttccgttcctgtggctagttcagaatgattgagcagaaccactgtttcatattgcaagagactttagaggtttttaaacctttcacctggacaaaaatcaaagccactgttttttaaatgcctgtcattcatgacctctggtttttacaaccctgcacagtaggtggtgttgtgcctattctgtagaagaaaatctgaggctctaagatgcaaacaatcacctgagctctcccgggtggcagtgtcatgacttctgtttacgctctacccatgcctgttccagatttcttattgtcatcataatgtatggcttccataactccctctattaaagataaggttaaattcttgacatgtgttcctcagcctatggttgaacacgtatttctggtgtcagggaacctgctacttttcaaggtagcccattttactgctgaatagttctataggttaaagacttcttctgtgtactgtgctaaactctgacccctatagcatctctccattttttcaaaagaaatagaggggcagcctaatattttttttacttgatagtcttttaacttttaaatatgtgaatgtaatgattactgcccatattgttctcccctcctctgcacagatgactcgtttacttctgatccccttcattttagaaataaatactattttgtatatgctatatttcatgcatactaaaagctctctgtctctgttttatcccttctgagttgagatctaggagctgtcagtctcttgacaacccatagtatacattcagattttcattaaatagcttttgaggtgcaaaccaggagctttgattttaagtcattctgccatgagtagtgagcctagtcatttatttcaaagaccacacatttctttcatatttacggagtaacctatgtgttagctcccactggcctcctgatttaattttttcctcctttgtctcttggggctatgggaaagagagcaaaaagggagtgaggccaggagaaggccttttagatttggtttctctcctccttggtctctgctactattggtaaaacaatcctgatgctctgggtgtacagaagccctttgccttaatggaaaactttagggaattttattatttttccacaaaaataggcaacagtaaaatctagagcattaaatgcaaattgagtttttatctttccacagctgttaagatttcttagtgtcaaatttattttttaatcaaattcctgacagtagctttgtctgaggttccccatgcagttgagtgaagtattaggagcatgggtagatagagggctggggagtagaaatgctgaggcttgaattccagctttactgcttcctgtcagtgagactttagtttgctcaactgctatagtgaggttaataatagtacctaccttataggcttgcagtaagcattccatgaattaattcctgtaaaatgctttacagcagtgcctgctgcataatacatgcttgctaagtgctattgcatggttgtcatactggttgaggtcatggtttcatttcttcacccggaaggagaaacagtcacgacataaacagatgatcttcagaaggcaacccacgtcttcagaatgctgcttttaaagttggagagccacctaactgcgtgttttcactctgtcctgctatttagagaactacatagatctagcattttgtcttctgtggaacttataatgcccccaatctttaagagctgttggaaatgtattctcaggttgttcatcatcagacttaaaataactttcttactccaacttgaggggtccctgctcatagatgtttaatcatggaagcgtgggcacaggatgtgttgtaacactgtcctaatcacaggtatgtcccctgtcctgctatgtgagcaccagcccccaccttggcatccattcccaatctggaattctggacaggctggtcttagcattgtggcttcctgctttctgaggagatggggttgccagagaaagcggtgccatttttggtataattgtctgaggatctctaagatgttgagttataaactagggaaaatggtaaatcgctgaacataccttctactattgttgagagtagtcttggcttagctagctttagcaatgggtctggtaattcaaaggagactgttcatttactttcaattgaatacgcactgtggtcatttttcactacagggtgtttaacagttgatttcttcttccttaattggaagcactcatatagagaacctcccattgttcaatagctcacgatttgttcattcagttggttttacagaatacttttcactgatgagaatgcctgtcatttattgagcacctactatacatctaaagcattctgctgagctgcatgtataaatgtaagtagatgcttacaggacttcaaaaggttatactgtcttttccttggtaaggtaggtgtaaaggcaggaatgtgaataactgattatgatgtaagatcaaataagacaagttttataattgatattcagacagggggccaccggaagggacatcagttatttccagttataaggcctggttatatttgcctaagtggtaccatttgagctaagcttaaaggaagtggcaggatttcaggagctggagaaaggggcagcagtctacactaggtggaagtaacgatgtgggcaaaagcccaggtgtgtggcaggtctggcaggggtgggcatgggtgataggagatgaggctaagactagttcctctgggggcttgtatgccttgcttcagagacgggtctgtatgatgaagggtcattggagatttccatggagggggagggagtcaggtttttaattctgaaaagcaactttttatgtgtgcatggtagaccacagaggtccagactgcaagcccaagctccagactgacagtcagaaccactgactctcagtgataatttagatgaggtctgaggaaagtctgaaccagtagcatcaggaacaaaaaggaaaaggtgcatttgggcaaactttcaaaggcctaagggacagaatttggtaactggtttactctgggagaaaggaagcttgaacaattcagaatgacagctttctaggtgaggtggccaataaaactacatgcctaataattaagctgtgaacatagaagagagaccaggtttgagcactgggttgggggatctacaatatggggttagcgatgtgtcattttatggcctttacacgatacccacgtggatatattctctaaacagaaattctggtccagcagaaaggaatgagacttgaatatgggagttaagccttagcttttaagaaatccttgagggcttaagagagagagcactctgtctaggagagtagagtgagaagatgtgaggacagagggccaacagatgcttcccatttaaggagccagtggtggaggctccagaaagactgggatcccagaagagagtttcagctgaggcaggctggttcgaaactggcagatggctacaaatgaggagattcttttaaataggataagaactctgattcttactattaaatgtcttatctttaaaatattttaaatgtagacattttcaaactgcaaaagtagaagactataatgacccatcatgcaactgctatttggcttccgttattgcaaatactgtatttcttctttcatctccctgcctttctggggaaggaaaggaagatcgagtactttaaagcagtatcagactcatgtcatttcccttacactttagtttgcacaaattcataaggacaattattttttacataacttgaataaatacgatgtcattatctcactaaaattaaaaattaatttcttaatatcgtctaaaaaaactccattatattcaaataatttgaagtttttgagagccctgttggtgttcctttttttttttttttttttttttttgagacaaggtttcactctgtcacccaggctggagtgtggcggcatgatctcagctcactgcaacctcctcctccccaggctcaggtgatcctctcaccccagtctcccaagtagctgggactacaggcatgcacctccatgcctggcaaatttctttttttttttttttttgtagagatggggttttgccatgtggcccaggctggcctggaactactgggctcaagggatccatccacctcagcctcctcaagtgttgggattacaggcatgagctactgtgtctggctggtgttactttttaattgcatagaagttagctgtcactgcaagggccctgtttgggaaatgagcagagtgttgtgaggaagataataaaatgctctctgcaggaggaatgttccttccatatagtgcacagtgagttttgatgggaggctgttttcttttgtgtacacacttatcccctgggaatagcaacagagctctgtgattggactttctgtcttcagatcattttaattaaacatatgcaatgataccatgacaggtttacctcccctgatccacataccatgcaactacttagagcagtagtccttaatcaagacatatggctctatgcagagacatttttgattgttatgaccttagagggaaggggctacttgtatctagtgggaagagaataggggtacacacgacagccctcccgtaataaagacttaccctgtccaaaatgccaataatggcaaggctgagaaaccctgtgttggagaaatagcagagaagaaccaccactcttttctatctattgttacatcatgtgtttgggtaccaggttgcagttaagaatttttctcttttctttggagagaagttaaagtccctggcagtgtttttcctcagatcatctgcatcacctaagctggggttggccagatctttgaacctacaacacttcattccggttttcattttctttgtgttcatggactctagagagcacggaagtaattgggtttcattgggtagcagagtaaggtagagtgcactttctcaagacatgttcattggtctgagcaaagttctgtctcttggaaggagacagtagcttggtggtgctattaggcagatgagggcttgttagatcaagatgtaaactctctttcttcagtctgattttaaaatgaactgtcatttgtagtaattattaaatgagaagcataaattaagtattttactttctttatttgtaggaaatacaactggagcacgcaaagcaagcctttgtgcaacgggacaatgctaggactgggagagtcacagccatcgacttccgagacatcatggtcaccatccgcccccatgtcttgactccttttgtagaagaatgtctagtagctgtaagttgtaacttgccctaatgaagtggtttaactcagtaaataaggaattataaaaacaattcttataagttatgtagtgttttttttctgttgcaaacactaacattttaatgtgatcacatacattactaaactcaaacaaagagtgtgttttggctagttttagtgggtaggttaatttgttgtctgggtaatacggaatatcttcgagaaatacattagctttttaaagataaaaggaaaaacagatttgtgatctcatgttaattttgttttagattttgaagtatatcaagggctgatttttgctaatcttcttagatgctctaaggcaaaaaaaaaaaaaaaatagtgcacatgtatatcatttgttagagtagttagcacaacagaaactccaaaccttagattccctttcaccgtgtatgtgtcgaggccacagagttacatgtgacagcagagccctgcagttgtgtttcatggagcctccctcctccaggtgtcagctgctgtccttccctcatgggccctggggatgtcctgcaacattctgtggtggtggttcttaagacctgctcgtggagcaccagaatcaccactaaaaactattaaaactacagattctgagatctcttctaggcctatcatacaccatctataggcgatgaggtcttagaatctaattttgtaaagcttctgggtgattttggtaataactcagttttaggaccaatagcccgtggtaactctccttttgttaatcccagggagaatactgttttcaccatcatctgggtttcccacagtgcttaccataggcaggaactcagagtagcctttcagtttcctttcttcccccaagtccttagttctagagacatggtattccaacgaggcctcttccattctggcactgtgttaatctaactccttttcttgggcgcccccttctctactccatactaaactttcatgtcagctattttaaatgattactaagtgaagatttatgtggttgttaccttgtaaagaagtgctttcctaataaaaatattttgccttgctagggaaggatagaatttgaaactccaaactgaagtctcattcataatggacattctgtctgtttcccttgtcccctgtgaagaaatatggtttcttaaaaattctgattatcagaatttttactagtcttaaccccccatgaaagtatatggcatctcataattttaccataatatgcttgtttgctagaaatcccaccaatgtaaagtctgtacctaaatgattatttattactggttataagtaacttgacaagtcttgatattaatgttacattgactacttttcatagtatgtttgcattgatacaatacagtttttcatgcataagcacacacatgtgtgcatatgtacttatagtttttgcatgtttaagcctttaagatttgctcattagatgaaataaaccaacttataaaacatttccaattgaaatttgaactctaaattactactagtcctgttataatcctacacatgtatttatttagttttctaggagttgtgtatggagagtacaagttctggtcatgattagttgcagttgcttctaaaaatcatttatagcttttttttaatgcaaaagaaaaatacttatagtcatttcttcttgtacatgcatttttgattactttcaaactagttttagatgtatgtacttctgaatcatctataaatcttttgtatatttttcttctctcttgttttcaatttatttgaggctgctggaggtaccacatcccatcaagttagtttctcctattttaatggatttaattcgctccttaacaacatggaactcattagaaagatctatagcactctggctggcaccaggaaagatgttgaagtgactaagggtgagtgagaatatatctgaattctagcctgcaagtattgtggtgtattattattagggtgaagaaggcaactagtactttattatttttctatcccattgacacatattaactatatgataacgtgtgtttttcatcctttgatcagacaaacaaaagcaaacaaaacaatcttcaccaagttttaaacaaactgggcccagcttggtgactcacacctgaaatcccagcagtttgggaggccgaggtgggtggatcacctgagatcaggagttcgagaccagcctggccaagagggtgaaaccctgtctctactaaaaatacaaacattagtcgggtgtggtggtgggcacctgtaatcccagctacttgggaggctgaggcagaagaatcgcttgaacctgggaggcgaaggttgcagtgagccgagatcacgccactgcactccagcctgggcaacaagagcaaaatgccatctcaaaaataaataaataaataaataaataaactgaagacaccctttgaataaggaaaacatgtaaagtttcttaaatattttcaaatcttgctacagcttgagctaaattggcaacctctaaggaagccttcaggtgtatatgaggaattccataaagttgcattggtgacagtgtaagttggtctgtaggcttgggacaggatattatcagcattgtaatgggattaagaaaaaaaatcagagccggtgcggtggctcatgcctgtaatcccagcactttgggaggccgaggcgggcagatcatgaggtcaggagattgagacgatcctggctaacacggtgaaaccccgtctctactaaaaatgtatatataaaaaaattagcagggcatggtggcacacacctgtagttccagctccttgggaggctgaggcaggggaatcgcttgaacccaagagtcggaggttgtagtgaaccgagattgcaccactgcactccagcctgggcaacagagcaagactctgtctcaaaaaaaaaaaaaaaaaaaatcagaattcccttaggaattccacaccttcattaatataaccacctaaattaatataattaataatcctaatttaaccagttaattagattaatataacttcccctcctgggacctatgcatatgaagtttcatatatgattccttattttctctgattggcaatttgaataacatcagatgaccccaagcttttaaactgtatattcaagaacatattctgcacacgctttccaaatggatgcaagaactgcaaaaattcttaccttatttggattgacttgaattctacaactgatgataataataaagttttgtgatgttcactcattccagtgccttgagttaatgctgaatttagtggctatttcttcttgaatctttcccttttaacttttcttccatacagaggagtttgttctggcagctcagaaatttggtcaggttacacccatggaagttgacatcttgtttcagttagcagatttatatgagccaagggggtaagttggcttttttttttttttttttggaattagcttaataaaaggaggttaggaggagggcagcaatcaggagaaaaagaagccaaactgaaggctatactgaaatatgagaaatgaaaaaagggatgtttttaaattttataatgtaaattgtaataaattggtatatttgttgcttgtgtttgtttttcccctacagacgtatgaccttagcagacattgaacggattgctcctctggaagagggaactctgccctttaacttggctgaggcccagaggcaggtgagcaaagaggagcaaacttgcattctggggtttccttagcaggataccccaaccctgttccacttgcagttgcctttgcggcattggtatctgacttaaccatttttctgttttgcaccaaaactctcgataaattttaaaggctgtaaagagaaattgcttagaaatggtgtgataaacaggtatttggcatttgctcatttcttgctaaggtggagtgatttcctaactgcaccagaagcctaatgctccgaaaacatgaaggaggtcttttctcctttcttgaagtctcatgttgagagatgtagcgaaagaatcccgtgttggtgtcactgtgcctgtcggcagctgcacgttgctaaatgaaagccgtctttgctctgtggagcagcccttcatcagcgcatcgtctaactgccatgccttccgtttttctgaatatcaaaatgagataattttgtttagtctggagttacagtttaaaggctttcagacctattttctctgtgaaaggattcataagttatatggaaacaattttaggaatgctaaattttattttatggttaacagaaaccaatctcttgaagttgtgggagtcagaaacttaagacatggaactttctcctttaactcttacccagctttctgtagatcaggattagagaagaaaagccttcatagcatgtgttagtaaaataaatggtgtttgtaaaataaatccactcacaggcgagtgtcgtttttagaaaaatttctccttttaggcagagccatctctgaatcctgtgagacttcgcagtttctggcatggagctctgggtttgtacagagacgccagtgtgaccacaatgggttgctgcaggctacacttttaggactgtcagaccttgagccagggcccccttcttttagctctttcccacccaaatgcagcggtgagttttgtgtgcagcatgcaagtcaaagtagtgggtgtgtgctcagtaaattctaacgagcacctctggaaaaccagctggccttgcttaaaagaggaagccgatttctctgagtgcaggagaaataactataatcacgtgtagaggtggaagcaacactgctctcccttccctttgatttttaacactgcttaggagatgattatctcttcgtctgtatgccaccagctattgtagaaatttggggattaagagaagcagagaagttttttttagatccctcctactcttcagctggcagcggcttcccacaatttttcctttaagctctttgcagcttttgagagtttatgatgggtgcttgttgatactggccatgaaagggttagaccagattgatgagatttatagcaggaaatgattcgctgccgcttagaggtttagagcaattcacaatggccttacctggaataggctttttactgcatgaaccctagtgggcccgacaaattcaagcaagggaggtcgtccacctgtgggcacagcgctgcctgtccagcactgtgcagcacttgtagcatttatcctggacagaggagtgaaggagcagagttttgtctcatttcaagaacatgctacagttctggctttggaaaagttaaataaaagtctaggatttcatttgtcttttaggagaggaattaatggtggtggtaggtccctcctccccccaccctctataattttcagagtattttcactcattattttgatgccagaacatttctaagtattgcatatttatatccctgtaaataaaatattgcttctcttttggatgcatctgtcaaaatgaaggtactattgatttccatctatatagggctacagttggaaacaactcatagaatttgcaaaagaaatgttttgtatcttaaagaggcatatttctatgtaaagctattttcagttaagtgactttgaaggagattccaaatgatctcattgtattagaattgtgttacattgacagcaactaaaattcagtgggttgatagctggggttgctgattattttcattgttcactgattttaattatcatggattctgaaaaacaaattttattgaatgtatgtattcattcaacaggtatttattaagcactgactatatgtcaccctcatttgacaactctctgtgacataaaattactgttttatttatgcagacagagaagtgcagcactctgaaatgttctggcatcaaaaacactgtgaggataataggtcaaaagaaccagaaaacaatgactgactgacctgaagtatgaatttagaaaagatggacaaaaaaagagaaaaagtaacgatcaactgtaatacagccacctagttttagctactgtaaatgttttgagtatctctgggtggtagggaggcaaaatattagtattaattttatatgcatatatatgtaaacctcttacaagcatttttaataaaaagtgacatcattttgtatatagtcttaaaaattgtttttaaaaaaattaccaggaaataggtcaaacatttaaataggtacaaagaatcatatgacaaatacctatctacttaccatgctctttttagcctatgttttcttttataattccttgtgaacatttaatatcaaatattcttttacagtatcattttgaatgatagggttttgttttaaagttattatttttaaaggctatagtcctccgttattggacatttagaatatttcccaaatttttgttctttttgtttaaagagcaaaaatttgggaaataatcgaaatttccaataagtactacaaatgttttttaagtgctacattcttgtagcttgttacatgcatgattatcttctatcctaacttttttctttttgagacggagtttcactcttcttgcccaggctggagtgcagtggcgcgatcttggctcactgcagcctccgcctcccaggttcaagtgattctcctgcctcagcctcccaagtagctgagattacaggcatgcgccaccacgtccggctaattttttatttttagaagagacggggtttctccatggtggtcaggctggtctcgaactcctgacctcaagtgatccacccacctcggcctcccaaagtgctgggattacaggtgtgagccactgcacccagcctattctaacttcagaggttatgtacattttaagggtttgggtgtatattactaaacatctctctatttatgcttgctttaatggcaaatttcagaaggcttgttatcaacttttgccaggctgggtattgccacttaaaacaaaaacaaaaatacatacaaaccaaaaacctgccaatttgattgatgaaaaatgatgtctcattgatgtttttatttgctttatttactttattttattttatttttttgatacagtctcactctgttgcccaggctggagtgcagtggcgcgatctcggctcactgcaagcttcacctcacgggttcacgccattctcctgcctcagcttcccaagtagctgggactacaggcgcctgccaccacacccagctaatttttttcttttttttgtatttttagtagagacggggtttcaccatgttagccaggatggtctcaatctcctgacctcatgatccacccacctcggcctcctgaagtgctgggattacaggcatgagccaccgtacccgacctatttttatttttgagatagagtcttgctctgttgccgaggctgaagtgcagtggcgtgatctcagctcactgcaacctctgccccctgggctcaagtgattctccctcctcagcctgagtagctgagactacaggcacatgccaccatgctggtctaatttttgtgttatattatagagatgggctttcaccatgttatccaggctggtcttgaactcctgtgctcaggtaatccgcccgcctcagcctcccaaagtgctgggattacaggcgtgagccaccgtgcctggcctcagtgatgtttttaactgtgcattttttttaatgagaatttgaaaataggcttataacatcatttttgtcaaaggatggttttgattatattgaaatttggttttaaacattaatagcactaaaatctttttattaataagaacttatgaaatccattcctacttttttccttgacattttagttgtatcatggatttagaacccaatgagtaatgtttaaagttaatgtatggtcatttttgttttatcttcttttctgtcacctgttttcctgctctctgattcctgtgcatgcaaagcagaaggcctcaggtgattcagctcgaccagttcttctacaagttgcagagtcggcctacaggtttggtctgggttctgttgctggaggttagtcatggatgagagaaaaattttcacttttgttattcctattctcttttctctgattttccatcttgaaatgttaaaggacaaagtcttctctagtctttcccaatgccagttatcagtttctacctgtgaggtagggcaagagtaaagggaactcttttcccatacctgcatgtgatcagggacttacaagtggcattttcctctatctacagatcaggccttccaaagacaggttactaatgaggttgggctgtagcaatgtgccttaatttaaaatatctatgacatccttttattaggggatacttgaatgaaaaccctcaattgtttattaaagatataagaaaggtagtactgttttaaaatctgtatttaaaattcaaaacacatttcttttctcagtcttgtccttgactttaactaccttcttctttcttctgacctatcttactttcttctgagataatgatattgtttaattttagctgttggagccactgctgtgtatcctatcgatcttgtaaaaactcgaatgcagaaccaacgatcaactggctcttttgtgggagaactcatgtataaaaacagctttgactgttttaagaaagtgctacgctatgaaggcttctttggactgtatagaggttagtgccacatgctcaatacctgttaggtgaaataacactcaaaggtttggtttctcatcttagtgcctgacatgaattagcaagactgcgttaaaatggaaatacagcagattttcaattatccatgctaatgggagtaggctggaggcatctagggcttggctaatcaaaacagcccataatctgaaaattatttatagtgctctgttgtatgttttatttcttaaaataataaattatttttataagcatcttccgtgaatttttgaaaggctcacattgtttgcatccttgaagtactctattctccagctaacagggaaaggtattctgccaccaggacaaagcctactcaggattcatgattttcctggaatacaccacaaaaaagataacgaagggttcagtagagctctcttttgctgcttcatcctgaattaaagttgccccttttcttcatctgactctcaacccaatggagttgattcacacacccctctagccaaggtttccccccactgagacagcctgaaacaggtaatccttctttctccaccttttcctttaaccatctaaggttcattaagcaatggaagtagtagcagagagtatgtcatcactgatggaaaggatcccacagaccctgactgcttttccactggcattggccgaaggagacttctcaactgttctttcggggattgccttctacgagaaggaaacagtgtttctgcatcagttaaaatacagtatcacaaggcagttcaaactcagctgctttataatttggcagcggcaaagctggcagagttttccctcctctcccctactaatgctctctctagatgaagaaaacagtatttagtactctgctgaggtggacggtgaaactggcagacatggaaacctgtgcctctgggcctcttctgccatctgctgactctagtcttcaaattaattaccccagttaaaaaaaacaaaaaggataaacctttcttgaaacctctcaccttagaagccagaaagtctcaaactccagagaagttccattttgcaggtcctattgtgtaggtaggtagcccccatcaaaggccttttgatctttgctctgccctcttttccttatcccctgcctcttcttacaatttggaaggtctttgacctcaggtgattgatgatgaccctttcagggtcactgccttccatttgaaatgcttttcttccctgatggcaacaactttgcaaatgaaatggcttccaagtagtacaaggttaatgtcacagttcctattctgcagtgagtcaggcaaaattggccgccttacctgtccatatgggtggtttttggaagggaaatctcgagtctcaagtctgggcagacatctgagcattgcttcataaactactttttgggcttttcttggtattagattaaatgtcaaggatgcctttagaattgtaagaatgcttcccaacactgctcagtgtctttaatttgcttaagttgattttttattttgagtccttttttctcgatctttgaccatacctggcaggtctgatttttggttacgtctatatttcccttttgcaacctgtactgttggcaactagaagtgtgcctgagtactgagtgctgagctaatgtgggctatgcaaagaggcttccactcttgccgtttcagttcttttatctgtaagatgagagtgactgcttttaacttctcagaggagtagtaagtcaatatattaggtacagacagaggctcactgtaaacacccaagtggcagctcttcacccttttcctggtttagaaatggccatttatctttgggtgccccaaccttaagggcaagagacagagctgtctgtcaggatgatgagtagagtgtgaatataagattagttctaggagtcacctgtgttcatttcttcctgatatcttttctggtaaaccattttaaaacaaaaaatttactgtaaaatttttgtttagtcccattctgtaatttggatcatcttgagagcaaaatgatgactgacagttcaggttaaaataataatgatacataactttgccatgaaaatgacttgttcctattcttgattggtcagggatcagttctctttagtttcttgtacatcatcaataattaataattgtatataactgcatatttgtaagtgcttattgggtaagagagatcagatgaaaatgtaggtaactcatggttattgttgttaatttaaaaaattacaatataagtaaaaaagacctgacatatttctgagactcagtattatcacctttatgtacaaagtcacattatgaaatacctatatgtgattctttgtacatttctcataaaatgtaactttattttaaaattatattattccagaggaaaactgttacgtttaaattaggaaaatatagtattgctgctattaatgctttcacctagcaatatttgagaaggtatcagagtacatctttaattcatacatgtttttaaatattgagcatagtttttagtattacagaattttgctcaacatgtaatttttctctatcaaggcctatgtaattgctcatatttcctgaatgagataatttgggaatgttgcagttgtaagatctttctcctactttaaaattacctttgtgtatactttgaaaaaagttggcatctggcctcaaagaaggtgtttttgtagcatgcgatcttattatgaggttaataaatatctctttttcttataacaagaatatcagaagctgtttttgcatttaaaagcctttccctgtggcattagaatgaaggttattttaaaagaactcttgtagtgctccaccacaagttttgttctttgcctcccccgcagctggctgcatcagaatagttgtggaagttgcttggtagtcatgagagagtgcctagcagtgctcttcaatagaaatatacctcagagagtcatgagaggtgttgtgagttggttaattcctgctctccatgtattggtataactccgttttctttatttccaggagcctctctcctatttttgtgtaagttttagttgctggaaaagagctccttaaaaatcccatgagtctggctctgcaaaccttctctacagtgcaaactacttttttcctaacaagaaaatggcaaattttcctagtttgttgttgttgttgttgttgttatttctgaaaatccaacccccaggccaagcctgtctgtattaagggaaatcacacctgagataatccaggtcttcctgaagtcacttttaaaattctttctctgtttcctccccagtcttcagagtgatttaatgtgctcaggtatttgaaatccttaatgaattacctgacaacttgtttggtttgaatgactggcataaccaaatgaatcagtcattggcctgctatagatctggcgtattaaagaacaacaattgattgggtaatcatccataattaaatgctcttaatgttccaggaataaataatttctgcttttaaactttgttgcagtcttctctctcagatctttcaggtgatgagatgagcagccttagacactggaaaatgttttgggagaatcttggggaaaaagatgtattaagagaaatatggccgggtacggtggcttatgcctgtaatcccagcactttgggagaccgaggcgggtggatcacctgaggtcaggagttcaagaccagcctggccaacatggccaaactctgtctctactaaaaatacaaaaattggctgggcataatggcgggcctgtaatcgcagctacaggctgaggcaggagaatcgcttgaacccaggaggatgcagtgatctgagattgtgccgctgcattcctgcctgggagacaagagtgaaactctgtctcaatttagaaaaaaaaagagatagaaatcagggtctatcagaaatacttcttagacgaaaatttttgtttctattgatgggagaagccctaaagaaaatctcccagaaagagtaattagatcattttatgaattaaacttaatttaagcagtgcttaacctttgaggaaattggcaaaaaaaaaaccacattttttaatcagcccattgatccaagcttgcagagttgtaaatatttctatttcaagttgtctgtgtagtgcaaagcagtcatcttccatcctggaatgttctcaaggtgacatctagaggatgttgtggtgatatctcagggagttattgatacttttatattgcagagggaagttttggcaggcagctagtttaagccaggtcccttatcattgatggtactataaaagggagtatccagattctttagaatcacagtgagattcttcattcttgcataattcatggggataaaataaactttaaaattctggcaccaaaataaaatgattgaaatttccatgactgttttgcattacttaagaacacatgcatcttgaaacaaaccatagttaatctgtgaactgcactcatgtccatccatgtccaccaaaacttttaatgattgcaaaatggataggtttgagtctttattttcttggccaatttctgcacgttttcatttagagcattaagctataaaaatatcagaagacatgtatttggttataggaagccacataagaatgagcagaagatttcaacagatcatttgttgggttagccaatctccagaaatctacagtgagctaactttagtgagcacagggcattgtaatctgagactgaggcgacacacactggatctaaggtgggtgagagaattgttagagacttgagagtgctacagtaacaactgatgaccttagaaaattggaaaaatatgacaaaaagatagacgtgtaggtatcctagagaagaggttaatgaatgaattagttccacacctcaaaaatgataatttataaccagctactgttgctgagactaaaacaagggagatagattaaacctcagtaggagggaaatagtttagatagaagaaaagataaccaggatcctgaacgttctcatgtactatggtgaaaaactgcaggagtatctgatcgttttccccaattctctttacttctagaaagccccagaatagaggagttgaggaactgatttttttccagaccataatcataatcacttattttatgttttaacactttgtctcccaaaggcatcctgagccatagctaagataacagacagtgcttgaaattttgagtgtaaataatttaacctagataaactggcatttaaatcttcatttctgcatttgtccctggctatttccccagctccactgtacagccaccttggggtagcagcccaaagagcctgtcagaactgggttgtaatgaaggctttgaaaggcgatagtgtagttgggaaggtggaaatgcctcatgcctaggggcaatctgagtcaaaagcagacagacaaatgggaggaggaggagggaggaaagaatgcttgagcaagtgaagagagaagggcatggcaacaggagcaggaataaaaagctctaaggcagggcacacaaagtgctgatagctgcagaatgaaggttaatctgatgttgaaagcaaaggggtttctcggggaagatagggacaagtgttctggtttcaatagtgaggtcagaagggtaagaatttgacatcggaggggttgctaccaggtggaaactagataacacaacagtgtgctggctgtggcttcagctacaggaataggggtgtcttctggattaatttttccttccaaagtttactgctcgtctctgccctgaataccttctgccctctattagatgctctcagctgtctttctctggtttgggctggcccctgtctcagttctatgctgagatagaactggtaactactgccttagttaccaagtttcttccttggtagtagcccctccacctctgtggtcctgctagcgttgcccagcgtggtcctttggcaccctggccactctgggttacagtagccgctcagcgtggcttcaacccactcctgaccctgcgccttcttcccagtatattcctgctctcactggttcaccaggttataacctacagcttggctctgacattcagtgccttcgaggttttaaggagtctaatattcaccatctgtagagacgggggaagcatgatgtggatgcctgctacatgggcaccatccctttgttgtgtacaagggtcaggcagggcagggtgctgacccagcctgagctgaggcctagagaaaagtttcagaacagtctagttgggaagaaatgcctttccagggcagaggaggaacttggagcagtaagtctgttagagaaaactggtaccgcagagaattaaggagcacagagccctgatttgagagtactggcaggcctgaattcaactttgagtgctactacatagtcgctcagaagttagtgacttgaaacaagctgcttagcctgtctggattccagtttccatgaaggaggaggaggaagaataagtgatagtgatgatgaagatcaacaacaacaacaaaaatccatttctgtagtctttactgtctgtacttggtactggtctgaggattttgtgagtgttaactcatttcatcttcacgactaccccgtgaaaatggcatcatgattattcccattctacagatgtggaaactaagatacaaagagattaggtaacttgtccacaattacacagctaacaaatagcaaagtcagaattgaagctcagcagcctggctccagacctcgtgttcctaatcacttggctcttttgtcacctggtagaaattacattgtgaaaagttgcttgtcagcagaggttaaggatcatttaagtttttaactataatattttatttcagcttaataacatagttgaaatgtgttgttttgtctgtgccactactttaccttgcccaaagtatacagggcccctggacacttccagaccacatgtgctctcactgcttggggacagctgttctaagataggcataatgtcatgggcacagcatgatactccttagctaatggtggactgtgaacatgattcaggctgaattgcctcttgcaaacaaaagaaatcaaggctatgtattgaaaagataggtagaaagaagcattatgtcttttggaatacataacatatgaggtaaatagtgtctggttctttgtacacttattcatataattatcaaaataaaccaatagatagtaagtagcacccttgttttgccaagagggaacctagaattcaaagaattactacccaagatcactcagtgtgaaagatgcacagacctagcattctagcccaggtctgtccacctccaaagcccatgccctagattgttcattttgctgccagcccgttggaaatagcctaaaattagtttaaattaggccagcaatattgagtttctttcataatcccttccaaccctgaaattccagttatatttctaacaggttcttaagaatagcatgctagccctctagttgaacacagtgggcccaggaacctcttttggggatgtcctgtgaagcttgagttggagacccctgatctgggcttggtccccacaccttcagctccttggtttgcgcaagggactgaattcagaggggatagtgtgatttatatctccaacccatgaaatgtgaagacaaaatactacattaatactgtaccctgtaaatcttttctcgcattagcagccttctggtagagtcgagttgccaaggaagcattgccatatgtgctgatggagctgaactaaaaggagaagattggaaaactaaccacactaataaatttcttttgaggcagttggaaaatggactgctgttttgacaagttagaaacaacacacacatccattctctgtttcaaatggttaaagtgaatttccaggacccaacagaaacatcttatattagaaacctgatttttctgctgaattacccagatgtcagatatatatgcactttagacttaattgtggttgtgatgaagtgcctcacctagactctctgctttaggcattactgggctgtgctacctctcctccctctgaggtcaaggtacaaggagggagtttggaattcccacctctttgacttttcattgtttcacagatcatgaccttcttacaaagaccatttacccaagactcatgttttcaaggcccacatctgtagtgggcctcagattataatccagtcaccttcattttcctgtttaaccagacaaggtagtcactacaagaatggttcttatcaacaacttccgtgagtggcagcatctggcctaggtcttaggaatggatttgtgctttggttttattctaagttgaagttaatcatttaatataaggaagctcggggcctctaatatattaccttaaactcctagtttctctagcttcctcaggtctctgctcttgcaaactatccttcacctgcctctagaactttttactttttgaactttactttttaccctaaaagccaccccatgcatctacagaatttggtgcatgctccttagtgggcctgggagagaagttgtgcagcgtaccaggtaagagcacaggctggagtcggacagcctgggtggaaccccgttcccccatcaaacagctgagccaccatgggcagctcccttaaagtcggcctcagtttcttcttcagttgctgtggataaaacaaaagccactgtttaagtaaggtattgtgtggattaaatgtgttcattcacataaaacacacagtactgtagtatgtggatatagcgagtgctccccaaatattggctgttgtcattatcactactattaataatattgttatttattatctggtcttctgtgatccaagcacagcctccagtgccctgactccatgccatagccttaagatgttggtgcctttgcacaccaactgtttcctctgcctgggtcaccttgccctccattctgctcattgtctcatctttccggggaacctctgctcacccttgaagtcccagggcaaatatctcctcttctttgatgttttttcccctcctgcaggcagaagaactggttctctccactgggttctcatagtcctgtgatgcccctggggtctggtatgcagcacctgctgttgttaggtggtttgtcccccatctggcaggtggagacaactagcgttccctttccctctaaactctgagcttcttagcggggaggcaccagtctcactgtgttcatcccagttcctctcagtaccaggcagacagagaaggcatttggtaaatgtttgctgaacaaatagctacttgttgccttctttgtagtcttaaatacggggttttcccttctgttttttgccgttcacaatgcattactaaatttatggtgagaaggataaatttcagtagtttgaaaggctggctgaagtgattgtatctaacacagtagtcattaggctctgtggcctgtttttttattagtcatttaaaaagactgtcacaggatagttatggagacaagagttcatcatttaaatcacagtgctttcaacccatccacaattttggtctacaatttaatgatgagaaaaatacatctagcaagtaaatgtttaactaagcattttgttacttgatgtgaatacagggagaaagatgaaaatttcaattgtgaagaggtagtttaaacaggcgtatgcccacatattactagtagaaattaatgttgtacttttattaggtaataaccaagccttctcctattatagatatcttactgaaagatcagtgagtgagtgtcatgagtatagtttaggagagaatgcttgctttggataagaatgcttgctttgcccaaatggttgcatattcccgttttttctcatatgctgcctcagctcatttaaattctaaagagcacagccccactcaagctagcaagagcttaggggggcttttgataaacattcacacaagagagaaagaaggtagaaatctcagatccaagagcaggagctgcactggaggctggcctcagtgggacccaaaggtgatggggacaggcgctcccacctgtgtgcctttcatgggctatgtgcattctctttttaatctctattccttttgctccacattctcatctgtccaccaatgcacttcctctgcttattcatggtttctgcttccttgtgatattagcacacacgtgacttccaattggctgctttccttgctccacccatgacatcttttcatcttgttgcttctgtgctaacttgtcccctcttctctaaagactgtcagtcatcctcctggagaaggcatcctaattggccagctctatttttggtagcaggctcaggttgctgaactcttgatttgcgtgtcttttaggtgttttacattgtccagtcagctgtggccctggggatgaagcaggcttagatgttatagttgcttagtgaagggctgcaaactcaggacaggtgagatggctcacacctgcaatcccaacattttggaaagcctaggcaggaggattgcttgaggccaggaatctgagactggtctgggcaacatagtgagggcttatctctttgttaaaaataaaaaatgagaaaaaacaaaaagaagcgttgcaaactcaaatgctgataggatctaggcaggttatataagtgaacaaatgcagctgggtgtgtgagatgcaggtacacatttgcacattaacacagagttgagttgtatataaagatacagattttttgagtaagatggctaaagcttgtatcccagtctcaccacttaacagctaggtaacttggaagaaattactttatctctctatgccttggtttcctctctgtagagtggttatgaagactaaatgagttaatacattttgtaaaatggtacctggcacgtaataaacgtgatgcacttttaaagaaaattttcattaacatcaccatccttatccttgtttaattccacaatgaaggacttcctcccatttttccatgaaaacatgaagctgtattcatctttttagttttccccctttataaggctatgagcaaagaaaaaattttatcaattgtgacgatatcagtaaagcaataaaaatagaaactggaggccgggcgctgtggctcacgcctgtaatcccgacactttggaaggccaaggcaggcggatcatgaggtcaggagatggagaccatgctggctaacatggtgaaaccccatctctactaaaaatacaaaaaattagccgggcgtggtggcaggcgcctatagtcccagctactcgggaggctgaggcaggagaatggcatgaacccaagaggcggagctggcagtgagccgagatcgcgccactgcactgtagcctgggcgacagagtgagactccgtcaaaaaaaaaaatacaaactggcgcttgtcctcattgaggtacgggcctcaaagcagggtgggcaccaccttgcatggtttctgtctgaaggatggagcctcatgcaatagagcagatggctgggatgtcagaaagaggcccggggtcagtcagagttcggtcagaactgagcccatgaactgactgttaggtcagtgtgttcattgatctttttttttttttgaggcagagtctcgctccattgccgggctggagtgcagtggtgcaatctcggctcactgcaacctccacctcctgggttcaagcaattctcctgtcttggcctcccaactagctgggactacaggtgcctgccaccacacccagctaatttttgtatttttagtagagacagggtttcaccttgttggtcaggctggtctcgaactcctgacctcagatgatccaccctcctcagcctcccaaagtgttgggattacaggcataagccaccgtgcctggcctcattgatctttcttacaaggaggtcagattatgtttgaaactttttgttactcaataaaacacacttataggttggatacatatggcattcaagctagtgacctctcaggctgctcctttaggaagagagtgtgggcagggctggtccctcagaagaggctgtgagtggactttcttacatagataaattagaaaattgtacttccaatgaagaatattaccatgaacctctctcagtatgacacagggtgcaacatgctcctaccttcagggttagcttggtgtgtgtttccaagaaaaaacaactgtgatttaatttttttttctttaagaagaacaaatgaaaatgatgacattttttagttcagatacgtagctccactaaatgttctaactgccttccccaaaattggtccttgttttagaaaatcaagtggtccactgatttagaaggcagaagggaaggagcagactttgggggaataatgagatttcctatatcactaatactgttgatttacccaatgtgcaaacgatccagaatgtgagatggaatgtacttgggactgatgcggctgttagaagttagtacttaaacattccatttcaaatattctcattaagggtaatagcagaaaattgcagcagagattaagcagtttttaagtggtaatcccctctgtagaactgttgatttgtttagttaatgctaatttatttaatatacttctactttttgttgatttttaggtctgttgccacagttattgggagttgccccagagaaggccataaaacttacagtaagtcttttgagttggtgcttcttattaagggattttgtacatactcaagaatctagcaggtattcttataggaaacagcaggtttgttttctcagaggtgctagctaatttgaaagcaggggaactcaccacacacattttttcattattctccatttagcagtggacatccaaaaatgtgataataaacttgaggacttttggtggttgctgccatcattgttgtcatcacagcagtagcagctaaattcccttcagtatctaccatattaggcacatgacgtatattacgttttactggtttaatctcaagcaaagcatgatccacagtttacggataaggaaactgaggcctatcgggcttaagtagcatacctgtgttcacacaaatcatgagtgggagaactagaatttaaaatcacacttgtctgactccagagcatgtctttctattacacctgctgtttttataggattcatggttagggtgtgttctataaagccaaatgtgcagggatctgggttctagttgaagttgatcctttatcagattatttgcccagtgcttggctcacatttgacagatggttgatattcagtttaagcgtttgtggaatatacaaatatttgcatcactaaggccacaaagccccagaaagtaaaactctagctttaggttgggctgcgtagctttggagcctgaaattcttcttttaccattttgttatgtgaccttgagatagctaatcttctctggcctatgtctgccaaaaagatatgactgtttcttaaaatttcttgtactacataccattttgagaatattatattaattaattaatgtaatttatgttctttgagaatccttgaggaatttttagatattgaatttcttctaagctgaaaaagtctgctcagccaaatttatctccatgatgagtactgttttagattaattcttgttagaagacttgaaagtgatttttaatcaagccttataaaacagttttaagttgtaagatgtatgtttttattttgtcactattgtcagtgtgtctcccttcttaagctattctaattgcagaacatatttttggctttcatttatcttttaacttttctcctgaaacatcagtgatgcatatatatttttcattttttaaaactattatactattaagagtacttctcaaactattttaagatctgttaaattgtgcaatttatgattactccaatagactgatagaaaaaaatagcatatattgacagatgcatatttataagtgtttaatgactttctttatatttttcatcagcttctataaatatttttcttcaaggtgaacgattttgtgagggataaatttatgcacaaagatggttcggtcccacttgcagcagaaattcttgctggaggctgcgtaagtaccttttgaagctctcttcattgaaaagacttgtttcacatatatatcactaccatggtcaacaggtgtggactaaggcttctgtttaaccacagatcctgcacaagggcagagtctactagggcacctcggcttttcctagacaggcgaaccattccagaggtggaagggtaaatgtttctgaccttactgcctgttaagtcatgcctgttaaattcgtcattgcttatggtttgttctgcaatggaagtcatttgtggcagaagtgtttggcctttgaaaaatctttgctaaccttttctaaagttaatttttagtacattctttcctcatggcaccctctgctgggtcaggcactaaaacttgtagtctgaagtcagcaaccgtagctctctgcttggctttgccttgcaagtggcagaactgttcaagcttccactgcttttgggagaacaatgctgggaaataactggctgagtgtgcgctgcattgtcaaaaatgcttggaatgattgtttccttatatggatgaacaacttgcatcttgttctgaagctcagcaaaacattgtgtctcgttttatctcgtactggtttgttcatgcgaatgtaaatactttaagtaaattaaactcttatacaaagactagtgttatttaaagataagattggttaaataacaggctttgatcactcaggcgatacaatattggttttttttatccgaacctatttcttataaaaaagatgaagtcacttttttaaattggcttactctgggcaggaagtagtattcctaaagtaatttttttcttgaagatccttgaatgtagacgttgggcaatgtttgtgtggaaagggcttattgtcctatctaatggtgaatgatggtttcttaaatgtagcaggacctaagaagtcctagctcctggtattctttagagatggatggaatttggctactgcctgactctctgtttgatcactgacctgttggagatgggcaggcaggatccccttgttctgtaactttaggagcgttcaggatggaaaaaaaggagcctttaatgtcctaaatataaagggcacacaataataatcaaagagaattttagaagttgctcttccccataactactctccatttaaaacaactctgtagtttccatttgagtaagtaggttttctaatttttgagtaggtatatccataggctgtgcctagcctagtccttcaggttgttgcagggcccaggatatagcagggttttttggtaggtcaggtggggttgttgtttttttaagttacattttaaactttctgaaaagatatgattatagatttctgtaagaattaaaatgtaaaattaattatgtgatactactcaagatgttggcaatcatcatggcatggtgcccagaggtttattttctttttaatgaaagcattttgcctgcacatacctctgggtgccaaggagattggttgtggcacgtattttctaggtgccatctgtaggtggtcttgtttttgcatatgcggccgcccatttcaaacacaaagcacattggcatcagaagtggtgcctagttatgtaaagagatgtagcccttttcaaacctgatctaaacacaggcttaaaattggagccacttaggctttacagctacttaaaatatctgtgaaatgaggtttgccatccttcatctcaaagaggtagacagtggtccttagcttttcaagtcttctcccttgcctttttcccccccaatcattactttaagaagtaagagtttattttcagttaagcaatcctgtaggtagcagacaacccaggtccctttagatctctgagtagatgaatggatggttccattttctgtgtgtgtgtttgtgtgtgtgcacacgtgctttttttttttttttttttttttttttttttcagacagagtttcgctctgtcaccaggctggagtgcagtggcgggatcttggctcactgcagcctccacctcccgggttcaagcgattctcctgcctcagcctcccgagtagctgggactacaggcacacaccaccatgtccagctaacttttttgcatttttagtagagactaggtttcaccatgttggccaggatggtctcaatctcctgacctcgtgatccgcctgccttggcctcccaaaatgctgggattacaggcatggggccaccccgcccagccatgcattttttaagtaatagcagcatctttctttgcaggctttggcaaagtcttctctataattggagtcagtcacacaccttagagggttgttgtgagttccacagcctcatctgtcctattgggaatacaaagggttttgtaaggttgtgtcacatgagcggttcctcatcttagttcatccaagcattgctaggtgttgacttttaagtccctggggagctcaccttgcttcatgattactgagaattagtacacatggctgacttttgcacttgtaaccaaagctgctcatttctttgaacaaggcttattctgttttatgatctgttttctgcaaaaatgaggaaagtatgtagggagatctttgtctcataacttcataatgtttagctaaacagcctgttttattgtatatatttttttagaatgaaagtgttagtaaatttggaggggaaaaaatgattgtcactaaaaaggaataaagtttatcccatttcttatttattatttttgatataataaagcctgtaactgaagagatgaaaaaataatcttctgtttcactgacatatgtaaaagggctaactttcacgtctaactttatttttaaactcattttttgcatttgagattagttttagtttagagcactgttaaaaattgacttcagttttctgagcatttttatagattcacactttaacagtagtgatatattcagcatgttttaagacaaaactcgatgctgagactggggtttacaaactctaaatctgaaagaatcctttgtggtttgtgttttctccctaacttgggtttctgcattctaaattagggttgtagttgtgggagttctgatggagacttggaccttcagtcttccctgcatgaggtatatatatatatgtataccttctgtttttttccatcttttcccttcttggatcaaaaacttggcacctttagagggatgtgattgaaaatctgtgttagtgaccgtgtgtgtcagaagacagaggttctgttaccactagccacttccagttaggttcccaatgattctgaaaattgatgtattacctctgaatatattgtttttattgcttttttgctgttactttaagaaaaaaataaaaaataatgtatgtaatgcaatatgatctgtaggctgcagtgcttcattcaacaaagtaagtgtatgacttttatatatctagtgtaatatgcatctaggttgaaatcttgaggagcctgggatctttagcttttgatcctttgatctttaaaaaaaagtcaccagataagaaatacaagtggtgcaatgactagtttcaaggaagaaatataaatatgatgattaatttatttggcctgaaaataaatctaatattactaagaaagaaagtcatgaaagtatgaacatctgtcttataaagccatatttagtaaaaactgtttatataacaagagaaagtaatagtattgtgtagtaatttttggaaagacaaattaacatgttttttaaactatggtcctttgataatgggtccagggtattttttcattgtgatgcacacatgtgtgtgcgtgagtgtgcatgttgtaaatataattggtgtttatagaagtttatattcattttgactgcattttgagttggaaaaacagtttatatgcttgtgtcactggttctaaaagggactggtgagactaacactgttgggaaaacatggaatgaagagtaatcttaattacactcccctataaataagtaggaccctaatgcagtttcctgcctgattcctaccataatggtgattcccatatgcatgatgtgtttatgccagtttgtccagccacgtatcaaatactgtttttaaggcaaggttttattactcatctcatacattacattcagttgcagttaatttatattttgaaaaattttgaaaaacacaacaatacagacacaggtgtgcctaccacttagattggtgacaaacttgacagtgcagttggaggcccttaatgtacctgtccaaattgcttttcattcccttacctctgtctcccaagagaaaactctgtcctgacagtggtgtttttcattctaagcatgtctctctactttttattacctgtgaatatcctaagcagtataaatgtttgtttttgaatgcctcatcctaacccagtgctctaggaacacctcatatgattcccagattgatgcctttgcattttttcccattagtgcaactcatgtgctttgcttatcagaaaataatagtaaatgggagtattacattcaaagtgttggaatgcggcagatactgcgtatgtctgttacagatgtgtgggtttctagatggacttatggttggaacagtgtattcatttaaccaagtttttggttacttggggtttctccctagacaacagtcatttcttcagtcttatgatttaaacttatacatgatacttagtttaaaaatgttaaccctccccactgccagcatacgctccctatctacctatcagcctgccttcccatcatccctcccttcttcttctgctgccatggttcttaccaccttcaaacattctgtataacttacttatttttcatgatttttgtttattttctgtctccttcatggtagagtacaagttctgcaaaagcagggatcttcttattcattgatgtatcctgaggactgcaggcattgcatggtaacctgtagactctttgtaaatattggttaaatgaaagaattttaaagctaaaatcactcaaaagtgatcttgtcaatcttcacagccaatcaacgacaaatctgataatggactcatttatatcttttctttaatgttagtcaaaccccttcccatcattaacaataaaacttatcacctgtctctccaagccatacttaatgataattcccaaatcaccaagaatagaaagcatatagatggagatcattttacaaagtgaaagtgttccttttaaaaccttgccattctaatttttgagaattgccaacagggatgctgctgcttcttttgtgtgtgtgtgtgtgtgtgtgtgtgtgtgtgtgtaaagttaatccttttgaaaatcatagccatttgtagtaaaaataatcacatctaacaagaggcagtccagtttcctgtaaagaacatgggcttttagtcggtttggggtcccaaggccttcacctgccagatgtgaatcaaggattagacaacttagttgacttctctgagttgcagctttcttgtctataaaatttagatagcaactttctctttcagttatctattgctgtgtaacaaacccctccaaaacttagtggtttaaaacaataatctgttctttttcattaatgctgcctcctttccgtggtttctgtctctttcccatggtttcagctggagtggtgaggcagctagaaggtccaaaatgtcctcacacaaatggcaatcagcttggagctcagctggagccatggctgggggaacaggttctccacatggcatatctgcgtgagcttcctcacactatagtgtcagacttaagaaggtgagttctgagagcagaataagaagctgagaaaaatctcaggcccagtttttgaggttatgcaacattaatttagccacagtgtgtttgttaaaacaggttataggccagccggattcagtgccagggaaaataatctacctctgaatgggagatgtggcattgatgttgcagccatctttaatgcaccacagttaccttgcctgattgtgggaaaaattaaatgagataatatgtatgaaagaattaaatcatgacttaagtactagtcttcctcctcttctggtgtctactttttaacttctaatatatatatatatggagagagagagaggatgttgtgaaaatgaatgttttagtttggctttttgggtgaaggggaatggaataggtgtattggagtttggatatggctgttgaggacctcagctacctcaggtgctcctgaaatctctggtcttctttgtgaacctgcttatttgccatttctctactgattgatttcctctgctgggtaacatagcatctttattctaaaaatgactttaatttcatcctgtgtccacagtgcatgccaatcccagttccaaggctttcctcctaacaggaatgatctcagtgtttctccatcattgaggaggagaagtgttctgattatctattgctgcataacaaataatctgaaaatttagtggcttcaaatagatacttattattattctctcttgtggttctatggattgacggggctcagcctgggagggttgtacttgggatccttatatggttatgggctagtggcagctggggccagactcatctgaagggtcaaccgggatagatatccaaggtggctcactcttgtaactgaacagctggggctgtgctccagagcacctgcttgacttctctgtgtagcttggtcttttcaaacattgacaatttgattctgagagggagcctcccaagagcaggcatcttaagagtcctgggcagaaacaagacttcttatgacctgaccttgaaggtcactgccagtgcattctgatggtcagacaagccagttaggctggcccagactcaacaggagagaaattagaccctacatcgtaataggaataatagcaaaggatgttttaactgccactggaggattcagtaagctgtgttgtgggctgggaacatcttcattgcccttcaccttgtgaaggtttcatagcccatctcatgccttctctgagggtctgttgctgatcctagaacccattcattctctagattgcttctggtagcagggggcagaaactcaccaaagttggagttaatcaaatgaaggtttactttaagggtacccattaaatgaaactgaaggctcttgagaattgaggcagcattaggaactggctactctctccattttctctacttggcctttgtctctctcacagtgactttgcatccctctgcacatcttttgactattctaatccataacttcttctcttcctgaagaattggtgttgactttctcaagaattcccttcatgttcttgccagccacctagcctttctctacagtaggagacagcctcttttcatcccttgccccagccccagctaattagcttaagttgttcagttttgttttgttttccatttaattattgagagaggaaatctgattggcaaacctcatctttgtgcgccaggccatacatatggcagccttgagtcatggcgccacccagatattaatgactttgcttaacatttccatttgtttcaactacctgtaagtgtcttcaaacctttcttgtactgttttgtttttagctctgaattctgtaagtttgccctgaatagtattgtgtatactttggtcataaaatatactcaaagtcaccattccttatgattgaacttgaaatcccttaagatttcatactcactcatatcaaaccaggaagaaaatttcctcatataatgaatacatatactctgacaatcagagctgatgagacagattgcctgaagtggatttaagtcttacttcgcgatctttttcttcccaggatttcctgtggatacgtagcctcatagtgtggttttcttaaggtagaatttttatttcactatgcaagtctctgcacatatcttacttataaatataagatgatgtgaggcttaatcattaggttgagtttttatgaagtcactcttgtgtgacatgtgaattaatcaagatacattatgcattatagtgatgctatagcaataatgttaatttttttaatgcttgtatctttacagtcttttgtagttcagtgaaaatctagtgattatattgttttcaaatgttattattgttattgtttggaatattccctgggagaactttttgcctactccgccaaaatgtaagaccatattaaagattttcttgatttgtacttgcactttatctctgccttccatctcctcttgacttggagggttggagactgtgtctggtattatatgacctgctgtctttgtcaaccatggtcactgctttgccacttgaggagatcttccttcataactttgtgctgacaactaattgcatctcacagaccttgagtaaatggctgaactgagacatctataaatatggatgacagggcctgtgttgcactgttacagctgtgtgtctagcattgtgtctgacatatggaagaaacttaaaaaaaaatctgttgaatgaataaatgcttgactacaaggtgtgggtcatagatttggaaaggaagggtagtgactctgtataccatgttactattcatttagagactgatggccagcaaagaggaattaactccaaaaattagtgggagagtaggggtgcaggaattgagggaatagctgtaaccatggctaggtgtctgcatatccaggatatttcacaagaaagtattccatgatcacccagtaatagaaccaacctttataaggctcctatttattttatttgacttcatttctaagaatgacaaataaataatccccaaatatattcagaatcttaagaacaggatgaagataaacaacttggagcatttggtatagcttatttattatggcttgtattttaagtagaaaagactttattgaatgactaacatgaaattatgtcagagtcatgaaggaatcatagaaaagaggagctttaaaaaaggaggagccaattaatagccaaaaaaaaaaaaaaaaatgctaacctcatggcactatctaaattggcagatttctgaaaagccaagaggcagctccatcggttttctcaaaaagtcctccaggcaatgggactaaggcattggtcttgaatagagttccactgcttgcctactccaatgagaggctctttctccagatgatttcaacttggactgagggcaaaattaaaagaaatatctgatggtactaagggctcatgggtgctatagattgaatgtttattttccccacaattgctatgtttaaacctaactcccagtgtggtggtattagaagagtgggacctttgggggtgattaggtcatgagggtggagcctacagtttgagattagtgcccttataaaagggatcccagggaggtccccactccttcctccatgtgaggacacagtgagaagacagcatctgtgagccaggaagcagtgctcaccagattccaactgtgccggcactgtgatctcagatttcgagcctccagaactctgagaaatgaatttatgttgtttataagccacgtagtctatgatactttgttacagaagcccgaacagactaagacagttaaggatagcctccctggctaagggctgccttcagtggctcagaaatgtcatcttattagaggaaagtccaactttcatgctagacactgggccagccagatacttcctttctgtttttctccctttaccttctctgggaaagtctcagagttgtttgactcaacacagttcaaatattgggccatctttctggatttctagtaaatagggaggagtttgttacgataggaaaatctgaagaaagactgggccatagctttcatacagttaaggtactttagacattgaaggtctgtaaatcattaaactattctggtagtagtagtcaaaatacacatgtataacaggcagaccccaaatgttaacatatttgacaggcctgtaagttaattgctttttaatgtcagtcaaatggattccactttggtttcttggccaggcttctatgggcccattaaaaccccatgaagctgaaaacatgaaacttaatatttgtaaaacatgtaaacagaatagcctttttctgccttaccgtgtggttaagaaattaggactaggatatttcagtttggtatctttctcagaatccaattagagtaagaatttattttattatcttttcaatattgttaataatctagtaacacatttttcacttaagagttttattttcataccaaatcaaaagaaaaaaaaattctatattgctttatgtttagagatgtgcatttggtcagacagtctaacttagtgtattcgtttggtcaggctgccataacaaaatgcctcataccacagagcgggaggcttaaacaacagagactggaagtccgaggttaaggtgttggcagttttggtttcttctgaggcctctcttcttttcttgcagatggccgccttctcactgtgtcctcacgtggtcacccctcagtccatgtgtcgtctgtgtcttaatctctaattataagggcaccagtcatattggattagggcccatccatttgacttcatttcttcttaattacctcttaaaaggccgtaagtccaaatccggtcacattctgaggtcctgagagttaggacttcagtatacaaattttggagagacgcaattcagccctaatgctagggtttaagaaaaggtctttctttcagtttgtgaggactcaggtttctgattgcaggagggtgatgatgtatcttgtgaaggcagtgagcccaacacacttcccttcagagctcgacagggtgagtggccttccgacctcatgccacctcatctttgccagcttctttgtgaggttgctgaatgccgtcttcagcacttgtgaacagttttgaacagcacttgactgcaatttggcaatgtgttttaatttattccatccactgctatttgctgaatatctcttttttacctgtgagctctgcatacaataatagttggttacatacaaattattttcatgtctctatttaacattgagttagtaagaaagtaaatggaaaatatgttgaaccttagattcctttacaagtctttattttctaatttattcaaatgtcaaacactgtcatcacttgtgtattcgtcttaatgaaacataaatcactagacatttattactatatatcttgtttgtagttacaattgtgtttgtgtccagataatcaaaataatgtatttgggtttaagtaaaagtctattctataactttatattaatctatttttgacacgtgtaagcacgcattttagaatgtcagtgtgcaattagatattcttagcacatgtcatttgtgaaaagcactttaaatctaagtacattcaattgagcataattaaaatatcaagatacatattcttcatatacattttgcctcttaattttttaagtagctataagtatctaccatgtgaattcaaattaaaggagggtgattaaattacagttatatttattgcttttagtttaaaatatagttgaaattgcgctatattaaaaaatatactgccatgttttctgtggacagcagactgatgatgggtttaatttgttttaatgcaagactattaatagtctctgaatattctcaagactgttgactagaatgattgggggttgggaggcgtaagaaggcttgtatttttatctaatgagttcttttgacttgactcctgaagtctcaagaaaatgttcaggaatactacctcatttaataaagaagcattggagaaagccttgttttgttgatacaaatgaaaggaaatggatcatggggaaatatgaactggagctcctgaacccttatcctttagataatgtatttaggctactgatatttcctatcattgtgaaaatgagcagacagccttggtgagtcagttttaaggcacatgtaactgttaaacctacttgtccacaactgttggacctaaagtatattatgattttagtgaaggccattgttcttggagtacttagagaaaatggggctgtacgttagaactctggattgtgttgcctttctaaaatatttgatttcttaaaattctgtttgtttgtttgtttgtttgtttgttttccaagatagaggcttgttctgtcgcccaggctggagtgcagtggtgtaatcttggctcactgtaacctccgcctcctgggttcaagcaattctgcctcagcctcccaagtggccaagactacaggcacgcaccaccatgcccagataatttttgtatttttagtagagagaggattttgccgtgtcagccaggctggtctccatttcctgacctcaagtgatccacttgcctcagcctcccaaagtgctgggattacaggtgtgagccacggcacccagcccttaaaaatctgtttttaaaaaataaatagctatatcacttccctgtgccaaaccagaagtgtcaacaatgaagtcattatgtaacatggcaagagggattcgggtggcaaaaccgtaaggaggagaagaagaaatcaagcttatagaagcatgtagacactgagtgaaagacgcagtgataggaaccacagtttggtttttttgcagactagcccatttcagagaaggcggtattagaagaaaaaacctataattttactgtgagccgtgaggaccatttcacatgaaaaaaaaacagagcatttggaaataatgatgcttcgtatcagtagaatgctgtgcgtttgagaagcttggcgcttggacttcatgctgacatggttgtagtcacagtcctattgccctttctggttgctctcagcactcctggatgcaaaggtgaatttatgaagatcatggacttccgatacaaattacagcagccaaaactgtcatatggagatgtgaacttaagattgtattggtagataggtgaagcacccattgctcctatcttgaaatgactatgctatatttagacaaaacctacatcagtataattattttgcaagcccatttgaagaaaattaaaactgtcactagttatatatttttgagcctaaaatatttctcacggctgggcatggtgtatcatgcctgtaatcccagcactttggtaggccgaggcaggtggatcacttgaggtcaggaatttgaaaccagcctggccaacatggtgaaacactgtctctactaaaaatacaaaaatttgggaggctgaggcgggcaggtcatgaggttaggagattgagaccatcgtggctaacacagtgaaaccccgtctctactaaaaacacaaaaaattagccaggcgcggtgacgggtgcctgtattcccagctacttgggaggctgaggcaggagaatgctgtgaacctgggaggcagagcttgcagtgagctaagatcatgccactgcactccagcctgggcgacagacggagattctgtctcaaaaaattggctgggcatggtggcgagcgcctgtagtcccaagtacttgggaggctgaggcacgagaatctcttgaacctgggaggcgaaggttacagtgagctgagtttgcactactgcactccagcctgggcgacagaacaagactctgtctccaaaataaataaataaataaaatatttctcaaggattcagatttggggattttactgccaagtagcctggctttctcattattgattaacctacaaagaaaaatttgatatatctgatgaaaatcagttatattgtacctacaaaaacatctcttccatattacttgatgtattttaatgtcactgaatccattggtttatctttatctcttagaagctcttaaagtcacaggaattctagtccatatgatcagattaaccaaaaattcaggcagctactccgttcaaacaggaaagaaaaaactgaaaatgaattgttgtattgaatctgctttttcacaagagacaactaggcgtaatggttctgagcgtgggttagaaattgggcaagtcgcgttcacattcttttactaccttgaagagaagtctctgcctccatctcatctctagaaagatgggaataatatagcttgtgtcagcatgattgggggattgaaggagatgatgtctgtgaagagtttagcacagtgcctcctacatcagaagtgcttgacacgtgtctggctcttgcttctccaggaaggagaggaggggagaagagagagtttgcagggccgtagttattcaagtagttacagctatctcttctttctggtcacactgctgggtaatttgttcttgaaaagtgtctcaagatgactgctcccacttagtagctggaaaatcacatccttccagaaagggatctagagggcagacatgggtgaagtgtacattgttagagggctgactggaaataatcagtgcagagatcactgtgggcagagccacagccttcaggtcctataaagggcagaacgataggaataatctactgcataggaaaaccaaagaaaagaaggaggacgaaaaacactctggggaggaaaaaataattggggttcactactgggatatctttccctctgctagaagatccttcatacataatgaatcacagtttggaaatggagcctttgaaaaaaaatccttacacaactggtaagagagaagtctcataccagccactgaatttttgcagaaatttgggcctccctccgcaagtgtactttcagactcaaattcctccagcatccaggacctcttgattaactatgtactctcaataaagagaaaaagatgagacctctgggaagcaagaattggtagaagctgggcctggtacagtggctcacacctgtcaccccagcactttgggaggccaaggtgggtggatcacttgaggccaggagtttgagaccagcctgggcaacatggcgaagcctatctctactaaaattacaaaaaaactagccaggtatggtggcgtacacctgtaatcccagctacagcaggaggctgaggcacgagaatcacttgaacccaggaggcggaggttacattgagccaagattgtgccactgcactccagcctgggtgacagagagagactctgtcttaaaaaaaaaaaaaagaaaaagatgctgaaatgtatcaaaaccagcctactcgtcatcctcttttaaaagaaaaagatgagtaaaccatcgcattactcattaggatgttaccagatatgtgagttggtcagagggactcctagctacaagtagaaggagtccactctaccattgactgtgtgcaaagtagcacattttatctacctttttaagatactcggccggatgcagtggctcacgcctgtaatcccagcactctggggggctgaggcaggcagatcacctgaggtcaggagttcaagaccatcctggccaacttagtgaaaccctgtctctgctaaaaatacaaaaattagccagatgtcgtggcacgcacctgtagtcccagctacttgggagactgaggcctgagaatcgcttgaacctgggagatggagtttgcagtgagccaagatcatgtcactacactccagcctgggtaagagagtgagactctgtcttaaaaaaaaaaaaaaaaaaaagacactcagtgactctgtgactctacgtatttggatctttccatttatctagtcttgtgctaaactttaaaaatttctgacactttataaaatgtgtgtaaatgtgtactgatataagatcctctacacgattttttattcagaatattcctgtcttcagacatcttcaggaaaccctgttggggttttgtttaggaggattgctttgaatttagattaacttaggaaaaagttataatatttgactgttataatcatttttaggaaaatttgcattttaaatttatagcccaagtgacgtatttgcaacattgaatctaatgatacttatttctctttcattcaaatgtttatgtgcctttaaaacaatacattttttcttcattttgatcctatatatttcatgttaagttattctttattaatgccacttgtaaaagaataaaaatatgtaagatttcttttggtgtaccagttctattgttctcctctaataaagatatataatgtttttgaatgtcgggtccccttttgaaaaatgctacaaaaagtttgtttacactggtgctagtattcaatactaatagagtgggcaataaaatgttcctcagttcctgataatagcctgggtgagagtacacatggcactgaacttagtaatttatcttctacagtcgtgggtgcacacagtgactcttaatagagaacccgctgtggtgctgcctgcagctctgggtcccctgcagccaggtgcaggtatgcagcccagtgcagatgtgcagccctaagccctgtttaaacacatggccacctgctgtaccttctaacctgttttgagttgaggaacagaatgtgtgagcctatgaactcacctctgtggtcatcagctgcttcatcttctcttctgtgttacagatcacagtaacttaatcataacttcctatggagagccagaatattattttactattgattctgaaggggtcttttgttgctgatgtggtttatgcatcagaactttagttgttcttgtgccaaattcgattctgtttgatttttttaaatctccaaagcataaatagtaaggacaactatgatttgtcagtttctgctctgtaacaaatttatcccccaactctgtatgtcactaaagcaaatgcaaactcttcatgttctacctttcactcctccattcagaacttgtactgttatgcgtaagcacagcataattatccctagtagttttatcttttcactctcttccccctagatattttctccttaattaccctaaatgaattgtcattgtctcttgattgctctcataaactactgtcattttctcactttcccttcccctgcaagtagactacacagctctctcattccccagcattctcgttccaatcctaggtcaccccatgtgctggactttgcctccctgtgtcagtagacattgttggtcctttcgccttctcacttctggaagccctgttcttaactcttgtgcctggattgctgtaccaccggtgtatagcagaggtttttcatcacttcatggtctctcgccactttccatttttcttcttcatcctcccaccttatctaaacccctgccttcagttatatatgtggagtgatgccctcatctgtgtctctcatccctcttaactcacccttccactgccttctgaatgtgtcattattcgtctttccaacactttgttcctattacacagcaaaaacttggatcctttctttgagcttacccactctttttgccctatattcagcagccaaatcctgttggtctctgttgcatccattacccagccacctctattcagtatagatatgactgttctaattctggccttttatcactcacctagtcggctaacaacctaattgtgatccctgcctcaggctctgcctcccggatgagccctctcccctctgctccctaggcatcttcccaaggcatagataatgctcagacctctacagctcctaagctgtgtttaccagctctcctgctgctacatagtcgcacagaccatctccagaatgcagcctgttctaggcagcatcctggaccttccatgagttggctccagcaatcttattttcagccaccttctttcataccccttctccatgccatctagagcaaaaggctgccatgataagaactgtaagtgtgccgctggcatccagccacttgagcttggaatccaaggttcaccttcctagctgcatgactccaagcatgttaaatagcctcctttactttttgtagcctcagtttcttcactgaaaccaggattttatttatttatttatttttattgagacggagtcttgctttgtcactcaggctggagtgcagtggcacaatcttggctcactgcaacctccgctgcccgggatcaagtgattctcctgcctcagcctcctgagtagctgggattacaggcacctgccaccatgtccggctaatttttttgtatttttagtagagatggggtttagccatgttggccagcctggtctcaaactcctgacctcaggtgatccacctgccttgacctcccaaagtgctgggattacaggcatgagtcactgcacccgacctattatttatcttattacttaccttataatattatgaagaccaaaaaacaatttttttttttttgagacagaatctccctctgtcgctcaggctggagtgcagtggcacgatcctggctcactgaaatctccgcctcccgagttcaagtgattcttctgcctcagcctcctgagtagctgggattacaggtgtgcgtcaccatgcccagctaattttgtgtatttagtagagatggagtttcaccatattagccaggcttatcctgaactcctgacctcaggtgatccacctgccttggtctcccaaagtgctgggattacaggtgtgagccaccacacctggcccaagaattcttatagaactcttaccacaatccctggtacttagtaagctagaggagcctcaataaatgctagaggatgatgatgttgatctcatcataattatcatccttattaaaatttcgcttggcagaagtgatgctgggtatattacccatataagtgtgatatgcccttgtcactgttcctttgtgcctttctctgcctggactaccaaaatcctaatcacactgtagtccccagctaacatgttaccttctcactggcttaatcacctcccagccaggagagctcttgccctcctttgaactgtcatatcagtttgtctggaccttggatcttatcatataattatctgttctcatgtcccattttctgtatttatgaggcatatagttactgaactccattgaaaatcctttcctctgcttgctggctatatagccctgggtacgttgctatattagtttgctagtgctaccaaaacaaaataccacaaactaggtggcttaaacaacagaaaatttatattctcacatttctagaatctgaaagttcaagatcaaggtgttggcagggttggtttcttctgaggtctctctctttggcttgtagatagccgctttttccctgtgtcttctcttttgtgtcctacatgtctgtgtctcagttttctcttcttgtaacaaaccagttggatgggattacgtcccaccctaaagacctctttttaacttaatttctcttttaaaggccctgtttccaactatagtcacattctgaaatatttgagagttaggacttcaactatgacttttggtagaacacagttcagcccataacagttgctttaatctttctgtgcttcaatttcctcttatgtaaaatctgcaaaaagtacctcttgagtggactgaaaatatgtaatatatgcaaagcaacaccttaataccccataatagatgtttaatgaatattcatgacttctacccttactacttcaagcttcttgagaatgagaataaagcatcttgtgtccttgcagttctaggacaaactttgaattgcttataaatatttggtgaatgaaaaatcaaatagcagaagtgagtctataataattgtatgcatttctctttctctcttagatggatccagatactagatgataactaagatttcaataacaaagagtataccaggaaacatgtagaaaagtcagtgttaccgctgtaaatataatatgccacactgagccagttcagtatggaatattttcccatgtcctacttgccacagactccagtaagtcatagggaaatgatttgtgacaaaattgcacacacacaaaaaaaacagtatcttcacacagccagagctttcaagtgatgagggacgcaaagacattgtgcacaataggtgttcctgtccattgtctgccgattcagctatctttgatctctgcaaaagaggaaccatgggtatggtactgtgaatgcataatagaccaggaattggaagagcggcacgcagtgtgctgctcagtgatcaagtcgtggagagacccagacaccatgcatctgatgataagcatcttctcttggtgccttggagtctctcatttccttccagttcgactccaaagggcctgtttcatcttcagcacctttacaatgtgccactttgagtctgtaggttctttctttcagaggccaccacagataatgggtacatcattatgttttcttgatatcactacattctttcttccccgtgcatctgcctcctgcagctctctgaagtggatttgactcctcatcatccctagtgataactaactctgctttaaaagaattgttatctgttggttggcttggagtcagggagttgagtgtaagttcttgttttattgtatataatgctagcaacttttaccagtgttagtaaagataagagataataagacaattccgtacctaagaattgtaccctttcataacagcaccacttggatatgtagaaagagtttgttgtgagatcagatgtaaaacaaataaaagttattcgtgaaatgatatggaagactgggattagaaactgtggcattcaagaagccagttaagctgattctcagaattgacagagattctagagatggtgtagtgcagatggtgtagtgcagggattctcagcctcactgcacatggtaatctcataggaaaattttagcaaggacagatgcagaaattcttattaaactgtcaggactgaagtccagaggtcactatattttaaaaaggtctgcaagtgattgtaacatgcatctatggaggaaaacatcagcgtaggagaaaaagggaaagaaaccaactggagtaaaggctctgtcttgagcactgtgctggctcctgtacattctccatctctttttatcttcatagtaagtgagatggtttgacaaatagggagaccgaagctctgccttcatgtgggacactcaactgcctccttccctgctgttggcagtgcttggatgaatatgcattgtatgcctcttctctcttccaagaagactggtttctctgattactttgcattttaccctggatagagatggtcttaccctcttttgagcttcaaaaaatcaggcttcaggctaattccaacctggtgaatctttctcagcaattctacccccataaaacaatctttacattttaaatttctattcatttttctaactattcataagattttcgtatgaagagttctggttcagaaacacagagaaaatccttaccgtgcctctcacatggttacttggttaggtgtgtttcaactcatcattctgccaaccgtaaatagctgagtccatatcacatgggaaatgtaggtgcaaattcacaaaacactcacgggctgtaaacaaccagggagttgttcttctcatggacctgcaggttgcagcagcagcatctgagcaaaacagagctgttctgagcagtagggcggggagcagcacgtctttgtgtggaccagaatgcaccagcctgtgggtgtatcatctcacactctacttcctagactaaggccctttcttgggcctttcagtgaatccaacccaggttggtattttgtgttgtcccccaacccaaacaaaaaattcatttgcacttaaggaagaacaagagtgacttgattaaggtatcaagttggtaaaaatggaaaaacaatttgatttagagagttaatgaacgaacatctttctttgattcttttcattaacattacacatattaggtaaactgtgtataggtgtttatttttctttatggaagtcacacatgatctatatagaaaaaatttcaaatacatcaaaaaaaaaaaaggaaaagaaagatacttgtaatcccaccacttcagaagcaccactttggtgtatttcttccacatggtggtaggggatggcagggggaaatgtgtaccagtattttaaacatatgagcatttttacttaaaagtatatattgaacatttttcactgttgactgcatagtatctccatgcatgaacatactcaagttcatttaacccatcccttaccattagatatttatgttgtttctaatttttctttccagcttttataaataatacttcaaaggccatccttgtagctagttctaattagtacagtatagtttggatgatataaaaatttcatatatgtgtgacaaggaataacaagttgaagtacagtaagaaagaatgtaattgcttgtgataaatataggcttagcttcaaaatagctagcttaaaatttcccttatagtgtactttaaagatttcactgatgatcttggaggtgaggcatctagccattgctggaatgaaataacacacgatgttcaaagtttggttggtaattgacttagtgcatatttttgctactttcatataccacttatctcatatgaaaagagcaattctgtacacaagtaatacataaacaaaaattttaagaatatgtaactccataaaatgagatttgatgattgacttgagtttctaagagaaaaaaataataactttcatctaagtttacgtgttcgctggcagtttttgaatcgttgccagaatcatgaaattcatcattcaagagcctttgtcctcctagtccccgttctgttctgtgtctcctcatttggatacgttctgtgtctcctcatttggatacgttctgtgtctcctcatttggatacgaatgcttttcattttattactgcctttgtgcccttggctttgagtcctgtggtggcagttgtttgtgcttcaaggagcatttgtaatttcagtgtgaggacttggggaggtcaacagaaatctctggtctttgccctccttcagcctccacattaaggacatagggcttcttcctaggcagtaactgtattttgattcatacttgtaatccctaaccgttttgattgatgggacaagggctgaaactacattctcttgaggatagaatatttttatccttgagaataatcattcatctcttcctgacccaccttaccatttctttgctttgatcctaaatcttttttgttctttttaggctggaggctcccaggtgattttcacaaatcctttagaaatcgtcaagatccgtttgcaagtggcaggagaaatcaccactggtcctcgagtcagtgctctgtctgtcgtgcgggacctggggttttttgggatctacaaggtaacttttttttttttttagtcatttatttgattactttctcatctcctaatgcagaaactattcttcaacatgaaatccatttttttttgcatttctacacctggagaagatgttctacccaagctgcagaggcaccttcatgccaattagaaggaggtgccccttcctgccatctgccaaaaaactatcctcatcaatacacaaatctaggatgactatgataggaatcgtgccctctagagttgttcagtgcagctctttgcagcaacactggctagaattttatttggatttgttattgatacgctgagttcagttcaaggagaaacctgtatcataatttattttctgatcctatgcatatggtccgatccatgttttctctatatatgtatgccttgtcttaattattataaatcttaatcatttttcatttagaaaatgttttttcagaatgattacaaaaccaaacttctagatgattcttgaaattttttattcatactgctctaccaaaaagttataatggaatttactagaactgtctgcctatatgccaacctataaggctttatcaaacataatgtatacacaagttttcaatgaagaattttttaaaaaaacattttacgctagcttgactaagtaaacctttagggatatgggagaaaaataaaatgtctacttaagatagtttcatttatttacacagaaatgtatacagtcacattatataaaattaatactgctttgtttctataaacacatatcaagaaatattaaaattattcatgaattttgaatcagcatcttgagctccatttaacccactttttaggtcatctgttagcatggttttgcagaatacattgtcttcatttttatcccaagctttgtaatttgaagcatttttgacttttatgtatgatattgttcctgcaaattttatcccatagacacataatattaagacagtcaattgcttttttcctattcccagttaatcctgaatggatataactggtccccataatgtaacaacttaccatattgctagagtaaacttgaaatgacttgttttgacatttgacacagtatttgtgagatcctcctcccagaaatacttttttactctttttctttctaacctgagttttgcaagtgacctcagtaaacatccagaattagtaataattgtggctgtctcaggagaatctcccttccccgaatggtactctgcttctccaggtcaagtgattggaaagagtactccatgatctgagactttgtgaagattgaatataaagtgatgccctcttttctgggattaattttagcaggggaaaattttgccttatatttaggcatatgtggtacttaggaataaacctgctgtttttttaagtagaacttaaaatgctcaatctgtgattctacaatataacacaatgttctatagctattttgcttaccaatttattacccagctgtaaaaaataaacactgttgtcatgaggcatagcattgatcaatttgaagaaaaatcatcttttctaaatttttaggctcttgcagtctgtaatatgatgtagcagcatgtcattttgacaagatgccaggagtctttcaatgggttgtctggtaaaaagcacttaggtactgtggcagtgactgttattgaaatgtctagatgagtaaaatggtaggaacttgtttgctgatacagaaacagagactgttaaactacctgcaaatgatacaatactgggacttagtgcttttcatcttcacattatttaataatcttaatcccctttaacacttcttggaagtagttggtatcctggttttgtagttcaggtgaatagaggctgccaaccatggtatctgagctgaaattgaggctcagaagtttcttgtttccacttttgtgctaaaattgctttcctgaaatgagcaggattgctcaagtttgagcaagagaactctcccatatgaagttagtttaattactagtctagtagtttaatctagttcagaagcattccacagggcttggtgctcccttctaaaatgctgtttttggtgtactggtaattaccaagaaaatcagtaatgctttgagcttctggaaccttgattttgttgcaagaaagtgacctagtaatctctatcttcctgttggtcatcagtatcagctacattcagagacccgggagtcaggatttcattcagcagatgttgacctctgtggtttggtctcctttcagtctgattagctcttgtattacaagtctggttggtcctcatttatatattcccagcattctgtcttgggctttgtttcatgtgaacctctcttctccagccccaccccacttcacctttacgtggtcagacatcacagcaggttaagatccatctttctagggagcatcacagcattagcattgctttgtagtttaatgtgtttttgtttcaggatagcactttttagtaataaagcttttctgtttctagtcctggttggctagaaaaatgcaaatgactaggggtgacctcacacagtacttttaaacctggtatgtgtccctccaggtgggtctttaaaaagaagaaccactgtcctagatttagttgagacaggtaatctttctccttccctctgttcttttgtttctgttgttaacattacaatgccagacccaagaagggtgagtggttggctctgtctgtgtgtttaggcctgctgagctttaaccttacctaaattggaaaatcaggctttctgtttttcttctgtattgacttgcaaaataagcaaactattctgacttcccagtaagtggcaattagaatacttgttttagaaatacatttgcaactgaaaaaaagtggaaaatggtaaacattttgcattcctaaagtaagaaatagtttagcacaaatatagtaaacaatgtaaataaagcccccctctaaaatgctaacatttagagagatttagttatagcacagaggatgtaggtgactgaagtgaaggcagcataattaattgcctttgaaagagctatttgaatgtaatgtagctaagaaaacaaatctgcaatgtctacttctttttaaaaagaattatgagaatgtatttccctttccctgcataacttctgttttattgcataaacccctggagcataaaaataaaagtcaaataaacttaacatagcaaaaaaagttgtatccatctacttttgaacattaccttttccgtaggagctgtcagagcgttaatgaggggacaaattatactttaggaatggaatgaaacttatcatttaacagtaaatggcagcacagctaattaggccaaaaagacgcttcgttaggaagcagtggaactgtccatgtctctttttgagtacaaaacatggtcagtgaagcaatgacagctgggatccatcaagcactgttgaaaagttttcaaattctataatcacaaattaaaccttgattctaccttggagggtcacttaggaatatggactctgtctgctgtgttctaatcaaaggcgttgtttttttccactgcatttgacagtattcaaagatatttttatccatatacataaatgttgtatacatgtgttcatctataatgtgtgtataaatgattcattggagctattgttcataaactcagaaagcaagttatgatatatcagtacattcttatttattctgccagttatctcaaagagagattgatttttttagtttaaaaagtaaaatataatttatatttcaaaaaaatcaagtaatttagaaaggtgtatgaagaaaagtaaaattatctctctaccctttactgctccattctcttcaaaggatagccactgctgaagattttatattaatatatccttaaaaaaagaaaaactttctgctcagattagtatttctctttcaaaaattttacgaatatcagcatcagaaaagtatgtatgttttccatagcaaagacatagaatcaccctaggttaccattaacaggagattggataaggaaaatgtggaaactacacacaatggagtactagacaaccataaaaaagaactaaattatatcctttgcagcaacatggatgcagctgcaggccactatcctaagcaaatcaatgcagaaacagaaaaccagatatcacattttcacttgtaagttggagctgaaccttgggtacacatgagcacaaagacaccaacaggaggaagggaaagaggaaaggaggaaagggctgaaaagcttcctttcaggtactctgctcagtacctagctgacaggattaatagaagcccaagcctcagcatcatgcaatatatccttgtaacaaacctgtatgtgtaccccctgaatctaaaattaaaatgaaaggagaatattttacttttcttaagtaaaattgtgttttaacacaaatagaatcttttcaaacacaatatatcttaaagctctttcctcattttatttaataactatggaaatttttttgtttaactgtttgctgttgatgaatatgtttctagtttgaagatatatcaagcaatgccatggtgatcatccctatgtatattttgacatacttttgtgattgcttagaaaagataaattcctagcattgaagttgttaggtcaaaggacatgtgcactttttagtgttaatagattttatccagtttttttcagtttatcccttttttcttggtaacatataagtactcataagattaattcttcagtttatcatcttttaaaaacttgtatttttacgtgctcacagccggacctgaaggaagcagttgtttagtctactttgagaacacattgccattctagttttctgatacccagggacatgctgtggttttacaaccagcctagtggtagttctcacccatccatttctacttttatccttcatctgagcatctgtgaaagcctcttcagggctttctttattttgtctcttgactctcctaaatccactgttgccacagcagccaaagtgatccatttaaaatgtaaatcatattaattcactcactcaacacactcattgagagcttactgtgtgccaggcactgttccagcctttaggagatggctgtttaaagccaagtccctgctcacagtatattgggtaggacagggcagctatcaagagaacaaagatatggccgagcatggtgccttacgtctgtaatctcagtatttcaggaggccagggcaatctcttaatgccaggaattcaagactagcctaggcagcatagcaagacaccatccctccaaaaataaataaatataagttagcggggcatggtggtacacatctgtagtcccagctacttgggaggctgaggcaggagaatcacttgaacccaggagttcgaggctgcggtgagctatatgattgcaccaccacactctagccctagcaacagagtgagatgctgtgtctaaaaaaaaaaaaaaaaaagaaagaaaaaagaaaggaatgcgcaaaattaatatgacatcagctggtgctaccgtgaagaaaaagaagctgattttaaaaatgagcaaaggactagaatagatatttctccaaagaggacataccaatggccaacacgtatgtatgtgaaaaaaggatgtaaaaaattttcaacatcactaatcatcagggaaatgcaaatcataactacaatgagatagcacttcatacctgttaggatagctattagcaaaaaaaaaaaaaaacaaaagataagcaatggtgaggttgtggagaaattgaaatctttggtggtaggccaggcgcggtgcctgacgcctgtaatcccagcactgtgggagaccgatgcgggcagatcacgaggtcaggagatcaagaccatcctggctaacatggtgaaaccccatctctactaaaagtacaaaaaattagccgggtatggtggacgtgcctatagttccagctacttgggagactgaggcaggagaatcacttgaacccgggaggtggaggttgcagtgagctgagattgtgccactgcactccagcctgggtgacagagggagactccgtctcaaaaaaaaaaaaaaaaaaaaaaaaaggagatccttggtggtagaaatgtaaagtggtacagtctctgtggaaaacagtatggagttttctcaaaaagttaaaatagaactactatatgatccagcaatcccccttctgggtgtacatccaaaagaatggaaatcaggccgggcgcggtggctcacgcctgtaatcccagcactttgggaggccgaggcgggcggatcacgaggtcaggagatcgagaccatcccggctaaaacggtgaaaccccgtctctactaaaactacaaaaaattagccgggcgtagtggcgggcgcctgtagtcccagctacttgggaggctgaggcaggagaatggcgtgaacccgggaggcggagcttgcagtgagccgagatcccgccactgcactccagcctgggcgacagagcgagactccgtctcaaaaaaaaaaaaaaaaaaaaaaaaaaaaaaagaatggaaatcagatatctgaaggagatgactaccaggttcattgcaacattattacaatagacaagctatgaaataacccaaatgtctatcaacaaaggaatgcataaagaaaatatggtatattatagccttaaaaaggaaggatatcctgcttttgcaatgagatggataagtctggaagacattatattaagtgaaacaaggcagtcacagaacttcaaatactgcatgattctattcatatgaggtgtctaagtgtacatattcttgatgtatgagagagagtgactgagtcttttcacaaatataccaacatcaaaaattgaaataagtaaataaataaataaaaatgttgtgccttactcctgatggacttttattctctcatttaaggaaggatttttagaaatttaaggagagggtatcaagtatacctcaaggagtcaggttttgtatctaatatgtgtgaacatttgaaaaatactacaggtcatgtaatgtccataatctctgcttaaagcttgtattaaacaaaaactggaaaaaaaaagaacttttaaaaaataatttcaaattttattttacattggagggaacatgtgcgggtttgttgcacaggtatattgcatgatgctgggatttgggatatgaatgattcagttacccaggtagtgagcatagtacccaatacttagtttgaaaaaaaaatttttctttttacgaaacttcccctgtgcttcagatgaatcattgactcgtgtgtagaaagaggataataatcatacctacctattcatagtatcgttgtgtggatttactaaaataatgcatgtaaagcatacaggatagagttgagcacatagtacacatgatgtgttagttgttatcaacttttcattattgagtgtcaactaagggattcttgcaggaatacctagtttcttccacattattccagtcctgggtaatttccaatgctgtgtggtcaacaacctctccaggccaggtcttctgctttgaactttagaatagcaaattaaaaggagatggcttgaaaaatattatttttataaaacaatgcccagaggaattgagtgtgctaaagacaccagaaaaaaaggattccttaaagtaacagcaaatgatcaatttttttaaccattcttttattctttcaccaaatgtatattgaatgctaacactattagatgctagagtaccaaagatgtgtacagtatcattgccttaaaaatgatctatgttaaggggcaagagaagagaaacatataattctagtgccagcactttgggagtgcaggagttcaagaccagcctgggcaacatagtgagacctcatctctacacaaaaatatttttttaattagctagacatggtgtcatgcacctgtagtcccagctacttgggaggctgaggggggaagagcacttgagcccagggggtcaaggctgcagtgagccatgattgcaccactgcactctaacctaagtgatagagcaagactctgtttcaaaaaaaaaaaaaaagaaaaagaaaaaaatgcaacaaattgcaggtgtaggataattgaaaataatccagactagacacatcagaggaaaactgctgaacaccagagctagagagaagctctttagtggccagagaaaaaaagtcaatttgccttcaaaggggcaacagttgaactgacggctaacctaaaaatggcaacagtggaagccagaagacagttgaatggggtgtcttcagtatgtggaggaaaaaaacttttcaacctagacttgtataccctgtaaaaattgcttttaagaacaagggtaaagatattttttagactagcaaaactcagaaagtgtgtcaccagtagaaccttaatgaaggaaattctggaaggtgatcccaggtggagatgtgtcaggaatgaatagcaaaaaaagtggtaaatgtttagtcttgttaaaagtaaaacttcagccaaagtaagggagtttaattgtacaatgaatgattcgtgaatcaggcagcccccagaatcacagcagagagtgctgaggcgggcagatcacaaggtcaaaaggtcaggaccatcctggccaacatgttgaaaccccatctctactaaaaatacaaaaatttgctgggcatggtggcgcacgcctgtagtcccagctacttgggaggctgagacaggagaattgcttgaaccagaggtggaggttgcagtgagccaagattgcaccactgcactccagcactgtctcaaaaaataataataataaagaaataaagaaaaggtggaacatgttttacagatgagctttgtgaaggtgacatgactagcagcttcaggactaaaattccatgtgataacattcctctgtaccatgtctaggattttcagtccatctcagtgatgagcattgttgatggcaaagcagtgtacaatactagaacaatagagaactagcactgacccaagcagcatttcctacaagaaacagagttgtcaagatgattttgttagaattgcaatgaaattaaggagaacccatatccctaaagtccctggattaaagaagccaagtaatagtcattcatatttcatattcaaattgaagtaatttccatgttcactgatatcaagtcttcaaatgttggctggcttatttggttttaacacaagtgacacaatcacataataggtcttggcaccattgctatttctcagcaagacactcaaactcaccctcctcaaatctcagccatgtaggtggggtctaaccatcctttgactgggctggagaggcactgccaagctgtgtatctaagggttaacttgcttgggggaagccaagaggaatgctaagggatcaagtcatgacatgctgcccattgtttgtagctctgggatcaaaatatataattatacatgccaaataaattctaaacctgtaaggtaggaaaagagggctgggtggctctgacgacaggtgccagaagcattgaataaccttctcagacaaggtgcaccactgttgtcttgaatgctgcagggtccccagtctggcattttccccgtgctagacaatgtgcattcactgctggagtctctgttaagcctccgtctcccagacctgctggctcctggtgcccggcccgacacagaggtgcctttgtgagtgtaattacctttccctgtattagaaatagtctgtttagagctgtgtttgcaggtacagctagaataagcaggaattagcatgcaaaaagacctgccctggccctgacttctttatcagcaccatccttcaggactggttttttccccactttggattgattgggcaggtgatttaccatccaagatgaagagttttaaaagaagaaaaagagacatcggaaattgctgtgcatgtgcaacagcatgcgtgcgagagaaagagagatacaaatcctgttgtgttatatctattgacagtttcataccaggcagagctggcaaaataaacttgagtggacgatcctagcaacttgagaattgattaaagcttccttgggctttcagcacagtgtccacatcaaaaaggcatgagaagcaaaataaatgattcttttgccatgatatgctgccgccagaatctctaagcctatctaattggcctgtgtcaattgtggactattaatttgaagttaagtgaggcctacccttaaagaagcttttctagatcttaaataggatgatgatggagagactttggcatgatatagaattggaatggaggcagagttgataattaaactagatctgagggttttttcccagtttataacgtaggtctaccctgagatgatttttgttgtccctgtctggatattagtgtgccttttatttaaaaagaaaaacccaatagtttatcatctttagagagattagatgattgtattttgcatttattaattttccccaactgattatagtatatactgaggaaattcaggaccaatcagagaatgtttaagggcagagctgcctagaaaaccagtttaaaaaaaaaaaaaaaaaaaaccaaagcaggaaaatgtggggattttcttatatggcaggaatgtttaaatatttttttttaagtggcacacctttgtaacttattaattctcaaatggccaaagtaatatttttgtgttgctgatgcaggctctagggcagcatggaatgtttccctttgttataaagttgccttttcagaatggctgatctcttggtaaaaattatacatggaacaagtagaattcaagtcaaacaggtttatgttttgctgtagtactggagaatgggtgttcaccacaaagtgaaggatttatcaaggaatctgggagagaaacattttcccccttagaactttaagtctttttaacatcctgcttcccttttcattgtgcaagagcaacaggtcaggtattgcctaaggcagtcttacaaattggcacctgcctttatgcctaagacctaaaggaagtggtggggaaaaagaggccagggaaatttaataagtctctgtctttccttgggaattgggctttgatgcctggggtgcaagagaggtgaagggccgcctcctgacgcaactgggagaggtattttctgcagggagacaccagagaaggtgctaggagaggcagggagacacagccctcaggtgaacacatttgtgtcctttaatgtttgtaatgcagtggataccttacaaggactttcacacatattacttcattcattcctaaagtttcagttgtcccagtcacctgaagaagatggcctttggtatttttgacaggtgaggaagcttaagagcttgatttctacaggtgctcatcacatggctaggggtgacaggatgatcacaccaggtggaagttcttttgcttccttgacttttccatttcttcctttttctcaggtaatcagacaccaaagacttcttgcatatcctaacatttgttctagtctgcataaacactttgaccacattgcttgattcctggaaaacgaaatacaacccatttctaggcatttttcctttagtgttgcaattctaccctttcctcagggttatatatatatatatatataaaattgtttgtatgtttggtttttaatcaagccatttctcatctcagccatgtagagttgttttccagcatctcttgaagtacatctcacatctcttgtagatgccattgtaacagggatacatgatttactgtcatgatttcaggaaaggaagaagaaggaggttctcagaaggtggaacactcagtgggtccttcttcagaagacccaactgattcttcatgtgcctttactcttcctgtgcctcagggatgtttataatttcgagtcatgtcttcccatggccttctgatcatactgaagccacatagcataagacaggttaatctgcttctctttctcccctcgccccctttttttaaactttaatgtttcaatacaaaattagtgactgtttcctcctacgttttgttacattcccaacaaataatatgtctttgtttgaaaagctaaaagtggccaggcgcagtggctcaatgcctgtaatcccagcactttgggaggccaaggtgggtggatcacctgagatcaggagttggagaccagcctgcccaacgtggtgaaaccccgtctctactaaaaatacaaaaaactagctgggcgtggtggcaggcacctgtagtcccagctactcaggaggccaggaggctgaagtaacagaatcgtgaacccgggaggtggaggttgcagtgagctgagatcatgccactgcattccagcctgggcaacctgggcaacaaagtgaaactccatatcaaaaaaaaaaaacaacaaatgaaagaaaagctaaaagcttggttttagtttctgatatgtttttccaagaaataatgttttttaatttttattttttatttatttatgttttttattaagatggagtcttactctgttgccctggctggaatgcagtggcatgatctcagctcactacaacctccacctccgggttcaagcgattcttctgcctcagtctcccgagtagctgggattaaagtgatcttcatttgagttgattatttgatgtctaatttgagtatcttctggactgaatctacatgtggatgaatagctagcagcacttacaagaaggcttggggcaaaaagggaaaaggaaggaaaaacagaaactaaacgctgatattgttagccttatacaataacagcccgaattataactttttaaaaaactagttgtaagaaaaggattggatgttacacacagttattaacattatactgtatgttttccctttgaaagagctgggagaagtggaaaaaactcttagagtattgagttttggacttgtctctggaactacctccagggtgccctctgaacaagccaagggcatagccctcggtaaatgcacaattgatagattacccatccaggacgatagattacctgtccaggacgttagtttgtacgtgcctaaaatgactagcttgggtgtggtggatattgtgattcttaattagacatctaacactttgggggtggacaagatacagaagcctgagccggttggcagtacatgaggtagatgagtgcttctctgaatacctgtatacacagagtgaacagaggcatgcttacacatccatgggtaagttgactgaggaagagccaacatgacagaatccagattccaagcatttgttctggttggcaggatgagccaaactaggatgcaacttaataggattaaatctgatgtcctgcctgtgttacttgtgtgaggcaactaattaagttatagtagacttgagttaatagtaattcatatgaaaaagactaagggttttattacccacaagctcagtttgagtcaggagtgaaatgtgcgtgtcaggaaaacaaaggctatagtaacagatacatagtgttaaataactttgacagtttggagcatcagacagaaatacccaagatccagcattactaggcctcaataagtgtcactgggtgtggctagatctgttgactctggctggattcattattttcttttgggaatctctgtatttggtggaaatttttagttattagaaatctgttaaagaaatggtattaaatcattacatgttgaaaagtgatgatttccttcctattcaccctacccaaaacacaatatatgtgttgtggttttcatcataatatatcatatttctgggcactcatcaattcgcggggcctctgcatggcattatgttggcaacagaaactatttgttgaagactttgctgtaggaactgattgttctacacacagctttaaaatgtatccgaattattgtgaatatttcaggctttagagcaggcatttatcaatgtttcataaaccctgggtggcaggtaagtaagtatataataaaattagaaggatccatgaaccccctgaaaagatataattttttatgtatgtgtaatttctttctgggaaacagtccaaacgtacaaaaagcaaaccccttttccccccacctgtataatttgtctacttcctagtgtgtaaacaaagaggcatcttgactgccgttacccgtctttggtgagaccagagaacagatcttccttgaaatgccagtggcttgccaccagtagggatttaaaaggatgtcacaggcagagttccaaaaaggttttaattgaagtcttagcattagaataaatgagaactgccctcctcccatcacagcacacaacaaaactagtttttgttttaaaaacaaagtttagatttattacttgcagaatttgggttatttttttctgttcccctttcaatgtgtgagtacaaatttggtcttctccaggaatattttgttctgaggtgagttccagagaagcttgatctcctcaatgggatatgtgtttcatgtggtttttcttcctttgcaaatgtgcagggtgccaaagcatgctttctgcgggacattcctttctcggccatctactttccgtgctatgctcatgtgaaggcttcctttgcaaatgaagatgggcaggttagcccaggaagcctgctcttagctggtgccatagctggtgagtgtcccccatggagttctcttacttccctgacccttgctgccccccttccctagctgcatgctactacattgaaatttttttgctgatagttcttgacagggtatgtgtgagtttgctagagattgaagagctactgaaaaaaaagggaaaaaattaatcttcattctggcagatgagattattagacaagcttaatttcttaactctagaaaaggctcattaaatattggcttattttgtggtattgtggaactccaattcaagttccatatcatttcatagtctcacttcacagcataagaataactgtttagctggaagtttttaaagatttgaataggtttgtcttaaagatgtctaaaaaaaatagtgcataaaagcctgtccagaacttaaacaatagttagagaaaagaaatgtagtagaaccagaaaagacctgggccaattagagacacctgtttcctccctgtgttacggggggatggtggtaattaaatcacagatggaaataactatcttctttttttcagtgctccattgaaaacatcgatagaaaataattaaccatgccagggatcagttcattttttgatgctgcttcttttcaagggtccctaagagcaggaacagtctggattagctctccaagtggtgacatttaataagttaacaaaccctaaggcggtcacaggatgcctggatccaaacatttttgatacctgtgctattctcatcagatatgtaactagagtctccatgcttttctcaaagatagcataagaacaactcccagctttgagaagttgtttgctgttttgtgcacaccccacctaccctggctgcagcctggggaacccctggatgcaggaacctgtgtagctcctccttaattcttagttaatccttttccttcaaaggcagtgatattggtatataaggcagggctactgtttcctggctgcttagaaacctcagttgtattagcagcagtgataccactgtatctagagcaagagatcatgatttcaggagttgagtataaaattcccaattttaattccagcttgactcatggtggcctatatgtaatttctcatatatctgtaaatgagaaaatgttttgaaccaaagggttataatttatttcaaattatttacttgaaataaggtaggacctaatgagaataactgagtaccacttattaatgtgtgaccttgggcaagttacttcacttcttgtaagctttggtttcctcagctataaatggagatcacaactgcacctgctacagagtgtgtgtgaggctcaaatgagaggatccatgtgaaagacttggcatagttcttagcatacagtaaatgctcaataaacattagccaagtattacattgaatccaaaagaatctgtctgtaaatcactccaaaaaataagttgtgaaattagaagttaagtagtagagctcagatcaaggtctaggactctttcctaagcctcactttcctcacaccataaaaataccatctttaactcttttcttggagaagacaggtacccagaaacgattctgtctctgtggaggtaatccattctaccagagctatagaaatgactggtgagattttttttcatttaaggtttatttttctccttttttaaatgattttgaaactaatattactcattataaaatatttgaaaagtactagaacaggcaaataacaaaaatattattcattatttcactactctaagataattgctatttaacatttttactcatttttcctattcaggtttttcacagagctgtaatcacactttgtatagatagttttcacttaaggttgtgtcttaagcattgttacccatcatggcaaagtagttaatgacatgtgcctgtggggtcagactaccaatgttcaaattccagtgtttccaccctgtgtgaaccacacacattattcattccctctctgccatttctccatctgtatttggagataagaatagtcttaccttacaagattattatgagaattaagtgaattaatagatgaaaagattaaaatagtgcctgatatatagtaagtattcaaaaatgttccataatagtaattttattacatattatttaaaactttccgaacatagtttctaattgctgcatcttatgtatttctcaattttagatactttaattttttccaaaaaattttaaatagctagtagtatgctttttcccctatgttgaatcagttatttttttttaagagaaatagattatctgaagtgagtttgttggtaaaaagcatggttgtttttcggtcattgacccattattcttgagagttttaagtagttggcatccctgtggtgatgttagttcagccctcttgccatcctgttgtctttataaatgccttctgtatttgttatctattactgcatgccaaattccctcaaaacttaatcagcttaacacaactaatatttattttctcacagtttctgtgagtcaggaaacaggtgtggggtagaagcagctcactgggtgcctctggcaccaggtctatcatgaagttgcagtcacagtagcagccaggcttgactgacattggagaagccactttcaagatggctcaatgacatagctgttgacaggaggcctcagttccttgtcatgtgggcctctccattggtcaacttggataccctcacaacatggcagtagattccccagagcaaagtctgagagagagagagagagagagagagagagagagagagagagagcaagcaaggcagaagctgcagtgtcttctatgacttcacctcaagatgatagagaagcagaggcgtgaatgtcacaagggtgcagatctttgagggccattttgggaactggctgcctcacttactatagagcattgacttttattattattattattattattattattattattattattattatactttaagttctgggatacatgtgcagaatgcgcaggtttgttacatagttatacaagtgccatggtggtttgctgcacccatcaagccatcatctaggttttaagccccgcatgcattaggtatttgtcctaaagagcattgactttcctattattatccaccttcctcctgatcccccgtttctggtaaaatgggaaaataccgagtttgccctgttgattttagtcttcaaagagtgaataagctacaaagcttgatggtctttgtgtattctacaaaactataaaaactgtgtaatgcgaagtaagctactttcttaatttaataacagatatcagaagccagtggtcaatgtcatagttaccattccaattaaagttaggaataagacaaggatgtctctctcatctttgttattcagccatattttggaggttccagtcagcatggtaaaataaagtaaaaggcataaataaaagaagaaaggaagcagtcattatttataaatgattatttacctgaaaatcaaaattaaaatgtctaagaagtatattagaattaggaaaaaagattagtaatgcattttgttataaaataaacataaaaaatctatatccagtgagcaggagtgatgtcatggggtgagcagggctgagtgtggaaccttgctgagatgctcaggcagagctgagttcagtgtggagaagggcaagacttttgtcagaagtgtgccccgtgcaaccccaagaagggcagtgagcaagcacaaatgtgcactaatcctgaatgggctgttgggtggaggacggatcaggcccccacattccctttgtggttgccaagaagagcaaaggcatttcttagggagaggatacatggtattcagagaatcccagaaagtatttaataggagaaaagcttctttcaaaatacaaaaatcctcctttttagatggagtttcaggcaactacaatgaataattgttggcctctaacttataaaacaaaaatgtctcatggctatttttatatgtaccatatttaaattgatcacttatacataaaatattttttgctgaacatcagcctattataaataatatggacctgtgattaaatgaatatgaccacgctttctatgtttagataataatttcaattattcagtaatgttatctcactgttttctttccaaaaatttgattagccttgaggttagattgttttagtaatatgtagctttttagcaaaagtggttattggtatcctcacctagagaatgttgggttttggtgtttttgtttttgttttgttcatgtatctagttataaactgggactatatttaaatactggaacatctactccgttatttcacaagatagaacaagactaaccaatatttgaattcatgttcattggccaaagtacatcagctttgtcagaaagtgaagaccgaagcgggggtcctgaaattaagaaatcaaattctaattatctataattaacatggtgctttatcattaatgaagggcatttcaatacaccttgtgaatgatatcaaataaaatatatctaatactcaaattttatagaatgctctatcataccagatgatttttatcagagtgataagatagaggaacaagtcaaactgtaatgatggtctcacctttgaattaattagcttgagattaagttgtaatacagaaatacctttaaaagctgttccagtacacagaagtggaagtgtgttatacatgtgtgatcatgatgcttttgcaaacattagattgtgtattatgagaaaactactgttggtacaaatttgttaattatgtggacataaagcttaagttataatagtttaaaaccagtccttaaacccttaaaaaaagtaatgaagaaattgaatcaagacaatagactgagcatattcatccatctctcctgtcttcccaaataccttaaaatgtcaggaaatgcatttttaaaaaattctttattggcactagaaaatgctaatctggccctcagcagaaaggaaatagccatattgactctgaaactggactgagagatgccccagtccaaaacacagcaggagaaactacctctaatgcaagggctgaactggagaatgttaacctttgagtgaagaatagaatgcctggggtggaggtggaggttttagggtaaatcattaacatgagttaggcaactatactttcttcaggattgccaggcttggagctctctcctggttttcatatggagcttcaggagacagttgtatccaagttaaaagctcagagctcaattttaaagaaagagaccacttccctagagaggataagtgtaaggaatggacagaaagtagggcaggacttaaggtaattcaagacttctaccacagatgcaggaaaaaataaagtgatggcagcttttcccaagaagaattaaggatttaaaataaattcttctacccccaaagtgaagttccctacatttcagcagttcggagggtccacaccctgccagcatatcctaaccccttgcacccagttacacaaagcccatagaccctcccattcaggagagagacctgtgggtgaagcatacctagaatatggtagaagtcacccacaacatttgtatataatactaatcagcctatcctttgaacttgaataatatcaatagacaaccagagatccccagccatgaaggagcaacaaagtaagtgaacagaagaattagagagaaaacaggcaattcaggggacagaagacaacttttaagaactataattaattaatataattaattagagtcctcagagagatttgaaagaaataatcagtaaagaagctttcttgaaaagtaatagaagaactgccataattaaatatcaagcgttagttctgaatgatataatggatatgatcaaagaccaaatttagacatgtggaaaataaagacatgcaaaaaaaaaaaaacccctctagaatgtaatgtgtagcaataatatagagatagaaaaggagagaaaatttaagatacaggtagaattaatcttggaaatctaacatctgtttcataggagttccctagggaaaagtaataaggaaaaggagaatagaaaatgaatcaatagaagattgacttctcatcttcttatctgtaatactggatactttcaaaatcccaaggaaaggatgtcttgagtcgtaattatgttcctgggcacactaacactcaggagggggaaggcaaaactaaagttagtttttcacatgcaaggactcaaagctttcttccccacagaccttctctgaagcaattaaaaagtgaatttaagggcccagcacagtagctcatgcctgtaattccagcactttgggaggccaaggtgggcggattacctgaggtcaggagttcgagaccagcctggtcaacatggtgaaaccctgtctctactactaaaaatacaaaaaatagccgggcgtgctggtgcacacctgtaatcccagctactcaggaggctgaggcaggagaatcacttgagcctgggaggcggaggttgcagtgagccaagatcgtgcgcagccccagcctgggcatcaagagcaaaactcagtctcaaaaaaaaaaagtgaattaagaaggaggaaaatgtaggatatatgaaacagcaaatagaagttaaacctgtggtaggtctccattattgctgactttggtatatgtattcatgcaagaatggttggtttttgggagactgacaaatgaaaggaaggacaaaagtgccagtgcgccaaagtcctccccttgctggaggatgcaaatgctaattaattgcacctgttgtaaatgtacacctatataacaaatgcatgtaacgtttaaatatatttagtcagggaagtggtggggatcaaaagggaaataactggaagcagagaaaatagcataatataggatggcagaaataagtctagtagtcacaagcactgtaaatgaattcagtacccctagtaataacaaacactttaagatgagttttgaaagaaaatctagtcatatgaagtttcataaaacagtgacatagaaagattgaaagacagctgattgaaaaatatgtaccaggcaaatatcaacaataagcaagtagcaatattaatgccatactgaatggaattcaaggttttaaatagcgttcagaagcacacaggcatattttataaaagataaaattcactatgaagacgccatcaatttctatgtaatatcaatgtataatgtcatctctcagcttcaaagtatgaagaaaatgcgatattttctcatacctgatgaaaaactttatcacactgcttttagaagctgacgtattaagtagataatatagatagagatgcaaaggggatttggaaaacagccttgatccaaaataaatagatattaacctttgtattcaataaaaagaaaagcactttccttataaatataaatgggatatttataaaaattaacgatgacttgtgccctaaagctgtattttgccagtcatgttttctttttgttgtaaattatattctactctagctgggccccctttgaagacttgtaattttttaattggttgagacatgccccaagttactcctgtcacagaggtggtggatggcccctgggtctctgtgtttgtcttgtcattgaagaatcaggcagcctgccagtccctttcctgctgagggacctagaggaagcatctctgtttcccagtctcctcttgctcccctgtctttaggaatagagaaaattcagaccacttgatcagcattggcttagccttttggaatccagaagagagcaggcagatctaccagacgtccctgccaaccctggcccccaaaatcaacagctctctggtggccaagttcttgccagtatctgctgctttcccagccttgctttagggcagcctggtgcagttctccaggttaacttagcaaatcctcacactggaaatctcctgtccaccaagatgtccaaaattccttttaggccttaccagatacctgcctaggagaaactggagctgacaatggagatgatgggagttatgttcaagttgccatattctagcattcgccacaactcctatcagttttgccaggcaacttactaggtgtctttcatacctgcttccttcacccccagtacctctattttcataacaaagaagagtttatgaaaattaccctagccaaagggaactttttgcccattttattgcttgtatgtctttcacagtcacagtctgacatgcctgcccaccattgcaaggcggcttttattgcatgtctaaagcaggctgtcttgctaaactctttctaaaccaggaagtaaaacaaaatcggtggtgtgaacacagtgggtttctaagcatttttcttgtttccttccattatgttggaggataaattcctggcccaaagttaaaataattcctacaaatgaacaggaatttcagtatgacttatccagtgaagcactggatataaagtgagctttttgcatgcagaattgtgatgtattttataaaacctcttgagattaatgtttgaggagctaggtaaagatggaagagatactccttcagtaatataaatggaagcgtgtagtatgcagatttacaccccccttccaactcactgtaactttaaagctgtctgttagaaggatgaaatgtagttgtgagccagaccatgttggtttggacagaaattcttacagaattattaagccttaaaaaaagcaaaggagatttatgcatctgcatttgaccaatttggtttggaataagttcataatggaaaagtaataaaaccataagagacagtgtcttctgagtacagtctcgcttttaaaaaatctaaacatgcactgccctattttggatacagtgactgtagaaaaatttcccattggtaactttgggagggttttctgttgttgttgttgttcctttttcattgattatcagccagtataaattttaagctttctgtcaaatatttttctggagatgtcagtcttagggaaaagaaatcctaaagtgttatctgtaggagtctccttctcccaatttcaccccctccccgaaacctccacctcccaccccccaacacacatagtgttttttagatatcagtaaagtctttttctggtgtaactggagaggttggggtttggagagtagggggtggttgaatgtgtgagagaaagcacctcctgtgactgccagcagccacagaagaccatgaagaggaaacgcataacaagcttcacctctgaaaaatcggacctaataacttcgcaagtttttgatttcaacaggaaagaaaaagaaaagaaaaccgctttctccacttattctcaaccacttgaagtagtgttattgataaacaatttcttaaaaatatttaaagatttaggaatagaaacaaaggaaatgaaggctgagtgatttgggcaagggaaggtgtgagtctggtggggaggggtgtaggagcagacatcttgcacacaggagaggcatggttgcatttcccatagaggacagcaaaataggcattttattgaatcggatttttaactttctttccacggccagcagttcaaagcacagttatttttatatagtgagaatgtgaccagactgagatggtgttgtgtctctcctgcaggtatgcctgcagcatctttagtgacccctgctgatgttatcaagacgagattacaggtggctgcccgggctggccaaaccacttacagcggagtgatagactgctttagaaagatactgcgtgaagaaggaccaaaagctctgtggaagggagctggtggtatggaaataatgtgttcttaactaactctttggtatcaggtaaatttttaaaatatctaattatatctgtgatttctccatttttttaaagctcgtgtatttcgatcctcaccccagtttggtgtaactttgctgacttacgaattgctacagcgatggttctacattgattttggaggagtgtaagtatcatgctaaatctgctgctaaattttggctgctgctaatgctctgttgtcgtagggaaaggtacctcagtctagtctctataataaaatagaagagatttagggaaatgttgaaattgtgttaacaaggtcatttccaaggggaacatacaactgatgagaatgtatcaactcctttacattaaatatttgaacaggttttgaatgttatttttatcaagttaaaacaaacaaaaaatacagcttcttactctgttttctcttcttttagaaaacccatgggatcagagccagttcctaaatccaggatcaacctgcctgccccgaatcctgatcacgttgggggctacaaactggcagttgctacatttgcagggattgaaaacaaatttggactttacctacctctcttcaagccatcagtatctacctcaaaggctattggtggaggcccataggaagatcagccctgggatagtgctgtctttttgtgggtactgcagtaaagaacatccctcctgggaatgaagcaatgcttcatcccttttacgtccatctcttgtttaaattcaagtccaggcttttttatcatgtgaaatcattcattttctgggtgttttcttaaccagatcattgtgaaattattcataattattatttggccctctgcccagaaacctttgtttgcatctgaaaattgatgggatttggtcaacactaacatgatttggggaaaggagcaagtcagaatagaaattagtactcccctccttgaactaggattgtagtcccaaagaggctactgtaaggcaatcatggtgctcagagcagtgtttcgtgtgtgttttaaactggtaggaaactaggtgcatatttataaaaataaaaaacactgggagaaatgaaaaaatatatatcaaatatattcagcctggcttcaaattgtaagcatgcacaaattctgtctctggattatattatgaagcttttatgtgaaacatgtttctttgtaatgaaaaccacattggagatgtttagtaatcatattgttactggtaccaagactactagggaaatgcctttgtactttagggaagtacttttggcattttactgtacagacagaaaaaactgagatgtagcccctctcctggaagtgctaattttgaaaaactgctcatatgatgtacatgtactgattactgcctattttaataaacactcttgaaaaatgcatgttgccctgttgctgcctgccctattctcctcatctccccatcattggtacccacttgcttttaaaatccactttatcttgaataatgtaagacaaatatgttctgacataagtatttaattcatgttgccttgcataatggtcagaggcgcatgaatttgtgaaggtggaaataaactatttgtaaagtga

SEQ ID NO: 1262 - DNA, 46508 bp, Homo sapiens
ctccctgcccacctcctgcagcctcctgcgccccgccgagctggcggatggagctgcgcagcgggagcgtgggcagccaggcggtggcgcggaggatggatggggacagccgagatggcggcggcggcaaggacgccaccgggtcggaggactacgagaacctgccgactagcgcctccgtgtccacccacatgacagcaggagcgatggccgggatcctggagcactcggtcatgtacccggtggactcggtgaaggtgaggcgcggggagacttcggggacgcaacgagcggagaaggagcgcgcgcgcgcatttgcatcccgcgcgccggcagcctcggggcagcgtcccgaaaccgagctctccccaggaccgcggctggccggggtcgccccaggagcagctgcgcgcagcctgggcgccgcgccttccgccgaccccgcgagggtgcccggtcctcgccccgcaccgcccgctgctccagccgcgtgcccggccccggctgctggcggcgctgaggcgggggaggcggagtggcgagcaccgctggcttcggcggcgactgggctcccgggggacgcgatcgctgaagctctgcacagtcttaccacgctggccgttcgggctggctggggccgcccacacgtgcgcggtttccgagggagctccccgcaggggaagccctcaccacgctggagctgagaaacgtgtggccctggcccggccgcgcgccctcgggacttggtgtgtggctgctgctccccgggttatttcgggaacttggggccggcaagtcttctctcgactagtggcagctctttaccggttcgacagcggcccgtgggatcccctttctgagggttcctgcacttcttcccccgactttgggtcgccgagccgccgggaggcaatgacgtttgccttctccttttgcttgcggggaggtgggtgggcttgtgccttacagcccttgctgtggattgtgtgagaggcactcagtttcctttaaaccctgtctgtcacttgccccggtagttttaactgcatttctgtaaagaggcagcgttactaggtgcgttttgcctggtagactgagacctgccctctgtcagcctgcccagaacaccccagggccaggatagagtagtgcaggaagtaatgccagtattgactgttacacgttgcacttttataggcataactcgcctaattcatgcaacagccctgggggttaacagatgaagaaactgaggcgcagagaggcgaaccgattaccttgcccaggctcctacaccacctcctatcctctggctgcagctgcagtgtgctttggaggattcggaggcctctctaggtggcaattattttgcaaggcaggtcccacagaggcacccccagcagctttatcttgttgctgatgctggtcctgcatgagcaggtatgaaggccagaaagtataactcagagggttttcccggctccggggagctcgcttggagccagcagtcagtgtctggacaggcagaagtccagtgaggaaagacatgggcttccaaggtgctgctggacctaagcctgagccatcacccatatgtccctccagtgtcccagtggggagttagaggaatggttctcatctccaggaaagacactggactgataccaggtggcatttgtatgggaaagaatccctcaaatgtaataaaattctccatgattgaagctgttgtctcaactgccctgggcagagtctggggaaagttaggagcagggaggtgttatctgagcaggccctagtcctactggtgtcttgagatgaatgttctattcgggaaccccacagtgagttcactttagagcatcattttagcttatttttaggattagaaataattagttgtgccttctgagcaccctttgacactctcaagaggcgtttctcacacgtttaaattgtgtgatctgtgtttagtttctccctgccccatacatgttgatatgttttggttcagatgtcacctgtatacttagtattactttccatagcagttttcacctgtggacaggttaacatggtgtgaatggtagaaggagccggtctggttttcctagacaagtctgtaaaacaaggcgtgggttagctaatcagtgaagtcttctaggttctgggattataactgacccttaggggcccttccatgctgaagtgtgcagggttggttttgaggctgccactgagtgccaaggtctgccaacatcagcacagttgtctgccaagcatgaggagtcaggggtgcatcctccatcatggaaaggcttgggggagaccacacctgtgttcctcttaagtattttggatgatggcgaagaccgggagtaactgagtcaagaaacccgggttgggcttcaagccctgctctcacttgcttcatgcctcgggcactgttctgtgccttagttttgtcactataaagtggggacagtggacctgctcagtccctctccacatttttaacccatgcctcgtttctctgaacacacaacacccatcgtcctcttttatgttacttgaaatatcaaaagaattattacagctgaaaacaaatctatgtaaatcggatcttgaaagagagaaagctttctccagttttgaaaggcgccatttttaactttgatcttgtaatgacaaataagaatgttgaatcggctggcttttttctatcctaggtaatgtggactgtggagctctgtgctggtcactttcaaccctgaacctgatgctacttattttgcagttctaagtgcaaagtcggcctggtggatgcttcccattataatattaaatttgcttcttcgtgaggtcacacctcacatccccagtgtcactttaataactagtgttttttacatggtgggccatgacccattagtggactctgcatttaaaaataaataaataaataaaagaagttattagtgagagtgtaaaaatacgggtgtgcctggcatgcagtgggagaaatgttgaaattctgtttgggttgtgtgtgtgtctctgagtgcattttacagacgtgtacaatgtacttctggctgggagttgtggtcaaacaaatatgaaaaccactgaacctgagaaaatatctctggagccccagcaggcaacactgagattatgaaatgggtatttggaagacctttggcaactttcctgctgcttcctgtgtcttcttctttcccttggtcctcccatggtgggatgtgagcactcattcatccataaagggccagtctactgggacctttggctgcccctgcgatgacagtgagcagcaaagtgatacccagggagggagtatagggtctctgcagggctctcaccaaatggtggcaatgacttactcctgtctaggcggggtctggtggcaggttttccatgagcctctttctggtgttccagagtggcaaggggcacttggggtggatacaagaacccctggtctgatcaggagagctcaagacttgaggagcatgccaggtgggtggaggaggaaattccaaccagattaggcacaccactcggagaccatgccgagtcccgcctggggaaagcaggggcagaaggaaacaggaaagatttgaagccgggggacttccgctgaccctttcacaacccttcttttgctttgctgttgggggaaaccctgcctgtgactctcctaggatgagccctccttcccaggttggtgcaccacggagcgttccctctaggagcctcctggctgaccttatggtgtgcacagccagcctgcccagctcagcagagcattacctcaacttctgacttctcctcttctgagttttctcctggctgcaggcagactggtaggaagggtgctggggggcagtgcaggcagctgccagagtcccctcccacccacttcattgctttccaaacaaagtgcagttcggtccatgccattcagcttcagaagggcgtgaaatcccaaattgctctagttcctgggacaaaactataatgatttttctctctcccttcttgtctcctctccctcacatccccctgctcccttcttttctctcctttgatgagaggtgattttcttaaaaggcgaatttggaacgaggaatcaaaaaaggggtatttgtgagctgcagtcctgttccttgtttcatgaacccccaggcagccatggcctgtacccctcaggcctaccctgaggagtgtgagaacctcatccacttttctctgccctaaattggggaggggcaggctggagcgtggtttggaggcgcgtgcccaagagtactgtgaacagcaaagggggcctcagctttttagtagggagaggtatttggggttgaatgggaggatttaatcagctgctttgcttaaactatacaggggtgtgcacctggggtgggggatgtgcgtgtcacctggaagggaggaatgtgcttcccaaaccttttcctggcttccacttgggcacgtttcagctgcatgtggccatctcattagagatgagttttgtcctgtcttgcagcagtgaccagtcttggggaatcagttccactttctctgttttttagtcttgggcttctgactctctctgacttcaggggtttccttcttctgactcatcggatgaactcacctgctggtgtggaagccttcagcatctttcttgaaccccagagctttttggctcttttcctgtctccactagtacggaaccttttcttgtcaaagaatttgtgtttttgtttttgtttttaatccgaaataccggctgtcatgtcccatccatgctggccacagacatacccctgtgatcatggtgttggctggaccatgccaggatgcatggctttgccactcccatgcccaccttgaatgttgtgtctgatgtttgtcataggaggggtatatccaatctctttctcttttttttctccctctctctctctttttttttgtttttttgagacagggtctcggtctgtcacccaggttggagagtagtggtgtgattgcagctcactgcagccttgacctcccagggcttgagtgatcctcccagctcagactcctgagtagctgggactacaggcacatgccaccatgcctggctaatttttttgtatttttttgtagagatgggggcctcaatttgttgcccagactggtcttgaactcctgggctcaagcgatcctcccaccttggccttccaaagtgctgggattacaggcatgaaccaccatgcccagcctctttctttttgttgaactggaaaccttccctaaagttccctcaaccttccctcaagttcctactgagatggatttcccacccttagagaactatcttggggttcaaattccagtctttgacttactggttgggcaggacacttagcttcttcatgtccttacttgtcaaatggggatcctgattttcttcctgctttctctttcctgacccagctttccattgcttctttcccacttctctcatttttccagtgggccttgtggaagttccttgttaacaagctcccttacatcttcccctctttaccgaatgtttctttcacttccccctcctgatggaaatccagctcctcttgctaagggttgggagcatggacccttgagtccaaatccctggaccgggtcccatttcccagttaggtgtgaccttgggcaagtttcttaacctttctgtgctatttccctatctgtaaaaagaagaagagatggtaccgatctcccagggtggttgtgaggagggttaagccctcgctgcacttcacatgcctggtacacgcacagaacagttgatactctctgatgtctgctctcatctttatcttcatcatcatcagcatgattgccatcactttctctcattccctgaggactctggcatctgatgcacagacttcacctccacagatcccgtcctcaccctgaggatggcccctcttcgtccccacccgactcaagtccaaatcactccattccttacacctctgagtcaatggccttcacctccatggtcccttgacctaactcagaatcttcctgagatcttaaatccagattattatagcctggaccccaagattgactgctgcagctgctggggcctttagtttctctgcctttggttcttccaaccctggcttgccccacctgggtcctggacagcccatctgtcccttgggcagcgaagcccttcaggggacattcacactgcctccaatgcgcatgctccctggcctcagctccacatgtctgggcagctgcttgcatccttcacgagggtcctgttgccccttagctccccaccctattgttgtcagcctcagcctggcatcttgcttccatgtcatagggaaaccaggacctcaatcaaacccatcttcctgtcactgtccttccaaactctcttgccttctacccccactataagggaacaggtgtcttcattcctttaaggtatatcaatgtggcagagaagggagatgtatacaaaccaccttgacaccaggatttgaatactggctgcacacctgggcacattacctaacctctctaagctcaggttccttctctgcaaagtggggatatgaatactgtattagtctgttttcaagctgctgataaagacatacctgagactgcgtaatttatacagaaagaggtttaatggacccacagttccacgtggctgggaaggcctcacaatcatggcagaaggcaaaaggcacatcttacatggtaacagacaagaaagaggacagaacccagtgaaaggggttttccccatataaaatcatcagatctcgtgagacttattcactaccatgagaacagtgtgggggaaactgcccccatgattcaattacctcccactgggtccctcccataacacgtgggaattatgggagccactattcaagatgagatttgagtggggacgcagccaaaccatatcaaataccaagagctattttatagggttgttgtaagaattaaatgaggcaacatatgtaaagttcttgccacagtgcgtggtgcgtacgttgtcaataaatggtgatggtgatgtcatttttgtcccctcactcttgagtgactcggttccaggatctttaggcttcctgctccattgagtttttctcaaaagtgtttctacagatccaagcccatcctgtcttaaataaaccccagacttctcaccttgacctcacatgcacccccaatgtttcttcccataaacaaactgttgcccctttttttcctccttaaaacaacacatgttctgaaagaactattgacactggtctctacttcctcactgccacccctgcttcctggcttttgcactgcccagccgcagcctcacagagacttctggctacccatcatcttcctggcccaccctgctgcctctgttcctgccaggggcacctccgagagggggttggccctgcgatcctcagttttcctctttgggcatggcttctcctcaggaatgtgcccttccacctcattttccccagcacacatgcctcagtttcctcctgggacctgatggctcccagatcactatcttgggcccagactttctggagctgaatctccagttgcctcggagcctcctcagactcagtgtggccagaatggtggtcctggcttcccctcgggcctgcccttctgcctccttctgcaccctgggatggtcatcagcttttctcccactgctgccctgtatgcagggaaggcctgcctgtggctgtatctgtagtacttcttgaatgtgtttccttctctccctccccacagctacttactgccttggttcagggacctggatgtctcctcttccttgagatcccagactgcccaagttaaaagtgagtttaggccgagctcagtggctcacgcctgtaatcccaataccttgagaggccgaggtgggaggatcacttgaggccaggagttggagaccagcctgggcaacatagcgagaccccataggtacaaaaaataaaaacattagcttggtatagtggtatgcgccagtggtctcagcttcttgggaggctgaggtgggggaattgcttgagcctgggaggtcgaggctgtagtgagctatgattggaccaccgcactccagcctgggcaacagagcaagaccctgtctcaaaaaaaaaaaaaaaaaaatgagattactctcccctgcctcacatttccctattgcccattgctgctttgtttttctccccagcagttgttacttcgtaacacacaccatcgtttatttatattgtttacatattttacttatatttatagtattatttgtattgtttatggtctctcttccctcatcagaatgtaggccccaagtgggcagggatgtatgctcttctgttcaccactgtattcccattgccagaaacacagtaggtgctcagtaagtatttgatggaggagcttctgcagttcattctgcacgtcagccatggctggtcctgctcttcagcctccaagcccagcagcttcctggtgggctgcagttttctcatcggaaatagagaagagtagcagtgccgattctgcctcccttgcaggtcgttttagtgcatctagttggaaaatacaggcaggtttgcagggaacacagttttcaaagtgtaaagctcagtgcaggtgctaggtcatggtgttttttgtcacactgggatcctgcgggagaggtaagtttagctgattggagtggaagatccagcccattcttcgtggtgcctgccgcagagcctgcaagcctgcagaaagacagggagtagccacgtctttctgtagttcacacctgtgtgtctccccacctgataatccctcagcacttctgtttgccttgcatgtaaagcccgacctttgcatggcaggcacacagactgaaactctttcctcctccagcctttcttggactcatccacagaatgacaaagaagtattctgtgaatattggttgaatgaaggaaggcacggctttttaaaaaagatgaaaaaaaaaaaagttatgaaaagctttaaaacttgctattggctgggcgtggtggctcacacctataatcccagcactttgggaggccgaggcgggcagatcacctgaggtcaggagtttgagaccagcctggccaacatggcaaaaccccgtctctactaaaaatacaaaaattagctgggcgtggtggtgggtgcctgtaatcccagctacttgggaggctgaggaaggagaatcacttgaacctgggaggcggaggttgcagtgagccgagatcgcgccattgcactccagcccggacaacagagcgagacttcatctcaaaaaaaaaaaaaaaaaaaaaaaaaaccagaaaaaaaaacttgccattaaacaaattccagttttgatttttgttttgcattggttttgaatccatgcatgttatggccacaaagaagactttcttggctccgttgtttgtcgtgtgtgtgtgtgtgtgtgtgtgtttgtgtgtgtgtgtagaacccagcaagcagcagctataccccgatgaggcaatgtcttcatttggccactcatgtcattccacgtttcctgagtgccctcttggctaggcactgtgctagacactgggctacaaaaataagaatgcctggtccccgttctcaaagtaagcgtgcttcctataattagaccctgagctaaggcgacagaaccagctccctttcaagacaagagtcgcctgtcttgacggactttcagatgggctggaagaacaaggtctggcgtgtatggactctgaactgctcaagctgctgccgtcttgcaggtctagagcctacagggtagcgtcattctagtttctttgctgggcactctggaatttgttctttctcctgcgagagacagtggtcctcagttgtgttccctccccaccatcctcaccctccctcccacggtggttagtcattctggaggctcaagttggctcacagaaggtgctcttgaaaacatcccccaccctcctcgtaaccccagacagtcaggaagggccgttgtcgggtactaagaggtgttatggtttcacattcatgctttctctctgaagagaaaacaaaacatgttgaaatagggagaaatcccagcagcagcttgcttgaagcaagggttgcataacaggtctaggaaacgtctggccgtgtgggtcaagttgagggactgcagccttgtgtcactgagggaacttcttccgggtccaccgagcctctggatccattagatccatccagagagccacttggaaggctctgggaccttgagttctggctggccacgtggtctgtgatggctgtcactggtgaaagagagaccctggctgatatttagccaacagtgtttattccctggcatgaccagaaagggtgcatttgagacactgctgtgggtgggggacccggaggagtgtttgtgtgtcagacttatgctggtgttgaggccctagaaaggtcaccaaactggggcggggtgtgggccccgtgaatttaagtcctggtcctgccattaaccagcttggaaaccttgggctaatcatttctctgggctagttttctccttgtgaatctagactagtgtcatctactttacctttttgacagggctgttgggaagcttaggtgagatagatttgtgaatggctcttgcaaaccttaacatgcaaagctaatgacagattgtatcagaggcaatgtgcttgattattagagctgtttaggttaacagcacaacctctgcagccagactgcctggagtggcacctggtcaagttcctgaaacctctctttgccttatttttctcatctataaaatggggctaataactttacccatttcagtgttgctgtgagaattaattgagatgatacacctagaatgttaaggcacatggcaaatgccccattaatatcagctcctcttgttatttctaaaagtattacttcaatgcctgggtatgtttatatattgctggtgcaattgttaattttatattatttttgtattgttagcttttatttggtcatttgatcctcttagctctcctttgaaggtgagaaaaggcaggtgttgtttctcatttcatatttgagaaaactgaacttcagaaaaattacatgccctagaactcgggcctttttctgctccagagctgaaagcgagagaagagaggaagggaattaggctggagcaagccagtaggatgttggatgcagactcagatgttaatggcagcagagcccttgagctggattctagaatatgagaaagggctgagattgatgatggggcccagctgcattgttgggatggaggaaccagagttgagtcgagggagtaactccaggaaatcatggcacccagaaagtgtggcacagaatgcagggctctaacgtatagttaggagttctttgggcaagtactccagcaagcaaggaagaaggatgatgacatatggttattgccacaggatatttttggctgcgtctggcttctctctctgaaacaaattgcagttgctgtgacaccttctcatttcagcagtgagtcgaagttgcactcaatatagtgttttgaattcggactagtcgtgaagattcctttccagatcatagtatatgtatataagtcacttactgggaagagcactacatcatagttccgtggtccactaaggctgcagttttcttatctgaaataaggaggggtaacggtgcccatcctgcctcccctggcaggtccgcttacgcatgtagtgagaaaatacaggcaggcttgcagggaacaccgctttaaaagtataaagctctctgtgcaggtgctaggtcatggtatttattatcacactgggatcctgtgggaggggtaaggttagctcattggaatggaaaatccaggctctcattccagcactaggactcagtgcagctgcctggccttgggcacttaacctctctccttacagtgtctcccatctgttgagccaagacagggtggctgtctgctgccgcccatttggctggctaatgaggaagagccagtgctgctcacagcatgctcatttcgtggtaatgtagacaggggatagtagtggctgcgtgtagcagaaaccagcagggtaggaccggatgagcccaccttcagggaggtgtacccagggctgttagtttgaggacgtctgtgggattttatatccttactcttattttccaagaaagtctgtccctttgagcaccaggcagatgagtctggggacgctgtgaggaggggtcccccaggagcaggaaggtgactaatgatcccggaagaatgactgtgtgtgtttgcagacgcctgggctcttccccagtttggcctttcccgtcactgttttcctcacttgcttaagaggagaaggaggtaacgcacacaagtgcctttgtctcagggtccccacggtgcccatcttgagggttttgcgggcgccttgcattgcctaaggcctggctttagaagcagaacatggagagagaggtttgcagcctgcaggaagctggccagccagacctgccgggcagcgggacccgcgggcagtgcctctgactcacggcacgtccttgatacgcagtgctcccctccccactttctctgccctcctgtggatcacgggtgtcctagggctgttgggagcctggattaaagttgctgagtggccggctgatgatcagatccagggagtcagaccagaggtggggacatcttttcaaaggcaagaagatgctgccagtgcgtgtatatacatatgagggtggaaggggtaaacccagggtgtgtctttaactgaagaatcaagaaagctgctttccttagtcacccgcctctgtggttcgtttgctaaacgttggcttgcgttagcctgattcacagtaatgtggctcccaaggaagattcacatggtatttgtgaaaatgtagcttcatcccctgcccttcattgaatgactgaattacagtcagcaccacataacgatgtttcggtcaactatggactccatatgtgatgagacagtgatcccatagattatagtggagctgaaaaattcctattacctaggggcatcacaacgcattgcatttcgcccgtgtttgggatgatgctggtgtaaacctactatgctgccagtcatgtaaaagtatagcacacacaattagtaggtaatgcttgcaaataataatgaaagactctgctactggtttatgtatttactatgctatactttttgtcattactttagagtgtactcctacttttttttttttttttttgagatggagtttcactcttgtcctgtaggctggagcgaagtggcgcgatctcggcttactgcaacctccacctcctgggttcaagcgattctcctgcctcagcttcccagagtagctgagattacaggcatgcaccgccacgcacggctaattttgtatttttggtagagacagggtttcaccatgttggccaggctggtcaccaactcctgacctcaggtgacccgccctcctcagcctcccagagtgttgggattacaggtgtgagccaccgcccctggccttttttttttttttttttttaagttaattgtaaaagagcctcaggcaggtccttcaggagggattccagaagaaggcattgcgatcacaggaggtgccagctgcattgggacaagatgtggaggtggaagacagtgatattgatgatcctgaccctctgtaagcctaggctaatgtgtatgtttaagaaaaaagtttaaaaagtaaaaaaataaaaaatgttaaaaggaaaagcttatagaataaggatatagagaaaaaatattttttgtagagctgtacaatgtgttttgtgttttaagccaagtgttattacaagagtcaaaaagtcaaaaaattgaaatttataaaacaaaaacattacagtaagctaaatgtaactaattaattttatttatttttttttttagagacagggtcttgccttgtcgcctaggctggagtgcagtgttgagatcatagtttactgcagcctcgaactcctgggtacaaggaatcctccctcctcagcctcctgagtagctgggattacaggtgcgcaccaccacacagctaatttttaaattggtgtagtgaaggagtttcgcaatgttggccaggtggtctcaagctcttggcctcaagcagtcctcctgcctcgacctcccaaagtgctaggattacaggtatgagtcaccacgcccaaccttgaaatttaatttattatggaagaaagcaaaagtttaaaaaataaatttagtgtagcctaagtgtacagtgtttttaaagtctacggtagtgcacaggaatgtcccaggccttcacatttactcaccaccactcacttaaactcacccagagcaacttccagttctgcaggctccattcatggtaaatgccctacacaggtgtaccattaaaaaaaatcttttggctggttgtgatggctcatgcctgtaatcccatctcctggcttcatgccattctccttccccagcttcccgagttgctgggactacaggcgcctgccaccacgcccagctaaattttgtatttttagtagagatggggtttcgctgtgttagccagtatggtctcgatctcctgaccttgttttgatctgcttgcctcggcctcccaagatgctgggattacaggcgtgagccactgcgcccagcaaaaaacgatgtggtattttcactgtactttttttttgttattgagacggagtttcacttttgttgcccaggctggaatgcagtggcagaatctcggctcaccgcaacctctgcctaccgggttcaagcaattctcctgcctcagcctcccgagtagatgggattacaggtgtgtgccaccacgcccggctaattttgtatttttagtagcgatggggtttcaccatgttggccaggctggtctcgaactcccaacctcaagtgatccacctgccctagcctcccaaagtgctgggattacagttgtgagtcaccgcgcccagccttcactgtacttttggtatatttagattcatttagataacaaataccatggtattccagttgcctgcagtattcagtacagtagcatgctgtacaggtttgtagcctaggagcaacacactatagcgtacagcctaggtgtgcggtagctatcccctctcaatttgtgtaagtacactctgtgatgttcacagaaggatgaagtcacctaacaatgcatatctcagaacatatccccgtcatttgcgatgcgtgactgtaattaaggaatggggcctatggggtatgactgtgggtgctgggcactaaggagacggaggcttgacacaacccaggcattccccatgggagcccctctgtggcaggaaggacagatctccaatgaatcattcctttcaggagtgatgagctcagtcttcagggatcctgcacctcacggggaggagttgggaaaggccccccgaggaaggaatatctcagtatctctatctagacctgaaggagatgtggatgttacaactaaactgtatgattctctgtgtccctgagaacatcacagcctatttccaaggtgcctggccatccccagggtgcctgcatgccactgacactctaatctggggttctgctctgagctgagaaagtgtctgtggtttggggtcatcaggtggcagctcttctcctctctgttctgaaatcttaattccctgtttgactgcctggtggctttcagagaagcccagcctcctcccaggtgggaactttcactgtcgaactaaggacccgaggagggtggaaacaggaggaagggaggctaagcggtcacatcagaggcatttctgctcatcgttggctcataataggtggcagtaggggctggtggagcagtggccaggtaagttgctaaaaataaaacatgctcatgtgacgtgtgcaggtttagggtttgcctgagtgagctttcctggtccaggtcacaacttgtagggcaaagagagacttgaggatggtgtaggcgacaactgtgccttccaaaggtcagagatggacctgggatcttgtagtaccagggcctgctctggaggctcagattcgtgtgtcacttcttgtctcttttgaaaggtaactggagagctggacactttcctgtcctctctctttccttgtagccttcctctctcagagatggcctgctatcaaatgccaggggcacagtcagctgggcttggtaaagggcctgagatgagagcttggggactttcccactggagtccatgatagtccagggtgtagacagaagctcttggatctcacagctttggaaaccgagtcctgtttctccaacaggccagtgcggtgacgggcacagacctgctgtcctctctatttgtgtgtccactgattccctggcacagggggtctttgttacaaaatctctttgctgggtgctttgaaggagcacgtgtgtgggcctttttcagggtggttagacaatgccaagctgtcactcagaagaaatggtcaggatagaagcatagaaaatgccctgtggaaatgtagatgagtgttctggctcacacctgtaatcccagctactcaggaggctgaggcagggggattgctggcggacagcagttcgagaccagccttggcaacggagcaagaccctaactctaaaaataaaaataaaaaaataggccgggcgcggtggctcatgcctgtaattccagcactttgtgaggccaagacgggtggatcacgaggtcagaagtttgagaccagcctggccaacatggtgaaaccccgtctcaactaaaaatacaaaaattagctgggtgtggtagcagatgcctataatctcagctacttgagaggctgaggcgggagaatcacttgaacccgggaggcagaggttgcattgagctgagatcatgccattgcactccaggccgggcaacaagagcaagactctgtctcaagaaaaaaaaaaaaattggttttgtgtggtggtgcacacctgtagtcccagctactcaggaggctgaggtgggaagattgcttgagcccaggagtttgaggttgcagtgagccgtgatcatgctactgcactctagcctgggtgacagagcaagatcctgtctctaaaaatattaaaatgaataaataaaagaacagaaaatgacctgtgtggggagaagggttatctgtgaaaggagttagaaacctcaagtgtacataagtaagactggagatctctctgttaatgaaattgtgcttaaaaatttttttttcttgaaccttggcttctcaggcaataactgaattttaaggtgtgtgtgtatatatatatataggtatatatatatataggtgtatatatatatatatatatatagtgtatatatatatatatatatatatatagtgtatatatatatagtgtatgtgtgtgtgtgtgtgtgtatatatatatatatttgggccaggaagggtgaagtgttaaattgccttacttagaaaattaaggtagatttgtatttagcccttagagcttcaaaaatatcagctcagaaatgacttttaattgtgcaggtgataaaatcacaagaaaaaaattcatctacaagttggaatgactcttagctacttatttgtttttaaatttttttttcaaattttggaaggaagtagagaaggagttagaactgtaatttgctattatgggggttggggtgcagtgcgtattagtacaatgttaggtggtggcaggttccgtttatccttggaattagcactgctccccccacaggcttctgggagttgggagcaggctggttggtgacgctttgcctggccttggataagaactcttgttttcaaattcccttgaggtctcttccaagaatcttttgcattttttctgataaatcaatcataaggaagtttctgaaattctctttcagaccctacaacccacaagttactgcaaagctgggcttctaccagaagtgagtgatttgaaattgaaaacagatttcggatctcacctgagtagctcgagtgtaagggagggactgggagagccacagagaacatttgtcaatccagaaccaaccattcatggtgttgcttgactggagggcagggaaggaaaggactagaagcaaggcgaaagcagatctttctgtagatacacacatataagtcttggatttgcattttagggtgaattgtaattagcttgagatgaccaggggcccaccaatcaagcaactctgggaaaaacacttgtctacatcttaagtttctttgtctataaaatgtcaagattgaactaacactacatgattctctcgggaactcaccagttctaaaatttccactccttcttttcacagggcagtgtaactttaactccctgtttcaactttgggtgtaaaatacaggctcacaagcacttttgctttgcagcggaagctaggaagaccctgctgtggaattttgcagaggggctgagcagtggtgggaaggaccagcggcccatgtaccatgttgggcccctgcattccaaggtgtctgcctagaaataaatgatagtttatttaacatacttgtaacttccaacgacaacacttcaagactgcaaatcatccatccgggcaattacagaaatgctgaacggccacagccccgccctggaatcaagggaagaagtgtggcagatgcttctggaaggctctgtttacagctctctgactccttcctgccagaacctttcacaagttcactaccaggaagctgagtcatccaggggtcagccggcatggccaaggtcaccccgcactgccagcagcacagatggggttagcccatcattccagaggagcatccgtgggaatgatggggttggggagctggggagcctccctgcagcatctccctgccatggtgttttgcatttcctgtagatttcgcagtgagaaacggtctcctcttatattcacttcatttcttctctctttctttctttcttttttttgagatggagtctgtctctgtcaccaggctggactgcagtggcgcgatctcggttcactgcaacctctgcctcccgggttcaagcgattctcctgcttcagcctcctgagtagctgggactacaggcatgtgccaccacgcccagctaattttttgtattctcagtagagatgggatttcaccatgttggtcaggatggtctcaatctcctgaccttgtgatccacccgccttggcctcccaaagtgctgggattacaggcgtgagccaccacgtccgggctttttttttttttttttttagacttgttgcccccccaggatggagtgcagtggcgcaatgtcggctcactgtaacctccacctcctgggttcaagcgatgctactgcctcagcctcccaagtagctgggattacaggcatacaccaccacacccggctgattttatagttttagtagacactgggtttctccatgttggtcaggctggtctcaaattcccgacctcaggtgatctgctcacctcagcctcctaaagtgctgggattacaggcatgagtcactgcgcctggccaaaggcaagagatgaggaccatatagatggaaacacagcattaagggtaaaacactctctctctgctctgtctggtgttcagggcccagcatgggctgtatgtcctacacttcgtttcaggctcatcttcaggtgacaccagccttctcggagcctctgtccacatcccacctgtcactacctctgccctaacttcaccttcagtggtcactgccaggacccctccccaaatctaaatgaggtccccctgcatttgccctcattgcaccttctacttttgcttcatggcatttagagtttggaattttttatcgataggatttttagtactctctctctcctctactagactataaactccttgaaggcaaagacgacacctgctccctcagttccagcagcccctaacactgcgctgacatttaggtagtagcagcgttttcttgcagaacgatcctgtagttttaccagctgagacttctgtggtctggggagtcactcatctctggtccctgcctcctcctctcacttttggaaacccttctggccagacggctttggtttaaattgtatgccggagctcttggttccagggagagggttttagcgtaaaaatctcactcatgatggaaggttcctgctattaccttttgcatccaatacaacttaaattgactcctccaaaagcttcggaagtaatttgtacctattgtctagcataaattcagcaagtgggtcccggaggctgaaagtcgagtcttgcggttgtttcctctggtgtttctccctgagacccttagaacggcaagcctggtgcatctggtgtcctgtcatctttctctgtgattgtcatcagtgtgaaaggtgaaaggtgtgtggagaaagaacatcccttcgagctgtggcttagagctgtgacttggcaccacgtggttagtcactatcaagttagaagcctttgtgggaaatctggctttggtaggatctgggaaatttggacccctcatttgccccctggcatctctaaattccagagcccagctttgatggggcttacatccccagctgttaacctgtggggtgggccccagactgtggccaggtgcattgcgctaggggagacagatccacagcaggcagaatttgaggaggacttaaaatacctgctttgggaggccaaggcgggcagatcccctgaggtcgggagtttgagaccagcctgaccaacatggagaaaccctgtctctactaaaaatacaaaattagttgggtgcggtggcacatgcctgtaatcccagctacttgggaggctgaggcaggagaatcgcttgaacccgggaggcggaggttgtggtgagccgagatcaagccactgcactccagcctgggcaacaagagcgaaattccgtttcaaaaaaaaaaaaaaaaaaaacacaaaaaaacaaaaacccgctttgttacctgcctgtgggtggaattgagttcatctctgaatccgtggtagtcatttattgagcacgtgttttagtgagcatggcatggcgctggctccgagatcacagtgctgccgccctccttcacgtttctctgacctttcatgggagtcacatgcagacgcatcacttggtataattatacgtggaggaatgagcaagaggaggctggcgacgggactgctttaaaaatcccttcttctgtggataataggctaatagcggggtgtgctttagaaggtgtggcctccgccaagggcgtgggaactgcatttgtagaagctgggaggaccacacctggcttgggagacggcatgggtttctgaggtgcctggctccctggcctgtccagtgtggacagcttacgcgcagctaggtgaaatgattgtgcagttgctgagggattgggtggcagagctggacagaatttaggtcttctaacttggaacagggctgtgtccatcttacctaggtgtacagtttggggagcactgctgtttggtctagtgagacacacttggtgtaaatatctgtgccctgtagtacccagattccaagggaccagagagcatgcccgcacccacgggctggcgggagcccaggtcctccagggctgctgtggagcatgggcttcttggtgcccagtcctatagctgaacttgggcggcctctggctgttgcccccagggctggtctccctatagttcagaggcgagccagctctcagcagcagggagggccttttccatagtatgaacttggccacaccagaccagtcagcagtgtcgggaatcttggccctcaaggtccctgcctagccctggcctggacttcagcactggtcaaaggtccccagagctgcccttggctctgagcaggtgagtgaacttcccagagcacttttgtctgggcctctgtgccagtgtaaactgataatagtgatttccctgccccacctctctgccagctatctaagttttctttgttacataatcaggattaatttaagcagcctaggccatccatttagaaatggttagtgaagaaaggtgaatggggaggggtcagagtcccttagggggccaccaggtgcgagtccccttgctctttggggccttggtttcccttctgtgagttggggcagctgaagggaagggctgctcaggtggtcctgccacatcccagtgttgtgtctagtgagtacaggtgagagtgctcccaaccagggcagatcctgctgctaggcagtgagtcaggaaggaattggtaaaaatgacgtcattgctaagaatgacgtcttttttgctgtttatccaaaggaaaaaaaaaaaagcagaaataaaagcagcaggcagctgtccaccagaccccatgcaaagggcttttccttgaatcctcacagagactttaggcagtaggtgccattaggagccccacttacagataagaaaacgggggcagagaactgaagtgagtcgcccaaggacacacattgaggaggaagcaacagagctaggatttagatacagaggggtctccaagcctgtccttccagctttgaggtcctgggcctatatattccatcagaaactgaaaggtgtgttggggggtacctagggtcaggatggggttttatttctgtcccttccttgtgatgctgcagggactgtgacctggagttcccaacaccagtgccctgtggctggtagcctcctcctgggactccaggatctattgtttgatttagccattttcttctgtagtccgatgggagggattcaattcaaacctgcaatactgttctttgggccatacaggccatttatcagcaagtagagaaaaacacccacaccttctagcaagattaagctagttctgtggttcttaatgataatttaagccattttgattaacctaggtggtggttttctccctaccaggtagggaatatactggagcctttctaaaaatagttccggtgaagataaacatttattgagtacctactgtactccactaggtgaatacaaggatttctcgttcatctcaggaagcatggttaggggattttacagacgagggaactgaagttcagggaagttaagttacttatccaagttcatatagctgaaaaatagaataggatttcgaccttgtggtaggtggaaaccggggttgtctttgtgctctcaggcatgtggctggcgtggggtagaagctctctatataatggttgagtgactggatgagcttcaaagctggtccctctggcttttcctgctaccccaggccacgtgcccagaaggaacgctgtcttacctgggaggtctttattgactgtttgacgcccttcccatcctatcccaaccccttccccatggcacctagtttccccaaccagaacgtacgttacttatgggcagagacggtctttgagcattgggtgggtggttgaacgcagtttctttgagattctgtgattgggattttcagcaaaatatggtagcaagttggtcagaggggcgagtctggcagtgggggagcccgggcaagtctaactgtttgctcactggcagaacaaagttggggaggttggaggggtaggggaactgaaagcaaaagaaagctcacagggagccccatcgtgcaaaaccgatgatggcagagctgccgggctgcagcgtggagcggggcgggagccttgtgtggagtctgtgaacatactctaggtgcctggatactcctcttatctccccacacatgggttgatgtgcatgtacggtgctttgatgtggactcttgtgttaaatttgttcttctgcgcagctttgtgacgcttcagtgagtgtgtctatatacaaaaggaaaacagttttggctgggtgcagtggctcacgcctgtaatcccagcactttgggaggccgaggtgggtggatcacctgaggtcaggagtttgagaccagcctggacaacatggtgaaacccagtctctaccaaaaaacacaaaaattagccatgtgtggtagcatgcgcctgtaatcccagctactcaggaggctgaggcaggagatggcttgaacccgggggctggaagttgcagtgagccaagttcacgccattgcactccagtctgggcaacagagtgagactccgtctcaaaaaagaaaaaaacaaaaaacaaaaaaaaaaccaacaattttgaggatgaggcatttcttccttacttatgagtgggatgtttatgggccggtgacattgacaaggctggcagagtcaaggggaggccctgggtagtctagcttactagcagtgaattcagttctctcttgaaagcaccgtgactgttggaatatttcagccttagcctttgaatactgacggagtgccaggctttcgtctgtcaagatgcccctctgtgacctcagctggttaatgtctcaagcgcttctttaggagacagaatgggttggtattgaaccaaccactattgcccagtcttgtgatgaccagggttgtggaacagataagttgtgtgacctccacgggtcagggctgttgactttgcctgtaagttacactcttgcagctgggcatagacacagtcctcaggggttttgtggacattaacaagtaaggatttaggtgactctgacatagggtcttccccaaggtcaggcacagaggaggtggcatccatgggacttagcatgttgtagaaacagagcatattgggacaaaagggaagttgaagatcacctgggatcctttagcgtccatccctttgtgagagataggatagcctagttgttaacagcatgactctggccgaccgcctggcttctttctagtcttccttctgtactttgtgaccttgaggcaagtcatttggtctctgtgcctcagtttcccaatttgtggaatggggataactggttgctaatattgctgtttttattgttataattattttgtaaatagaagggttgaaggttcagggaagcaagttgattgacctgaggccatacaatgtatcagtgccagatgcaggatgagaaagaactgtgactcaggccctgtccctcttaccagggcagggcaggacagggaagctgggcaggagagactggcagctcagttccctctccagtccagggtagtcccttccctttctgtctcgcagtgaggtcaccagttgcactcatgaaatcttagtcctgttatctggcatctttggaatttgccccacctgtagggcagagataacttaatcctttttggtgggccacatatgggatattctgggtgtgttctgggtacactgggcatgggccaggcacagacccttccatccattggaggcttttctagagaaggggtggagaccagattgggttcctagggtcgggggatgtgggaatggcaccctctgaactacaggcaaggctgggagctgctgccagtgggcggagagggaaatctaactggtatgtgatgttagtggtggcctggcaagcagctgtagctttggagagagcgaccagcctgtccaggggcctggtagggaaggcttctgttgcacggcctgttgctttctctcagatactggagagcccatctgtcttgcttactgcatggcttttcatagctcccatcatattgctgttgggtgcgattcatagccatggaagacacctgatcataaagtaaattccacacactccagcaaggtattcagggccttgcatggtctagccccaccctacctttcttccagcaaacaataattgatcatctaaggtggcagcttctctcctaagtctgaggctgcttctctaccctcacctgactgctgtcttctctgcacaccagaccttccggccacaggtcctcattccccagatgcaccagcatgttcacatcctcctgcagcgggaattgttttcttcctctccatgccaaatttgtctttttctttcccagtcaaagtaacatatgtacatagtcacaaaatgaaatagtgtagaagagattgtagtgacagctctaattcttacagcttgacatactcttcctttttctaggtggctgttcaaatggcttccttccagccaccttctccaggttggatgtgatctggactctggatctctaccctatagcacatcctgctgtgacctattccaaggagaaggggggtttggtgctggggcttctctcctaggaggctgaggaacttggttattgctatcttagcagaattgttattttctaccaaatgtgcaatgaaaactcttcactgagtcttttgcccctagcaatagcagtgcttcctgaagccccagtagaccctgaaggtttcaggactgtgtctggagagcatcagtgacaggtggcaggaatcctctgtggtccacttcagaggcggcagatgaccaggaggtcagactgtggctggtcttttcagaaggacaaacgtgacccttctgaaaactgggaccattcggggacattggtggaaagacagaggagcctttatggtttgttctcacacatatgaatccactttctcccccctccaacatcagggtgacctgaacgctgaaggaagtctaggccttcctgtaggtgaggcagggaaagccacgtagacctgatttagttgaagtgttttccaccaggtctcaactcttcattttgtcttggtatagcttttctggctgactttctagcaagctggttgggctctttgcttgttccaaaatggtagttttcaccagagacttttcagatgagcaggaagcttttttcagaatgtatgttcttctaactctgcttgagtcccccgccatgtattctgataggcatttgttttcccaccccatcccccacttttttgaagtgggggcaatgactacttttaggggaatcatttttctgttgctggtttcaaaacattaagagcaccaattttttttttttttttgcaacagagtctttctcaggctgaagtgcggtgacatgatcatagctcactgcagcctcagtctcctgggctcaagtgatcctctcaccttagcctcccaagtagctaagaccactggcacccaccatgcctggctaatttttttaaaaaattactttctgaagagatggggtcttgctatgttgtccagactgggcttgaattcctggcagcaagtgatccacctgccttggccttccaaagtgctgggattacaggtgtgagccactgcacccagctcaaattttccttttcattaaaaacatacatatatgtatatgtatgtatatacatatgtatatatgcatgtgtatatatatgtgtgtatatgtatatatgtgtgtatatatgtgtgtgtgtgtatgtatatgtattatatgtatattctctttgtgtatttatttttgccagtttgggagatgttagaaaaagacacgatttggaaacttcaacttagggataaagttagttatactctgagagctgcagttaaaggattatttgtgctgctctgctcttgcctgcgacgtgtgggaatgatgctgagtgatgtcctcctgcttattttgcgtgatttttttttgagacagattctcgctctgtcacccaggctggagtgcaatggtgcgatcttggctcactgcaacctccacctcctgagttcgagcgactctcctgcctcagcctcctgagtagctgggattacaggcgtgtgccactacacctggctaatttttatatttttagtagagatgggattttgccatgttggccaggctggtctcgaacccctgacctcaggtaatctgcccgcctcggcctcccaaagtgctgggattacaggtgtgagccgccacacttggccaattttgcatgatttttacatggcttttcaaagggccagggtgggactatccaaagccctgttaagagtccctcttctgccaaggagcctaggaagggagcaggtttgagtgaggaaggctggtggttttggacggggaacgggtggttttggacgggtagtgccaacggtttttgtgtgcgtggtgctccttgatgtggtctgggtttctgcatttgtagtgtgtgccttctaaggatgctggaaggtgagacagggctttccaaggcctagatggggtttgtggctttacttaggaagacagtcctttccataaagcgtggtgccaaatgcttttcctcctgggcctcctgctgtgatttgtggcgtggagtttcagtgagggagggctctgcaggaaccagctccttggtctgatcctttctggacaattgtggatgggagttggcttcttggtgtcttgagagtgtcctcagcagaccccagtgaagcaggagcatagagctctggatgggctcatggtggacatgggagagctgctggccagggggctgcagggtgaggcttggaaaacagggagggggctgggcttggccccgcattttactgtggtttatttagtgaatgtcagtgctagctggggacagttgacagacaagagaaaacactggtttgattttgaattctgaagcagacattgggcagcagaggctaacatttggcatttatcctaaactttcgaggtgcccgagccttatttcctttctctgggagaaagtctggaacagagacggtgcggagcagcctctagggctcagccctgggcccccctggagttgtgctgctcatggtatcacagtgcttgtttgtttcctgtttgtatccccattgcacctggctcaaggtaggtgtaaggcaaatgctttagaatgagccagtgagtagatttcacatgatcgtctcctcagtcctagaaatgccacgtgaacttcgaacatggaaagttttttatttttgagagattggagaggtgggagttacaggctgtctccaggtcaggcagggagtcagtggctgagtttctgatgctacagatggctggcttgggtggcatgacctctgcaggacccctagaagggcctgaggcccactaccaggctcagcttgcccccttctcttttcttttttggtcctaggcctggatcagaggctccttacccacaggatcttggacaagtcattttccttcttgggcctcagtttcccatctgaaaaggcaggggctgggctggatgtggtctccctagggccattgttgcttctgttacatgatcccgccagctcacctgggacagaacgtgcattttccactctccctcctccccgcagtgagagaacgggccagtgagacaggcctttcctgttttgtcatcttaggggagaattggtgtcaggggctgacccttcactttgttctagctttgctaggagtttgtggagacagtggatgcagatacagacagagttcatatcactgggagtttcactgtcctggagcagatctggagctggaggggacttgctcaggtcacactgggagtggcagtgtcaggccagagacccttgtctcttgattccccgggcaggacacgtttctccatcctgcaggcaggtgcagaggaggaatgcttattcataggcagcacgtgagggctcctctcagctgcttatttggcaccctctttcccctccaggggccagccacacaaccacctgcctccggcctgctccccacacagttgccagaggggtctttctgactctctctgacacctggatgttcttggcacttgctgcttcaagggcataggttcccattggctacggctgtgttttcacacgtgtgtttggtcaggtgtctctggttattaaatgagacaaggcttgcattgctaaagacagaggtttaggaagtgccttggaaaaccaagtgaaacaggtttctttccggaaggatttcccagaggctttagtatggtaatgtgcttatgcatttccaagaggggagaactaaaatgcaaacgtggaaactgattttaccgaacaggaggagactagaagctaggtcttgggcaggaactgaaacctggacaggaaaagaaatttgtgaaattctctgtctccggttgtgtgtgtgtgtgtgcgtgtgtgtgcgcgcgcgcgtgtgtgtgtttatttttaatctctgccctgtctctgcatcctgattcattcatttcctttttcctcctctccaccctcacttccttttcttgtatttttaaaaattgtagtaaaatatacataacaaaatttctcatcttacccatttttaagcatacagtccagcggcattaagtacattcatactattacacaaccatcagtgtcatgcatccacagaactctcctcatcttgcaaaactcaaactcctgtacccataaaacaagaactctccgtcctgttccctcctcaccccagcccctggctacccccattccactttttgtctacaaatttgactactctaggcacctcatatcagtggaatcatacagtatttgtctttttgtgactggctcctttcacttagcatgctgttgtcaagaactatctatgttgtagcctgtgtcagaattttctttccttttttaaggctgaataatattccactgtatggatatattacatcgtgtttatcccttcatctggtgatggacacttgagttgcttccactcactcccagatgttttttcccctctctgatcctcaaggaatagaaaatgcccagccttcatttttacattttacaggtagtggagctttaaaaaagagagtactttgggaggcacagataggagcatcacttgagcccaagagtttgagaccagcctgagcaacatagtaagacccagtctctacaaaaatcagctgggtgtggtggtgcgcacctgtagtctgagctactcaggaggctgaggtgggaggattgcttgagcccaggaggctcaggctgcagtgagctatgatcgtgccactgcactctagcctaggtgataggtgagaccctgtcttaaaaaaataaaaataaaaaataaaaaagagactaaattgattattgtctctctggctgtggccacttctgcctgccttcctagccgcctgccttctgcctctcttgcctctcctgaggctgctgcagggttgatccctccttgcctcttccttacactccttcgaggcaccctggtggttcgtttcctcctcctgttatcatacactttccttgtttttccccattgttttttctcctctgtatcctggtgccaacctcagtgggtgctccctgcaggcaggtggaagaaatgatggtgctgcaggatgaatgaggctctggccccaaacttggctgctgtgactgcagtggtcccagcgggggcctgaccaggcccatctctgcgcttctgggccacttgcctctgtctggggcttgtgtcattaactaagacctgcccttgagtaaaccaccctgaggacagagaagtccactgaggtgcggtgactgaggcagaactcaatcttttagaggtttattctatcagggttgaggatgcaccggggaaaagaaacacaagttatagtaggatctgtgttctgtgctttttccaaagagggctctggtaacgtcagtatttaaaggggaaagagcaagcaggagggagagaagaaaaataaaagaaggaagggtaggcattaggcaagtggtaccattcttgtgaggctctgattagcacttagtgaatctgcattttacatgtgaaaagaagggagttggggaaagtgaatcatggtcttgcactcagtaaatctacgttttacataagataaagtaagcttatgaaattagagctgtctgtttgggaacaaaaagaaggtcagtttttgcatgactcacttcccaagcttaactttctttttctttgacatagtgagtttagggccctgaggttttatttttctttcacagcacaaagatacccagttgacctttttttttcataacagaatgatgcattttggttcagtagtgtttcctccaactgctctacccctaatttaaaaaggggagggggtgagaaatcagtcccaaatgtccctgtaagttttggtgtgatgccagcctccaactggctgacatgagcagttttgtaaaggagagaccctcttgatggcttcacgtatatcatggggtgggatggggacagtcattattgacagccagcctgtgccaagtgtttcccagcagctctctgggcgattattccagccaaggatggccatgccctaaggttaaggaacctgcttgaggtcccagagctggaattgagattgacaacctcaggctgggtggctgtacagcctgggcactctctgtgccccctgccctcactcagccactccctccataggtcaccaggggtaattccctactgcccaggcagagggctggggctggaaggggtctagatggtcacttagtggttccccaagctgagtcctgatcaaaatcatctggggaattttaaaaagaaaaagaagacttgaatcagtgtgtgctagggtggtgtctatggatgggtattttcaaacatttcccgggtaactctgatcttcagcccctgctctgatcctccctttcattttccagtccaggacactggggaccggagagatgagatgccgtgaccaaggtcactgggttgtagccagagccagcatcaggtccaaagtgcgatctcagtagccagttctccatgctctgtgtttgttcagactgccagccctgctcaatggggctctggaacttaaggaaggcctttgaccataggctgggcttgcaaaaccttggtaggaccctgcccttggctggaaacctcagggctccagccagggctcatccccaagaagatacactgccattctccaaagtgtgggggcctctcccctgaagggcgctgcctggagccacctcttgttcacaggcccatgttaggccccctgggacaggttgccttggctccatatgtggttctgcagatcacacccaggcttgagaaatgcggtgacacgtgaactttgcattgatgtgaaaaggtccaaattaaaggtgatggcaagcacagctaagtccaagaaagtgtggctcctatttaggggtggtgggctaagagacaagacacagtaccctttcaccccggtgggtattctaagttgggttagtttgttcatcaattcattcattcaacaaatatttattgggttcccaataaatcatcttactggtccttggagatctgctgtgaacaagacaaacacaaccccacctctgtggcctgcacaaccctggaaggtcacacactagaaccctatcacttggcctctccatgaatcaccgtcatgtagcccctcgacaggggactcttgtgttattactgacaatattgatggttttagacacatattatcccatttaattttcccaaccattctctcaagtggggaaactcaaacttagaaagtttaatgaccttgcccagggtcacaccatgagtgatggcatctgaattcagccccagttctctctgattccaaagctggggttcttgacagccacattgtaccacctggtacccttgctttttgtcaggggcaagtataagaagaaggcaggtgacacgtgaagctttatttgctctaaaacttgagcgatttcatatgtcctaaaggaggagttttgcctcttccttcccagcatgaacacttggcatggtgtgtacatcttcattcgtttggtctggccaacagccactcgggagctgaatgaggtgttgtgaccatgacctgggtattctcttggttcagataccttcttggttggcacattcactttctcgtccttcccttggtctttcttgcttataatatatcccttttttaatttttaattttttttaagacagggttttgttctgtcacccaggctggagtgcagtggcacaaacatagctcactgcagcctcaaactcctgggctcaagggattctcccacctcagcctcccaaatagccaaggctacagaggtgtgccgccatgcctggctaatttcttatttttttgttgaaatgaggtctcagtatattgcccaggttggtctcaaactcctggcctcaagcaatcctcctgtcttggcctcccaaagcgccaggattacaggtgtgagccatcacacctagcctaatgtatcatcttattaaatcagatcaaatcctttttgaaaagacttaaaattgaaatcactttaaaaaacgaaaggatgcagggctaccctccctgggaccctggggcccaggtgtcttggcagctgccttgggctgggccagaagatgtttttgccagtctgtggtaggaaaaagggtgcagagtagcgagtttttaataaagctaaactggccgggtgcagtggctcacgcctgtaatcccagcactttgggaagccgaagcaagtggatctcgaggtcacgagtttgagaccagcctggccaacatagtgaaacccaatctctactaaaaatataaaaaattagctgggcgtggtggagggcgcctgtaatcccagctactcaggaggctgaggcaggagaatcgcttgaacgtggcaggcggaggttgcagcgagccgagattgtgccactgcactccagcctgggcaacagtgtgagactccgtgtcaaagaaaaaaataaaaataaagctaaatctaatttaaagtaccattttataatcagaggtagtcttccttacttttttttaagcattaaaaatgccctttcttttacaaaatcatgtttgtggtggagggcagtggtgattgttgcttatattgttattgtttttgcgtcctttctgggcaaaataaaaagtttgccttggtgtgtccatttcctttgtggttttaatagctggtgaaatctgaactatgaaaatgaccactaattcaggtgattggttttcaccgttcctccaagccctggggtacctggggctctctgtcccggtgagtgagagggagccccagagagtcctttgcccatcttcaatcagagaagccctccttttttatatgtaggattagattttttttatgattttgtttggagataaaaggatacccctgccaaaagttgaaaagcttctcctctaggatgtgtgttgggggggagtgggggagggagggagtcggggagggaggaagggaagggtgggaggaaggaaaggagggaggcaggaaagaaggaagggaggaagaaggaaggagggaatgtagtgactttggtgggactgagccatggtggatcttctacttggcgagtatttcttgcctatatactagtcagagttctccagagaaacaggtaataggatgtgtaaagtctacttgggtttgtaagaccagcctttggttgaagaccttccttgggtcctagcagacagaaaccaggagagacagagacatctatatccggctacatagagaggttatctgtctaactctctgcctgttctctatctatatctgtctgtctgtctgtctgtctacctacctacctgtctctgtctgtctgtctgtctacctacctacctatctaatctacctacctacctacctatctgtctgatctacctacctacgtacctacctacttagaaattgagagatttactttgaggattgacccacatgattgtggggactagccaagtccaaaatctgcaggctggagatttagggagagctgatgttacagtttgagtctgaaggcagtctggaggcagaatttcttccttgagagagacccagtttttttctcacgaggccttcagctgattaaatgaggtgtatgtacccacagtatacaggttaatctactttattcagagtctactgatttaaatgttaaactcatttagaaaatcccttcatacatacatctaaactagtgttagatcaaatatctgggtactgtggctcatccaggctgacccataaaattaaccatcacacctgtgcaagcgcttttccctcctggatggtgtcctagggatgacagaggaggggaaagccaggtctctgcttcaaggagacaaaattatgcatacgaagaaattaagaatgctgctgtgtctgtggagtagccattcttttattcctttactttcttaacaaacttgcttttacttaaaaaaaaaaaaagaaattaagaacaagaccatttatatttaagtgccaacttatgaaatgtaaaaagggatttagaggtgacaaggcaagtgagggctggaggatttggagagatttcatggtgtagggactgaataggagcttccagaacatggaggtttcagataagtgaggacacagaagtcttcacaaccagagtgggcaccacaggacaattctacatctatctaggactctgagtttttgaagggtttccatatgcattgtttggtttgctgcttgcaacaaccctgttgttttaactgaaggtcttagggcctagggattccccagaggccacacaacttgccagtggcaggggaaggtcttactcttccacagccttctctgtctttctccctttatggagcataatgaaatgtacgtgcacacattcatgtagatttcattatgtccatgtagaattcattttgatttcaaatatgtttccttcccagagaaatcctgtgaaactatgacattgtttttctctctctccttctccaggtcttattttccttctttaccatcctgattaactctatttttgtttgttttctcttcttgcccgctcccagacacgaatgcagagtttgagtccagatcccaaagcccagtacacaagtatctacggagccctcaagaaaatcatgcggaccgaaggcttctggaggcccttgcgaggcgtcaacgtcatgatcatgggtgcagggccggcccatgccatgtattttgcctgctatgaaaacatgaaaaggactttaaatgacgttttccaccaccaaggaaacagccacctagccaacggtattttgaaagcgtttgtctggagttagaaagttctcttcttcaacacgtccctccccagggtgttcctccctgtgacccagccgcctcgacttcggcccgcttgctcacgaataaagaactcagagttgtgtgtgcaatgcacacccagacacacgcacgcacacacacgcgcgcgcacacacatgcttttttctgttcccctccgctttctgaagcctggggagaaatcagtgacagaggtgttttggttttattgttatgtgggttttcttttgtatttttttttgtttgttttgtttttaaacattcaaaagcaattaatgatcagacataggagaaaccctgaatagaaacaaaacttttgaatgctggattcaaaaaaaaaaaaaagttatctggacagcttctttgagactatttaaaaactggtacaacaggtctctacaacgccaagatctaactaagctttaaaaggtcaagaagttttatggctgacaaaggactcgcgcaacgcagaaggcctttcccaccttaagcttccggggatctgggaattttacccccattctcttctgtttgtctgagtctcatctctctgcaagcaagggctgaaatcattttgtttggttgttttgagggagagaggcggggtgggggggtgcaaatctgccagcagctcttacgtaaggcatgttttattggggagggctgagcttttattttctcctctccagtggggttggcttttattgtttcttgtttgggtttggaatggaaatatggatagcagcataaagtacttttattttgacaaaattcatttttttcaacaatggagacatagatttgacccacaataacttctccccctctctttttactctgctcaaaaagcatctctcctcccattacccaaccttggtcataagtgtgcctggctggtttgcagatatttgttctgctttgtaaaaattggccattagtgcatttattgagatgatctctaaagagctatgccctgacctacccctgattctatgacattggggcccttcttttgctgaaactgccttacgtaatggttttactccttgaaagagatttgacggaatccattttatgccaagtgctgccctgcactgtttctgcaatatgtggtgtatgctgtggtgatcttgctgggaatgattataagtgtgtgtgtggtgggggagtgggtattacatgcattgctgaagagtcatcctggtgttcctcattcctcccaccttcccgtggtcattttaattacggggcagtgtcaccgcaaagggaggaaactcaaagccgaaagcaaaattccaggcctgattctggcttttgaggttcctggttcttgaagccaggcctgacccgactctcagatggggtcagtcccgtcgctttgcagactgaccctggaaatctacaaaatgcagattttcctgatttcctcttctcttgcccagttttttttttttttttttttttttttttttaaagcctggattgtaaccagattttcttttttcccccttctcagctgtagatatgatatctcctttcagggccccagcttaagggcaaagtgagttaatgtgtagacaaaggcgagggacaagagagagttaacatctagacagtggaaaaagccatggtgtgtggtttctgggaaccaccaacacttgcaggtttagctttttcccagggttgactacaagaaagaaaaccatgtttttgcaagattaaaatgtggttgagtgtgcctaaattaaccatccccatttttatcatatttccaccatcacttcagggttttaagagtcagtgctcacctgggcggagctggtagtacattttgcttcttagaaagctaagtcctgggttccgtctgattttaggttccaggaacttcctgagaacacccgatcgcagagggtaattttctggagtttgttttgcagggatagctgggagtatggccaccctgctccacgatgcggtaatgaatccagcagaaggtaatgtttcatggtcccagggaggggcagtaggggatgtgcaaaggggcacaaaaaatggttgtgggagagtggagaggactgaaggtgggcagagcggctcctagtctccagtcagagcagacaggagaattgaattttttactacgttatcaaaggcctcaagaaaggacgtgaacataagagtttttggtattcctgtgctcggagctactcaaagtgtgttctacagaccagcagcatcagacatcttgaggggtgttggaaatgctaattctgaggctgggtgcagtggctcatgcctgtaatcccagcattttttgggaggccgaggtgggcagatcacttgaggtcaggagttcgagaccagcctggccaacatggagagacccccatctctactaaaaatacaaaaattagcctagtgtggtgtgtgcacctgtaatcccagctactggggtggccgaggtgggagaatcgcttgaacccagcaggcagaggttgcagtgcaccgagagtacgccactgtactccagcctgggccacagagccagactccatctcaaaaggaaaaaaaaaaaaaaaaaagggaaatgctaattctggccggcatggtggtttaaaactgtaatcccagcactttgggaggccaaggcaggcagatctcttgaacccaggagttcaagaccagcgtgggcagcataatgagaccccgtctctatgaaaaatacaaaaattagccaggtgtggtggtgcatgcctgtagtcccagctgttcggaaggctgaggtggaagaattgcttgagtttgggaggttgaggctgcagtgagtcgtgattgcaccactgcactcagccagggcgacagagcaagactgcctcaaaacagaaaagaaaacaaaggctaattctcaggctttacaccgaacctactggatcagaatccctggagctagggaccagaatctgtttattggtgattctgttgcatgcttttgcactattctaaaacctatgtgtgcatacacacacacacacacacacacacactcactctcttagcccttgttaacccttatcgatcctagacaaatgtatggggaacccatcagaggctattctttagggctagtgttcaatttgactgtttttaatatgaaagattatggatcacatttcaaacagatgtgaacgtggagagaataatacgatgtaccgcagtgtgtccatcactgttcttcagaaattcacattgggtcattttgttttagccatctctttccacattatcttctttttgttcttttaaatttcgggggtaatatgaagcaagcctcagctgggcagaccagagtctgttccctttttatatatcccggcgtcttagccgggtactcgtgtctgaatagtgagtaccttttgggcctggcactgggcaggccttcagctgggtcattctctacctggcgatggctttaggtgagttgtggagctcttttcacctttttgcctcatctgaaaatagttcctggccagaagggagaattggtgagaaaagtttcaacattttaagtctcatgctataagtttgcctgtcttttgtctttcaaggtgaagctattaaatttgttctcagctaccctccatgtcctagcagatagaggacttggtctgaccttcagggttgtgatggggcaggttgggaggtgggcggggagtctctgtggtctgggtgctgaggttgacccgatgggcaggtgaagaaaatcaccttctccattccccttgatttctttatcgtgtgccgcacgaggcatgctgaagggacacacacctttccccctttttatttacaaagtagagagctgagaaagacagctcatgttctgttttgttttgtacacattatctttctcaagagatgtgatgtccttaagtaaactgacctgccttcatggcttgtcctgtaatgaatgcgttcaagacagtgttttggggacaggaaagaggcattcttaggtaagcggtggtggggggtggggtggggtggagaggaaacccttctaggaagtagttcaatgaaaaacctaaaaatgcccaaataaacattcgcttacatattatatatcttgggcttctttttatgacagttcattcagggacccagtcagtaaacaggtagttaacttcgtgtaaccaagcaagggttttgtttatcttttttaaagtagaaaaaagtgaggctcaaactctctctttctccttgtcataactattggtttacagtctttatttgtttaaaagtaaagcacattgtatgtatttatttggcaatacatgaggccattaaaaccctgagcctaaggtaccacagttagtctcatttgcctcttgtcctgtgaactccacttagaatgtcattgaacttgggcagacataattctagtgtctgttccaaacgcactgtgtcacagaagctagaattaccattagaggcacaaacccctgagaatacacaagggggcacgcttccagtagatgtgttggggaaggaggagggcagaggggacaggggacaggattcagctttgtggtgggtcctgagggttcctaccaggggtagccaggatctgggaaacagatcagcgactctagtctgaagtggctgcctggttcgggggctgccttcagcaagattcaggcaggagagacggaaatagccaccttccaggcgtgagtcctggagataaaaatggattttaacctaggactgccgggagctggccctccgcggctgctcagactagggctgtgtgtgctggctctcgcctgtttccggtgtctaactggcttgtttctctttatggcttggcttcattccgacctggggtggggccacatccaacccactgcccactggctgtccgtctggcctgccccgcggttccaaccacagtggtgaagcagcgcttgcagatgtacaactcgcagcaccggtcagcaatcagctgcatccggacggtgtggaggaccgaggggttgggggccttctaccggagctacaccacgcagctgaccatgaacatccccttccagtccatccacttcatcacctatgagttcctgcaggagcaggtcaacccccaccggacctacaacccgcagtcccacatcatctcaggcgggctggccggggccctcgccgcggccgccacgacccccctggacgtctgtaagacccttctgaacactcaggagaacgtggccctctcgctggccaacatcagcggccggctgtcgggtatggccaatgccttccggacggtgtaccagctcaacggcctggccggctacttcaaaggcatccaggcgcgtgtcatctaccagatgccctccaccgccatttcttggtctgtctatgagttcttcaagtactttctcaccaagcgccagctggaaaatcgagctccatactaaaggaagggatcatagaatcttttcttaaagtcattctctgcctgcatccagccccttgccctctcctcacacgtagatcattttttttttgcagggtgctgcctatgggccctctgctccccaatgccttagagagaggaggggacggcacggccgctcaccggaaggctgtgtgcggggacatccgaggtggtggtggacaggaaggacttgggaaggggagcgagaaattgctttttctcttcctccctgggcagaatgtagcttttctgcttcactgtggcagcctcctccctggatccttagatcccagaggagggaagaaaatttgcagtgactgaaaacagtaaaaaaaaaaaaaaaaaaaaaaaaaaaaaaaaaaaaaaaaaaaaatttatgtatataaaagttgcattacacagtacaaaatagatggataatgtttatcctttatttttctatgtagaagtttttgaatttgtgtgtgtgcttgtgcgtgtctacacctagtattacggctgggactctccagctgtttttgttgttgttatgtttttaagagggttgaattcttccatcaggtgaacgaaaaaggcaacaaagtaataaatcagtgaatgtggccggcagctgtgtttagcccctccagatggaagtttcacttgaatgtaaaataataaagtttatattttgaatttctcttttcatgggggaaaaaaggtacgttaaaaaaatcaaaataatgatatgtcacttgcagctacctttttttttcttttaaattcaatcagccaccttcatgtgcctttttcctttgtctttccccaaaattccaggaccagagatctggccctggcctattttctcttgctgtgtacacacacgcacacatgctgggtggcaggatctcgcccgctggagggtggtggagcccagtagaattggggtgactgggcataaacctgctgagactgcttccttccctggttgtgagtgatgtgaatgcctgccttccccggtcagcacttagaagcccttgataggcagcatttggcgacttgtggggcaggtgtttgggataaatcctaccttcatcctaggacttatttctgcatcagccttttaactcaggcacttcaggtaacgtgatctatgtgtgttttgactgaatctcatctcctgtgtttccctgtgcagtctagggaagcatgtctccagtctttgtccctgtcttgtcccaaccattaattctcatgtcacagcttctcactgcatgtgacaagagccaggcctatctgctagggccctgcggctgaggtctgacctggaccctcatgcccgagtcggaagacccctctccagaagccattctgcatccttgtctgctctgcgtcacccgagaacacaggcttcgcagcctcgctttctgaaatggtgtgtgccgagtcagattgccgctcagagaaaatacaagcccgttttccctagctgtgccatttggtgctctgccaggctgccgtgcaagggaataccgacgagacgagctgcactgtctctgatttggagccctcaccggagcttgtctttaaaaatgagcaggaagctcatgtatgtttgcatttcagtgagccgggtcctgacctgccgccacccatcacggtcagcgtggtgcatcttaccgaggaggcgcaggcctggattcttttgagtggtgctactgcctaggaagtaacacgtggagaatttccatcttgggaccatgcacacagtgccttggggagtagattttgccctaatagcgatgaagaattttatcagtcagtggagttcctttttcagatcagggatgggaaagagccaaactgggtacctcccacgtgtgccccgtgaacagccctttgcagctgggctgtggggcttggctgctgccctgtcccatctggcagttaacgccttctccctgctctgccccccactccccaaaaccagttgcagcctcaacccacatggggatgtagaaagccgtaaagtccacgctactgttgaaaatgtttacatctccgctctcaacctgccttgggttcgtgttaaatggtgttaaattctgcaaatggaggggaaaaaaatcaaattctaaatttcaaagtagaatttaaagcaaatttgtaaaaaaattatcctaccaccccttttggtccacttaagatatgccacgctgaagcaaggtatttcctactggattttgctttcactggtgtttagaaaataaacttgatttctctaggagcactcctttggttagagggatgcaagaaggagaggtgaaggtggcgtgtggtggctcatgcctgtaatcccagcactttggggaggccgaggcaggcggatcacttgaggccagcagtttgagaccagcctggccaacatgatgaaaccccatctctactaaaaatacaaaaaattagctgggcatggtggcaggcacctgtaatcccagttacttgggaggctgaggcaggagaattgcttgaacccaggaggtggaggttgcagtgagctgagattgtgccactgcacttcagcctgggcgacagagtgactctgtcaaaaaggaaaggcaaaaaccggaccctggagctctgtgggccctgattgcaggcccctccctgtgtgatgagggatgagtcagcttggggagccacttggccagcctgcatgcctggtcatcaggaggttgagaaaagccttgaaagttgtgaagcactgagcagatacaagtgtttgttaattttgtagaaattaactttcccatctggcctttatctccaaagttggtattgttgctccacgcagactgcagtccggtttcttattgtgactttgacaatgcaaagtgcaaaataggaagaggcctccccaccccactatcccaccctggtgaccaattcagtgtaacctttgcacgtactcagtcattggtgtctttggagtgacatctgcagccagttagtgccacctgagtacagcactcgtacttttacatgatgtgtgtgtgagtagctcttctgtccaaaccatgatttgaggttcaactacctgtagatcaaagctttattttagaacgataaactgattttttccaaatgggtgaaatcttctccccatgactatgttttcttaactttgcattgaatctatttactgggttacattctatgtgtagtttgctttcttcatttttttttcttttaaaatgctcatgtcttattccaagcaccttcctccaaagtccccataaagctgcatctccaacacattgttatgccaataaggttttatttaactttatttaaggatgattgtgtctttgaatgacaaatgtactgctgcttcctacctgcaagacgaacaatgtatgtttcaagggtgagcaagtgttatttcttaaatttctcaaatgcctgtagtaactattgtttctgcctctcaattgttgccagctctttgaagaaggggagaattgtgtgtttttgtgtggggatgtttctgatatgctgctacagttgcaaaacactggagctagagaaaataaagtactgatcttcgaa

SEQ ID NO: 1263 - DNA, 32902 bp, Homo sapiens
ctcccaatgaggtccaccttgctgtcctgttgcttttctgtttggcctgattggagtgttcccaagggcagggatttctgtgctctgagtgtctggtacccagcagggatgggaggggaggcaagggagttagatgccagccctggagggtggatggggcaagcaggacagcaggaaggaggctagtggtgcccaaggggcagagacctgggaacccagaggccagtgatggaaagggttagcgccaggcagagaggggctggacccacacacaagaccaggcagagcaaacaaacgtagaggagaagggctgggggcaaagtcctggggagaggaccagccactgtcagcagtgccagggccaccacccctggggaggagccattgggctactcttgaggggccagaggtgagcctgaacactccacagctgctgctcctagggaggagctggtaccatgggtgtcaggcaacagttggccttgctgctgctgctgctgctcctgctctggggcctggggcagccagtgtggccagtcgctgtggccttgaccctgcgctggctcctgggggatcccacatgttgcgtgctacttgggctggccatgttagcacggccctggctcggcccctgggtgccccatgggctgagcctggcagctgcggccctggcactaaccctcctgccagcacggctgcccccaggactacgctggctgccggctgatgtgatcttcttggccaagatcctccacctgggcctgaagatcaggggatgcttgagccggcagccgcctgacacctttgtagatgccttcgagcggcgagcacgagcgcagcctggcagggcactcttggtgtggacggggcctggggccggctcagtcacctttggtgagctggatgcccgggcctgccaggcggcatgggccctgaaggctgagctgggtgaccctgcgagcctgtgtgccggggagcctactgccctccttgtgctggcttcccaggccgttccagccctgtgtatgtggctggggctggccaagctgggctgcccaacagcctggatcaacccgcatggccgggggatgcccctggcgcactctgtgctgagctctggggcccgggtgctggtggtggacccaggtgagggccttggagccagtggagaatggaagggggcaagggcagggactataggacaggggttctgctgggactggcagaggcccttggtccccacctgcctactttcacaggcaattataatcaagacttatgagcagaaagtagttctcaggtcatcagagtttaattttcccacaatttgaccaaaaatactaatgatgggattctttaccaaacaacatggatgcttttctctactagctgctcctctgcctgcatctgtgggtctcagatcccgcctcgcaacctcaaaggtgagccttgcctctgtttctcctctgacccatctctgcagacctccgggagagcctggaggagatccttcccaagctgcaggctgagaacatccgctgcttctacctcagccatacctcccctacaccaggggtgggggctctgggggctgccctggatgcagcgccctcccacccagtgcctgctgacctgcgtgctgggatcacatggagaagccctgccctcttcatctatacctcggggaccactggtgagggtgcccattagccctagcaccagcctctgaactctcaggctgacctgaccccacacttgacttgtgactcagtgttgacctctgaaaccactttaccctctgattttgacatttgttttttgtttggctgttttttttttcgaggcagagtctcgctctgtcgcctaggctggactgcagtggtgcaatctcggctcactgcaacctccacctcctgggttcaagcaattctcttgcctcagcctcctgagtagctgggattacaggcacacaccactatgcccagctaatttttgtatttttggtagagacagggtttccccaagttagccaggctggtctctaacccctgacctcaggggacctgcccaactcagcctctcaaaatgctgggattacaggcgtgagccactgctcccagacttgattttgatatttggcctgaactctgacccccaatgtaatttgagaggtcaatgccagaattcttcctgtgtccagtaaacagccactgaaacctttgatcttgacatattactttcagtccaaattcagcctgtgaacccaaccacaaatccctatacttgactgttctctgagagcctcaaaccccaatgtaggcctggctgttggagatctatccctctggtcaggcccctctctgtgctgtcatgtcaccaccctgcccttgccatgccttcatcccaaggcctcccgaagccagccatcctcacgcatgagcgggtactgcagatgagcaagatgctgtccttatctggggccacagctgatgatgtggtttacacggtcctgcctctgtaccacgtgatgggacttgtcgttgggatcctcggctgcttagatctcggtaagcccacttctgaggatccctccagtctacaggaccacgggagtaagtgtcggcgtggggctgtcaaggcaaaaagacaccataggttacccagcaccctgtgttctcacttttgagaagggacacccaccaatgactaccagggccgcatggacagaagcttggacacccacacagtccctgatggccatgctttggtcaggaggtgacaagacctgatacgagtgatggtcacaggcatccaaggaaggtgtggtgctcaggagatgatggggatgctggcccagatttgtgacatggccccaagggcagctggagtaggagtgctctcaagcactccacagggctgtctctctggactcttgattcagagtctagatggggacctctccatagcttgttctttttgttttctctcttttttttttattttaatttttatttatttattttttttcgagacagagtcttgctttgtcacccaggctggagtgcagaggcatgatcttggctcactgcaacctctgcctcctgggttcaagcaattctcctgcctcatcctcctgagtaactgggattacaggcgcccaccaccacgcccggctaatttttgtagttttagtagagacgggatttcaccatcttggccaggctggtcttgaactcctgacctcgtgatccacctgccttggcctcccaaagtgctgagattacaggtgtgagccaccgcacctggctattttctctctctctctctttttttttttgagacagagtctcgctctgtcgcccaggctggagtgcggtggcatgatctcggctcactgcaagctccgccttccaggttcaagcgattttcctgcctcagcctcctgagtagctgggattacaggcacgcaccaccacgcccagctaatttttgtatttttactagagactaggtttcaccatgttggtcaggctggtctcaaactcctgaccttgtgatctgcccacatttgcgggcatttgcctcccaaagcgctgggattacaggtgtgacccaccacgcccggcctttttgtgttttccagctattatcatggccatgtgtggttgctcatgcctataatccctgcactttgggtgccaaggcaggaggatcacttgagtccaggagttcaacaccagcgtgggcaacatagtaagaggccatctgttaaaaaaaaattttaaaaagccacgcatggtggtatcgggggaacctgcccctaatatttcaatgtaggttctttttttttttttttttgagatggagtctcgctctgtcgcccaggctggagtgcagtggtgcgatctcagctcactgcaagctctgcctcctgggttcatgccattctcctgcctcagcctccccagtagctgggactacaggcgcctgccaccgcgcccggctaattttttgtatttttagtagagatggggtttcacatttagccaggatggtctcaatctcctgacctcatgatcctcccacctcggcctcccaaagtgctgggattacaggtgtgagccactgtgcccggcctcgatgtaggttctttctattttccgtaagtgctggccagctgagaaataaagagaaagagtacaaagagaggaatttgacagctgggcctccgggggtgacatcacatatcggtaggaccatgatgcccacctgagctcaaagccagcaagttttattaaggatttcagaagggaagggggtgtaagaaccgagaataggtacaaagatcacatgcttcaaagggcaaaaaacggaactactgatcagggtccaacaaagatcacaaggcaaagggcaaaagcagaactgataagggtctatgttcagtggtgcacatattgtcttgataaacatcttaaacaacagaaaacagggttcaagagcagagaactggtctgacctcaaatttaccagggcggggtttttccccaccctagtaagcctgagggtactgcaggagaccagggtgcatctcagtccttatctcaactgcataggacagacattcccagagcggccatttatagacctccccccaggaatgaattcctttcccagggtcttaatgttaatattccttgctaggaaaataatttagcaatatctctcctacttgcacgtccacttataggctctctgcaagaagaaaaatatggctctttttgcccagccccgcaggcagtcagaccttagggttgtcttcccttgttccctaaaatcactctcattctgttctttttcaatgtgcgctgatttcacattgttcaaacacacattttacaatcaatttgtacagttaacacaattatcacagggtcctgaggtgacgtacatcctcagcttatgaagataacaggattaagagatgaaagtaagacaggcgtaagaaattataagagtattatttgggaagtgataaatgtccatgttatcttcacaatttatgttcctctgccgtggctccagccggtccgtctgttaggggtccctgacttcccgcaacagtggtgagcacttgtgagcgattcttctgcctcagcatcccgagtagctgttattacaggtgcccaccactatgcccggctaatttttgaatttttagtataggtggggtctcaccatgttggccaggctggtctccaacacctgacctcatgatccacccacctcagcctcccaaagtgctgggattacaggcatgagccaccgcgcccggccaaatttttcttttttttttaattatgaaaagtttagctgtgcccggtggttcacgcctgtaatcccagcactttgggaggctgaggcgggtggatcacctgaggtcaggagttcaagacaagcctggtcaacatagtgaaatctgtctctacttaaaatacaaaaattagccagtcatggtggctcacgcctgtaatcccagcactttgggaagctgaggccactggatcacctgaaatcaggagtttgagaccagcctggccaacatggtaaaaccctgtctgtactgaaaatacaaaattagctgggcgtggtgatgcgagcctgtgtttccagctactcgggaggctgaggcaggaaaatcgcttcaacctgggaggcgggggttgcaaaaagagtgaaactcccttgcaaaaaaaaaaaaaaagtgaaaatagtttgatgacatctcatgtatcttcgcccagcatcaataattgttaacatgttgccagtttaatttcgcatatacttctctgtttcttttttgtttgtttttgagacacagtctcgctctgtcacccaggctggagtgcagtggcaccatctcagatcaccacaacctctgcctcccgggttcaagcaattctctgctgaggctgagcctcctgagtagctgggattacaggcatgcgcctccacacctggctaatgtttgtattcttagtagagacggggttttgccatgttggccaggctggtctcgaactcctgacctcaggtgatccacctacctcggcctcccaaagtgctgggattacaggcgtgaaccaccgcgcctggcgtctgtttgttttcaaacttttatcatggccaggtgtggttcctcatgcctataatccctgcactttggggtaccaaggcaggaggatcacttgagcccaggagttcaacaccagcctgggcaacatagtgagagtccatctgttaaaaaaaaaaaaaagccaggcatggtggtgagcacttgtgagcgattctcctgcctcagcctccctagtagctgttattacaggctcccaccaccgtgcctggctaacttttgtatttttagtagagacagggtttaaccatgttggccaggctggtctcgaactcctgacctcgtgatccgcccgcctcggcctcccaaagtgctgggattacaggtgtgaactaccgtgcccggccaaatgtttttttttttttttttgagtcggggtttcactattgttgcccaggatggaatgcaatggcgcgatgtcggctcactgcaacctctgcctcctgggttcaagcgattctcctgcctcagcatcccaagtagctgggattacaggcatgtgccctcacgaccggctaatttttttttatgtttttagtagagatggggtttctccatgttggtcaggcttgtctcaaactcccgacctcaggtgatccgcccacctcagcctcgcaaagtgctgggattacaggcgtgagccactgcgcccggccaaattgtttttttaattatgaaaagtttaggctgtgcccagtggtttacgcctgtaatcccagcactttgggaggatgagtctggtggatcacctgaggtcaggagttcaagatcagcctggctaacatggcaaaatccgtctctacctaaaatacaaaaattaccggggcatggtggctcacgcctgtaatcccagcactttgggaggctgaggccggcggaacacctgaagtcaggagtttgagaccagcctggccaacatggtgaaaccctgtctctactgaaaatacaaaattagctgggtatggtggtgggcgcctgtatttccagctaccagggaggctgaggcaggagaatcgcttgaacccggggcgcaggggttgcagtgagccgagatctagccattgcattccagcctgtgcaaaaagcgagactctgtctcaaaaaaaaaaaaaaaaaaaagtgaaaatagtttgatgacatctcaggtatcttcacccagcttcaataattgttaacatgctgccagtttaatttctttttttttttttctttgagatggagtctcgctctgtcgcccaggctggagtgcagtggcgcaatctctgctcacggcaagctccgcctcctgggttcatgccattctcctgcctaagtctccggagtagctgggactacaagtgaccgccaccacgcctggctattttttttgtatttttagtagagacagggtttcacggtgttcaccaggatggtctcaatctcctgacctcgtgatccgcccgcctcggcctcccaaagtgctgggattacaggcatgagccaccgcgcccagggccagtttaatttcacatgtacttccctgtttcttttttgtttgtttgtttgtttttgagacagagtctcgctctgtcgcccaggctggagtgcagtggcaccatcttgggtcaccgcaagctccgccccgcccgccccccccccccccccagggttcaatcagttttctgcctcagcctcctgaatagctgggattacaggcacgcaccgccacaagcggctaatttttgtatttttagtagagacagggtttcgccatgttggccaggctggtctcaaactcctgacctcaggtgatccacctgcctcggcctcccaaagtgctgggattacaggcgtgagccaccgtgcccagccacttccctatttttttccagaatatatcagagcaaatcctagacactgcatctttatgcttgtaaatattgcagtacatatctctaacatataagcactgaagaaactgtaaccaaagtgattattacacgtaacaacattaatatcatatgatgtccttaatatcatatgatgtaaccccttaatatcatatgatgtccagtctatgttcagatttctccaatgggctgttttggtttggttttgtttttagagacagagtcttgctttgtcacccaggctggagtacagttgtgtgatgttggctcactacaacctctgcctcctgggttcaaacgattctcatgcctcatcctcctgagcagttgtgattacaggtgtggaccaccatgcccagctaatttttttgtatttttagtaaagacagggtttcgccctgttggccagtctggtcttgaacttctggcctcaagtgatctgaacacgttggcctcccaaagtgctgagattacaggtgtgagctactgtgcccagccaattggctgtttttttgtttgtttgtttgtttgtttgtttttaacaattaaacagtctccccattgtatttgcttgtaggtctctgttcccctttcatctgcatttcttgttaaattggaaactttaactagaggtgttgttagattcagtttttttctttttcttttgagacagggtctcactctgtcacccaggctggagtgcagtggtgtaagctcggctcactacagcctccccctcctgggttcaagcgattcttccacctcagcctcccgagtagctgggactacaggtgtgcgccaccacgcctggctaatttttgcattttttggtagagatagggtttcaccatgttggctaggctggtctcaaactcctgatctttcaggtgatccacccccctcagcctcccaaagtgttgggataacaggtgtgagccaccacgcccagccccctatatcttattaatccatgtgtccatacgtcaatacaaccatacaaacattcaccaacccacccatctacctactcacctacttcctcactcattcattcattcatccacccacccatctatccatccttacacctatccatctttctctttttctttttttttttttttaagacagagtctcactctgtcgcccaggctggagtgcagtggcgctatctcggctcactgcaagctccgcctcccaggttcacgccattctcctgcctcagcctcccgagtagctgggactacaggcgcccgctaccacgcccagctaattttttgtattttcagtagagacgggtttcaccgtgttagccaggatggtcttgatctcctgacctcgtgatccgcccacctcggcctccctaagtcctgggattacaggcgtgacgatcctcacccagccacctatccatctttctacccccctgcctctgcatgtcactgtccagccatccatctactcactcactactctaactgtccacccatccatctactcactcactactctaactgtccagccatccatctactcactcactactctaactgtccacccatccatctactcactcactactctaactgtccacccatccatctactcactcactactctaactgtccacccatccatctactcactcactactctaactgttcacccatccatcttctcactcactactctgtccacacatccatcttctcactcactactctgtccacccatccatctactcactcactactctaactgtccacccatccatccactcactcactactctaactgttcacccatccatcttctcactcactactgtaactgttcacccatccatctactcactcactactctgttcacccatccatcttctcactcactactctaactgtccacacatccatcttctcactcactactctgtccacccatccatctactcactcactactctaactgtccacccatccatccactcactcactactctaactgttcacccatccatcttctcactcactactctaactgttcacccatccatctactcactcactactctgtcacccatccatctactcactcactactctaactgtccacccatccatctactcactcactactctaactgttcacccatccatctactcactcactactctgtccacccacccatctactcactcactactctaactgtccatccattcatctttccatccatccaccatatccatccacctgcccacccatctgcttagctgggcattcatttatcgtaatcaagagtgatttgagcttcgagtcagtgacaagccaaaataaaaattaaaaatgtggctgggcacagaggctcatgcctgtaatcacagcactttggaggccgaggcgggtggatcacctgaaaggtcaggagttcaagaccagcctggccaacatggtgaaaccccgtctgtacttaaaaaagtacaaaaattagccagctgtggtggcgggtgcttgtaatcccagcaactcagaaagctgaggcaggagaatcgcttgaacccgggagggagaggttgcagtgagcggagattgcaccactgcactccagcctgggcaacagagcgagactccgtctcaaaaataaaaataaaaaatttaatatttacagcccttatttagcattgctcactttataacaggcacggagctttcccggcatcctggagacaggatttgaacccaggcctgcctatgctcttctagtgagagcagtcctggctgggccaaggacacaaagatgaactcagtattgtcctgtatttcagggtgtgggggtgggtgagcacaggtgctaaaagcagcttcttacaacaatttggaagcatgacctgaaaccccctctcctgtcatctcccaggagccacctgtgttctggcccccaagttctctacttcctgcttctgggatgactgtcggcagcatggcgtgacagtgatcctgtatgtgggcgagctcctgcggtacttgtgtaacattccccaggtgaggctctaagattagggctccatggtgaacacccaagtatgaaatcccaggtaaaggtctcaggtaaagattcaggtactgaactcaagtccctcagataatacacctcatgcaagaaccccagataatgagtttcagacaaggcttccaataatggtttctttgatagctgtgctaccttgagcctcagtgtcctcatttggaaaacagggataatagcccctacccctatcatgagaatttccattaaaaattaattaattaaaattaaatttccattaaattaaagttctaggtaactactcttaggtgagaccccagatgaggcctccagtcacctctggtaacgtcccccaggcaaagctctgaggtcgcccctgcaggtaaccctctatttaagactccagtaactactctcatgtaagtaacccaggtagatcccttaggtagaggtcccccatcaccttccaggtaactcccaaggtaaggacccaggataacaccccctctaggtaaaggttccaaggcatgccccaagagcacctcctcctcacccttctggggacattcctgtagcaaccagaggaccggacacatacagtccgcctggcaatgggcaatggactacgggctgatgtgtgggagaccttccagcagcgcttcggtcctattcggatctgggaagtctacggctccacagaaggcaacatgggcttagtcaactatgtggggcgctgcggggccctgggcaagatgagctgcctcctccgagtgagtgtgcgggtacctggtgtgcagctgccctgaggctgagcccacaggacctatgtcaacactccaccctccaccccagatgctgtccccctttgagctggtgcagttcgacatggaggcggcggagcctgtgagggacaatcagggcttctgcatccctgtagggctaggtatgggggttgaggagcctttcctgggtggcaggggtggcgaccctcagtcttctgcttggctggaacgagctgctcaaaagcttgacgttggtgctcactagaggggtctgcagccttcatctggaccctgagccagtggcctgccttaccaccatctggggcctccgcctcagcttctcggctctgtccagctcccctgccttgatctcttgctctgatttactgggtctctgggtgtccatctgatttgttctcttgagctttctgtggaagacggcattccagccattggtcccttgtcctgtaccttctgttagtgtcttctcccagggccttgcaaggtcctggtcatatctattctcactgccatttgtctgtccgtcttccatcccttgttatccttttcctgtttctcatgggctccccataccgccttctctatacttctctctcattttctgtgtcgcttgtcgcagtctctcaaggtctctgaatgtctctctcatctctggatctccctgtctgtgtctttgggtctgtccttggcagggtgctgggtgatgaagagtccaccgttgttgaaaacctccagcagggggcttggctggtgggctccaggggttcttgttcctgctcctaccccaggggagccggggctgctgctgaccaaggtggtaagccagcaacccttcgtgggctaccgcggcccccgagagctgtcggaacggaagctggtgcgcaacgtgcggcaatcgggcgacgtttactacaacaccggggacgtactggccatggaccgcgaaggcttcctctacttccgcgaccgcctcggggacaccttccggtccgaggcagggtttctcggggcggggctggcgcggggccacggacgctttcagatcctagagggagtcaggctgaagaggcgggactttcctgtcgtaagagggcggaacttggagtcaggacttctcacgcgaaggcggggcttctcgattttcgagggggcggggctgactgggcctcctgatccccaaaaggggcggggcgggggcaagaggcggggcctctccttcccgggggcgtggtcacaagcgccggctccctccttgcagatggaagggcgagaacgtgtccacgcacgaggtggagggcgtgttgtcgcaggtggacttcttgcaacaggttaacgtgtatggcgtgtgcgtgccaggtgcggagggttctcattttaaacttccaacagctttgtgggtggaggggtcgttattctgattttacaggtggggaagtgctagggcccagagaggtttagagacttgctggctctcacagccagtgagcagagctgggcgaggctggagggtcagctatgggccctcgagatgggtcagccgagagtgaccagactgctctctaggttgtgagggtaaggtgggcatggctgctgtgcagctagcccccggccagactttcgacggggagaagttgtaccagcacgttcgcgcttggctccctgcctacgctaccccccatttcatccgcatccaggtgagcccagggtggcctggtgggtgggtggaagatcatagccagggggcgggtggatgtcacagtgattggaccatggtcactgccctgcaggacgccatggaggtcaccagcacgttcaaactgatgaagacccggttggtgcgtgagggcttcaatgtggggatcgtggttgaccctctgtttgtactggacaaccgggcccagtccttccggcccctgacggcagaaatgtaccaggctgtgtgtgagggaacctggaggctctgatcacctggccaacccactggggtagggatcaaagccagccacccccaccccaacacactcggtgtccctttcatcctgggcctgtgtgaatcccagcctggccataccctcaacctcagtgggctggaaatgacagtgggccctgtagcagtggcagaataaactcagatgtgttcacagaagtctgtatgtctgcgtggatgaaggagcaatggaggagtgcaggggctagtgccctgaagaccttattttagggtcttccctgtctcccagcaaagaacctcagccatccctgtgggatgaccctgtctgtgtaacgccaagggtgtgggaggagctggccagcctcgcagctgctctgaggtagagagatgagaactctgattctcatctgtgggtctttggtgggccactgaggcggtggctgggccagtggatgtggataactcccctgtgaagtgctgtggatacacaatctgacaaagcctggaggttgctggactgaggctagaagggcaagcaggaggtaactgggggaggagtgtccctggcactgtgaacggcacgtgtagaggccctggggcaagctttgtaggtggggagcagtgggagcagaggcctctggaaaatgggagtctgcacagtctcaggagttggacctgctacccgaagcctagtggagatgtaggtgggggtgtgtgggtgctgagcctctgcctccaaggcttctcggcccagtaggaactgaaggtgaggctacagacactggaacagttgtggtggtgccaggccggtggtccatgggttaactttgggagcacagctggggtgatgatggtgagaaaaggaaccccacagcagtaaacgccatatgcaaagggctgtccgtgggcagtgctgcagactgcgaccctgcccatcccttctcgtgtgcatagtaaacacaccccacagcaatgcttaagcacacctgagaatggccctgtgtggcagacgcacctgagtgtggttcagagttcccagctaaggaatctcagagattcattccttatttttgaggaacatctgggtccttagccctgtcccatggaatgctggtggtataagggatcctggccttttgctttcagttaaatgaaggttgccagggggaggatgttaagtgaaaatgccatataaactgcatgctttttgcaagtggttctcctgcccagcccaccgcccctggactctccccggtatgtaagcccccagtaaaaccctacatcttgtttgctggctcttagtctcttcttcggcctcttgaacctggtgccgtccccattggagtcagtaggggtttggcacaatactgtgctctcccgtgcctcagcctcctcatcaggctatgggccactttgagacagaactagccttcgaagggagcagtgcaggcagcaccccacgtgggctgtgaggcagctgggcttcacagagttcctggtagcattcgaggctcttcctgtcagccctgcagcctggagctgagacagtatccttttcagttggggtcccactatgagcatctgtttgtcattggtggtggccgtgcactgtaattctcttctgcgaagtgatagttgttgtgacttgctatttctgtgccctgtgtggccagtggagccccacatgttccctgaagagccctggccctttcatacaactggacttggatcctcccacgcacacagtaggttgtccagttccttcatactcctccagcctgggtgacagagtgagactccgtctcaaaaaaaaaaaaaaaaaaaaaaaagaaccctcacgtccttgttagtatagtgggaaaaaaagaagaataacccttgtggactcacctggggccaggctagagctgatactttttttttttttgagacagagtctcgctctatcaccgaggctgtggtgcaatggtgcaatctcagctcactgcaagctccgcctcccgggttcatgccactctcctgcctcagcctcctgagtagctgggactacaggtgcccgccaccacgcccggctttctttttgtatttttagtagagagggggtttcaccgtgttagccaggatggtctagatctcctgacctcatgatcctcccacctcggcctcccagagtgctgggattacaggtgtgagccactgtgcctggcctagagctgatatcttcaccacatctcatgggatgagttgtgttgtgttgctcccaccatagttgaggaagccccagccaagagaggtgctttccccatgagttacttgccaagcccattgttgcaggtgttggatcagagggtgtggatgttgtagaaatatctcactgtggatcctcagctttacaagttcaccagcactttatacaaatccgtgcctccctaagccctagctagcttggggcattcatagtttttgctattacatttgcaaggattaaaaaataatatttgattagctgggtgtggtggtatgcacctgtaatcccagctactcaggaggctgaagcaggagaatcgcttgaacttgggaggtggaggttgtagtgagccaagattgcaccactgcactccactttaggcaacagagctgagagtctgtctcaaaataataataataatttttgaggctgggtgcagtggctgacgcctgtaatcccagcactttgggaagccgaggtgagtggatcatgaggtcaggagtttgagaccagcctggccaacatagtgaaaccccgtctctactaaaaatacaaaaaattagccaggtgtggtggtgcatgcctgtaatcccagctactcaggaggctgaggcaggagaatcacttgaactcagaaggtaaaagttgcagtgagctgagatggcgccattgcactgcagcctgggtgacagggcaagactccgtctcagaaaaaataaataggcgggcgcggtggctcaggcctgaaatcccagcactttgggaggccaaggtgggtggatcatgaggtcaagagatcgagaccagcctggccaacatggtgaaaccccgtctctactaaaaatacaaaaaattagctgggtgtggtggcggatgcctgtagtcccagctactcgggagggtgaggcaggagaatctcttgagctggggaggcagaggttgcagtgagctgagattgcaccactacactccagcctggcgacagagcgagactccgtctcaaaaaataaaataaaaataaataaataaataaatttaaataataatataatttttggctgggtgcagtggctcatgcttgtaatcctagcactttgggaggccagggtcggaggaccacttcaccctaggaggtcaagatcagcctgggcaacatagtgagaccacgtctctagaaaaaaaattaaaagtaaaaaaattagccaggagtggtattgtgcacctttagtcctagctactgggcaggctgaggcaggaggatggcttaagcccaggagtttgaggtaacagtgagctatcattgtgctgctgcactccatccagcctgggcaacagaggcaggaccctgtctctaaaataaataaaaattttaaaactttttcttattcccccactagactacagatctatgaagtgttttttattcaatatatcacacacgttattccttttctcttttactttccaaacaattttatttaaaaaaaacctgcagtacagtattaaaaagcaatacattcagcaggagtgacaaccaacagaaacaaagggaggagggtacggaataccagggaccctacctcaactgatcctcagggctggaggccaggggcagactgggaggagcacgggtggtggggaagggagaaaagggcacccaccaaaatgaacaggcagaacaaaacatttatataggaaatgtctagttgaacttgaggatcttggggagacggaaaagcaccttttttttttttttccaaaaatatcctggactatcagggagggttggcctcctggggcgaaatgagcaggcagagccctaccctacactctactattgtggaggggatgtgctgggggctggtgacacacattttattcttctttttttttttttttttttttgagatggagtctcactcttgttgcctaggctggagtgcagtggcactatcttggctcactgcaaactccgcctcccggaaccaagtgattctcctgcctcagcctcctgagtagctgggattacaggcacacactaccacacctgactaatttttgtatttttagtagagacggggtttcaccatcttgaccaggctggtcttgaactcttgacctcgtgatccacccacgtcggcctcccaaagtgctggggttacaggtgtgagccactgcacccttttttttttttttttttgagacgtagtctcactctgtcacccaggctggagtacagttgcacaatctgggctcactgcaacctctgcctcccaggttcaagtgatgctcctgtctcagcctcctgagtaggtgggattacaggcatgtgccaccaggctcagctaatttttgcatttttttggtagagatggggtttcactatgttggccaggctggtctcgaactcctgacctcaggtgatctgcccgccttggcctcccaacgtgctgggatgacaggcgtgagccaccacacccagcgtattcttaatttcattctataagtctttctgtttctcctgtcccaagctgctgtaattagcataggcttgtaatatatatatatatatatatatatatatatatatatattttttttttttttttttttttctttttctttctctctttttttttttttttttttttttttgagaaggagtctctctctgttgtccaagctggagtgcagtggcttgatctcagttcaccgcaacctctgcctcccaagttgaagcgattcccccacctcagcctcctgagtagctgggattataggtgtatgccgccactcctggctaatttttgtatttttagtagagatggagtttcaccatgttggccgggctggtctcgaacccctgacctcaggtgatccacctgcctcggcctcccaaagtgctgggattacaggtgtgagccactgcacctggcggaattcctactctttacttttatttcaaaaccttcttagctagtcatgtgtcagaactctttcccatttatgtcttttccccccaaaattgctggttaggtatagaagtaaaaggtggtggagggcaccatgctttctttatattcttatgggtggctgctagtgtggggactggtttttttgtttttttttttcttttttgagatagggtctcgctctgtcacccaggctggagtgcagtggcaccatcatcgctcactgcacccttgacctcctaggctcaagtgatcccccccagtagctggggctgcaggcatgcaccatcatgccttgctaattaaaaaaaacatattttcttttgtagagttgggatcttactgtgttacccaggctggtctcgaactcctgggcttaagcgatcgtcttgcttcagcttcccaaagtgctgggattataggagtgattcactgtcctaggaaggattgtttctttctttctttcttcctttttttttttttttttttttttttttgagatggagtctagctctgtctcccaggctggagtgcagtggcgcaatctcggctcactgcaagctccgcctcccaggttcacgccattctcctgcctcagcctcctgagtagctgggactacaggcgcccgccaccacgcctggctaatttttttttttttgtattttttagtacagacgaggtttcaccgtgttacccaggatggtctcgatctcttgacctcgtgatccgccccccccttagcctcccagagtgctgggattacaggcgtgagccactgtgcccggccccaggaaggattcttgaagtatcggtggatgccctcatgggaggaccagtgactctcacgaaaagcagcctttgttgtccaagtgaataaataatgcctttcatgtaagcatgtgagaaatacaggcagatgctgtagcgatggctcagatggtgacgtttcttacagactttaccaagtccacggtttcttctcatcctgccttttcctggatgcccgtgttaagttccccgctcccacccctaatgacagatgacttctcccaccgactttccgtatccgacattatgctctcgggtttgatggttcaagatgactttttctctatgaatgaataagtcaatgatgattaacagtggtggtaatgagaggtacctcctcacacagatccctctctgccttgctagaacttgccttaccctggtgagggtgctctgaaaaggcatggacgtggctgctggtcctgcctctggacccacagtgactagggtctctctgttttctgacatgtccagggagggctgggcagagcctcatgggttagaggtgtgggtcacgtctctgctgtccatgctgggagtgagtcattgacaagagggccatggagagggccttttcggaagggcggttggaaggaaccttctggaagggtggcgtggtgatcgtagcctgagaggctggatatgaggaaatagcaggtgtggcaggagggggattcttagggcccatctggtgctggggagtaggactgacagacctggtccagacaggccagcaggaagtcaagactgaagagagggttccagagacctggggaggggtcaaaaagtgagataagtggggcacccacagaaggagagatggtcttggagctcacaagcagcggcgggcaccaatgtctgtgcagtcatgttcagacactgttggtgttgccgagaccacggaaaacacaagccctgtgtgaaagtgaactgacccccacaccatgcccagtgccctttggcatctgctgtagtaggaggaggctgcagcctgtgcaaaccccaggaaggggctcgattcttgcagatggcaccaactacagaggaatggagctggtgatggacactggtaggcaggacttctcaagtatggttccaggtgataaacggggctgtgtggatgaacatctattaatgtagacattatctattttaaggtgacttgaaatactgtttattttattattgcaagatgtggaaatttactttaaaataaatgtatggggccgggagtggtggctcacgcctgtaatcccaacactttggtaaggtgaggcagacagatcccttgaggccaggagtttgagaccagcccggccaacagggcaaaaccccatctctactaaaaatataaaaattagccgggcgtggtggcctgtgcttgtaatcccagctacttgggagtctgaggcaggagaattgcttgaatctgggaggtggaagtcgcgctgagccaagatcatgccactgcactccagcctgggcgacacagcaagactctgtctcaaaaaaaataaaaataggcatttctctttttttgagacagagtcttgctctgttgctcaggatggagtgcagtggcatgatctcagctcactgcaacctccacctcccaggttcaagcgattctcctgcctcagcctcctgagtagctgggattgcaggcgtccaccaccacgcctggctaatttttttatttttagtagagatggggtttcaccatgttggccaggatggtctcgatctcctgacctcgtgatccacccgcctcgacctcccaaagtgctgggattacaggcgtgagccactgcgcttggcctaatttttgtattttttttttccaagatggagtcttgctctgtcacgcaggctagggtgcagtggcatgatctcggctcactgcaacttccgcctcccgggttcaagcaattctcctgcctcagcctcccaagtagctgggattacaggcacgtgccaccatgcccggctaatttttgtatttttagcggaaatgagtttttgccctgttggccaggctggtctcaaattatagatcttgggtgatccgaccacctcgggtgatccgactgcctcggcctttcaaagtgctgggattacaggtgtgagccactatgcccgccaagagctccatgttttaaaagggatcatgtagctagatcagcccccccacacccccagataatcatatagtctattttaagttcaactatggggccaggtatggtggctcatgcctataatctgagagctttggaaggctgaggcaggaggatgacttgaggccagaaatttgagaccatcctggacagcacagcaagactctgtctcaaaaaaaaaaaaaaaaaaaaaaggcgaggtctggtggcacgtgcctgttgtcctagctactggggaggctgaagtgggagggtcacttgagcccaggagttctaggttgcagggagctatgactctaccactttgctccagcctgggtgacagagtgagattgtctcaagaaaacaaaactacggctggtgcggtggctcatgcctgtaatcccagcactttgagaggccaaggccaggagttcaagaccagcctggccaacatggtgaaaccccacctctgctaaaaatacaaaaattagccaggcgtggtggcgtgggcctgtactccagcttcttgggaggctgaggcacaagaattgcttgaacctgggaggcggaggttgcagtcagccgagatcgcgccaccacactccagtttgagtgacagcaagactgtcaaaaagaaaaaagggcaaccatgccatgtgacacaatcatatcacaggattggtagcgtaactgcccagtgggttcacctttcctgctgcctggacacagctgatttctcaagacgggggaattacagtagagaaagggtaattcacgcagagccagctgtgcgggagacaagggttttgttatcactcagatcagtctccctgagcattcagggagcagagtttttaaggacaacttggtgggttgggggaagccagtgagccaggagtgctgattggtcagggatgagatcatacagagtcgaagctgtcgtcttgcgcggagtcagttcctgggggccacaagatcagatgagccattttatggatctgggtggggccagctgatccatcaagtgcagagtctgcaaaatatcccaagcgctgatcttaggagcagttgagggagggtcagaatcttctagcctccagctgcgtgactcctaaaccagagtttctaatcttggggctaatgttagtcctacaaaggccatctggtccccaggcaagaaggaggtctgctttgggaaagggctgttatcctctgtgttttaaactataaaccataaggttatgaactataagtttctctcaaagttacttcagcctatgcccaagaatgaactaggacagcttagaggttagaagcaagatggaattgatttagtcagatctctttcactgtcttagtcataattttgcaaaggcagtttcagtagctcatcatatgcacaggtcctggtattcatttcctcaccaatacctgctattggcactttgtatttttttgttttttttttttttttgacggagtcttgctctgtcacccaggctggagtgcagtggcgtgatcttggctcaccgcaagctccacctcctgggttcacgccattctcctgcctcagcctcccaagtagctgggactacaggtgcctgctaccaagctcggctaattttttgtatttttagtagagacggggttccaccatgttagccaggatggtctcaatctcctgacctcatgatccacctgcctcggcctcccaaagtgctgggattacaggtgtgagccaccgcacccagcctttttttttttttttttatcatagtcatgtttatgccttttcttttaattggcagggtttttaacttgctattttgaaggctgagaaatccatcacgttatattgatgtgtatctggtttgttgacaatgctacgaataccaaccagtgctatgaacagggtgtgtggccacgagcaaggcaggtgaagccctgtcctcacagtgccatgaacaaggtgtgtggccacgagcaaggcaggtgaagccctgccctcacagtgccatgaacagggtgtgtggccacgagcaaggcaggtgaagccctgtcctcacagtgccatgaacagggtgtgtggccacgagcaaggcaggtgaagacctgtcctcacagtgccatgaacagggtgtgtggtcacgggcaaggcaggtgaagtcctgccctcacagtgccatgaacagggtgtgtggtcacgggcaaggcaggtgaagtcctgccctcacagtgccatgaacagggtgtgtggtcacgggcaaggcaggtgaagtcctgccctcacagtgccatgaacagggtgtgtggccatgagcaaggcaggtgaagccctgtcctcacagtgctggggtttctctgattactgctaggcatgtaatgctaagcatattttctttctggtctatcagcctagtttcttctgatgtgtattcctgccttatggcctttctccatgtttctatcatattttagtcctattcatatttatttgtagttaatttgttttttgagatagagtcttgctctgttgcccaggctggagtacagtggcgtgatctcggctcactgcaacctccacctcctgggttgatgagattctcctgtctcagcctcctgagtagctgggattacaggcgcccaccatcacggctggctaatttttatatttttagtagagacggggttttaccatgttggccaggctggtcttgaactcctgacctcaagtgatccccctgcctcgacctcccaaagtgctgggattacaggcgtgagccaccgcgcctggacttatttggagtttaaaaataccttctgggtttgtcgagggtttttttggtttatgttttcctccaatattttgcttatcttttatttatgtttacagtgtcttttcagagatttaagttcgatttattaaacttgccagttgtttctttagtcgtgaggcagagatggacagattgctcgagactaggagttccgggttgcagtgacctatggtttcaccactgcactgcagcctgggcaacaaatgagaccctgtctcaacaaaacaaagcaaaacaaaacaagggcaactatgccatatgacatcatcaaatcacaggagtgataactcatcaaattcacaggtcctgttctgtgctgcctaaccaatacttgttattggcagggttttaggggtctgtatactttttgtgttattatttaagaaatcattttcggccaggcgcagtggctcacgcctgtaatcccagcactttgggaggccgaggtggacggatcacaaggtcagaccatcctggctaacacggtgaaaccccgtctctactaaaatacaaaaattagctgggtgtggtggcgggcacctgtagtcccagctactcaggaggctgaggcaggagaatggcgtgaacccaggaggcggagcttgcagtgagccaagatcgcaccactgcactctagcccgggcgacagagtgagactccgtctcaaaaaaataaaaagaagaaatcattttcaactcttgaggtcataaaatttttactttcagcctgggcaacatggcgagacctcatctctccccgcccccccccaaaaaaaaaagctgggtgcggtggctcacgcctgtaatcccagcactttggggaggccgaggtgggcggatcacctgaggtcaggagtttgagaccagcctggccaacatggtgaaaccccgcctctactaaaaatacaaaaattagccgggtgcggtggcgggggcctgtaatcccagctactcgggaggctgaggcaggagaatcgcttgaacccaggaggcggaggttgcagtgagccgagattaccccattgcactccagcttggggaataagagcgagacttcgtctcaaaaaacaaacaaacaaaaactgaaagttagctgagtgtgggccaggaatggtgggtcatgcctgcaatcccagcactttgggaggccgaggtggatcacgaggtcaggagattgagaccatcctggctaacatggtgaaaccccatctactaaaaatacaaaaagtagccaggcgtggtggcacgtgcctgtagtctcagctatcgggaggctgatgcaggagaatcacttgaacccatgagtcggaggttgcagtgagccgagatcacaccactgcattccagcctgggtgacagagtaagactccatctcaaaaaaaaaaaaaaaaaaaaaaagaaagttagctgagtgtggtggcatgtgcctgtggtcccagctactcaggaggctgaggtgagaggactgcttgtgcccaggaggtcaaggctgcagtgagccatgttcacactacacttcaccccgggtgacagagcgagactctgtctcaaaacaaacaaaaacaaaacaaagttttacattttcctgatatttaaaaataaatatcaggctgggtgtggtggctcagcctgtaatcccagcaatttgagaagtagagaagggaggattgcttgaggctaggagtttgacactaggctgagcaacatattgagaccctgtctctaccaaaaaaaaatttaataaatcattaaaaatatcctagtatttaatctggaatttaattttgagtgtgtgtaaagtggaaatctgttttcttttgtatgggggagttcagttttctccaatattcagtgaacatccaccctgtcttcactgattggttgagtcatttcatgtatatcaagttccaaaaggtctgttcctagattgacctagttgtccactcctgtgccaataccacaatattttatttttttgagatggagtctcactctgtcacccaggctggagtgcagtggcatgatctcagctcactgcaatctctgccttctgggttcaagtgattctcttgtctcagcctcccgagtagctgggattacaggcgtgtgccactatacccggctaatttttttttttttttgtatttttagtagagacgggctttcaccatgttggccaggctagtcttgaactccaacctcaggtgatccacccgcctcggcctcccaaagtgctgggattatacacatgagccaccgtgcccagccaccacactattttaatattatataacttaacagtgtttttatttacaatatgacaattcttccctacttgtcgttttttccaaattgtcttagcaattcttggacttttccacatgcattttagaatctttttgttggatcatataaaatgtgcttctttttatttttctgagacagggtctcactctgttgctccggctggcacgatcatggctcactgcagcctctgcctcccaaggctcaggtgatcctcctgcctcagcctcccgagtagttgggacaacaggcgtgcaccaccacacctggctaatttttgtatttttactagagatggagtttcaccatgttgcccaagctggtcttgaattcctgggctcaagcaatctccctgccttggcctcccaaagtgctggaattacaggagtgaaccactgcacccggctgaaatgtggtatattttatttgcatttcatttactttatagattaacttggggaaaattggctgattggtttttaaaattttttaaaaaaaattttatcgaaaaaaagtagagacatggtcttgctatgttgcccaggctggtcttgaactcttgggctcaagcagtccgcccgcctttgcctcccaaagtgctgggcttacaggtgtgagccaccacatgggggaaggggccatgagctacagaacaattttccccctagtgtttacagaaggaatgcagccctgccaacactttttttttttttttttgagatggagtctcgccctgttgcccaggctggagtgcagtcgtgagatcttggctcactgtagcctcaacctcctggactcaagtgatcctcctgcctcagccttccaagtagctgggactacaggtgtgcactaccacacccagctaaaaaaattttttttaattgtgtgtttttttttttttttttttttttagagatggggtctcactctgttgcccaggctggtctcaaagtcttggcctcaagtgatcctcctgcctcagcctctcaaagtgctgggattacaggagtgaaccactgtgcccagccattgccaacactctagtattagcttggtgagatggtgtctaacttccggtctccagaattgtacaataagtttttgctgttttaaggcaaaaataaatctcatgttccctgtaactcaccaatcccattttgagaaatttatactacagaaatagccacagtagtatccaagtgtttactcaagagaattaatcatagcactgggtactgcagggtgaggagggaacaagaaattctttggtcttggtagaaatgatggtgccagccagaaaatagattcatccaggcatgaaaagaaaaaagttaactgctcgctcacttctatagtacatacactaaaattggaatgattagaatggcccctgtgcaagggtaaacacaaatttgtgaagcattccatatggtggggtcatccctctcctattgtgaatatttgcagttatttcatccatcatccctctctctgacctacccttccgtctcccatttccgtattttttttttccagacagggtctcatcctgttgcccaggctggagtgcaatggtgttatcagagctcactgcagccttaacctcctgggctcaagtgattctcccacctcagtctccctgggactacaggtatgcgccactatgcctggctaattagtagtagtattatttttgagacagggtctcgctttgtcacccaggctgcagtgcagtggcgccgtcttggcccactgcagctctgcctcccgggttcaagtgattcttattcctcagcctcccaagtaactgggactacaggtgcatgtcaccatacctggctaatttttgtattttttttagtacagttgaggtttcaccatgttggccaggctggtgtcgaactccaagtggtccacctgccttggtctcccaaagtgctgggaatataggcatgagccaccacacccagcctactattatttttaatttttttttttttttggagacaaggtctcactatgttgcccagattggtcttgaactcgtggtctcccaaagtgaaacaacataagttgccttaaaagaaactttacattcaaccacttctatatgtaaacttctggagtaagcattgccatgagacagttgaattagggaacattttcatgatcttctttgccatcttgtgtatttcaaatttttctaagtgagcataaattgcttctaaatgtgaaaaagtttatttaaaaactgccctcaccccctgcagcttttcttgcatgatctggccctttcacagccttctataccctgactctcccttctgggctggggcctagctggagcccctgggtactgctctgtcttcttcttctctgtccccagcacagctctcgcctcctgcttgctcacagatcacccacccccagctccatctccaaactggccctgcttccggagccctgcacatgggagcaacgggttagaaggccctcataaaaggggatggggaagatgggcctctgaggagagcctccctctcccagcttcaggccgcagcagggttcctgcccctcccagggagcccctcctggggtaaccacagtcgcagctaccctcaacatccacctgcgacttgtgcacatgctgcacataccagcagctggcgagggctccttccgagagggcacccatttcctgaaaccatcccctgtgaaaatgccccttgttttcagagtaggaaggagaagagtgctgaatcaaggcccccaaggagtccccattccaatccccagaagctgtgaacatctcaattggcaaaagggactctgcggtgtgactaagtgtgcaggtaggggacaagatatgatgagggtccttaaggaggccaaaggatcgatgggtgtcagagagctggcagcctaaggaagacgtgaccaaccatggctggctttgaagacggaggaatggaccaagaaaaaaaaaagggggaacgtgggctgactctagaagctggaaaaggcaacaaaatggattattctctcctagagccttcaagaggaaccagtcctgttaaaaccttgattttggccgggcgcggtggctcacgcctgtaatcccagcactttgggaggccgaggtgggtggatcacgaggtcaggagatcgagaccatcctggctaacacggtgaaaccccgtctctactaaaaatgcaaaaaaattagccgggcgtggtggcgggtgtctgtagtcccagctactcaggaggttgaggcaggagaatggcgtgaacccgggaggcagagcttgcagtgagccgagattgtgccaccgcactgcagcctgggcaactgagcgagactccatctcagacaaaacaaaacaaaacaaaacaaaacaaaaccttgattttagcccagtgggacccatgtcagagttctgaccttcagagctataagagaatctgttgtttcaagctgccaagtttgttaaagcagcaacagaaaactaatacagtgcattggcgagtccccagtgactgcccagagatccggtgcttcccagggagctgaccttttgccttcctgctgcatgaccagctaactatggagggtgcggcctgacctagaagtacccatggccttggcgcaacccctgcttgcagcccctcttctcagaggtcccccttgtccagccgtacttcgaaaggaaatcccctttgtgtctctcaagccgggactgatgagttccaaggccagtgaggctggtgagtgatgtgggcggcaaggagcaagggaggctggggacctgggacctgggttctgtggcaacagaggtttggccgttctgggctcaactgccctgtgctgcagctactgggcagagacagcaaactgcctatttcccgaccagcagaagccagaaatcaggattcttattcagaaactccatattatgaaagtggaatttatgttaaaattctaacacacacagggagcaggagaaacggaagccaactgtgctttcctgggtcttctgctgctctccacactgagacctcaggcccagcctctgcacagacgagtgggaaggcacagtttttgaacacccacctgaggcaaggaggtcccaggagagggagtgttgtcagcccaggccatgtcacagggagggagggagcctggtgcttggcagtcaccccacaggcactggtcagccatagaagggaacccagacctccctctaggaggcaggggcaagaagagagagagcagctccttttccttgcacccaggtcttttgggggagaccagaccaggggcagggaactggcttgggaccccttgttcactctggcatcccctgctgcctccagagtcttctgctggtgccccagaggctgtatccaggccccgagaacaccgaggccccgagggactgtgctgtctggctgctcatggaacctccggccggtggcccttgcggtggatgaccagctgcgacttccagtcgaaggcgcggccacagtcactgcagaagtgacgccgctggcctgtgtggctcttgcggtggatgaccagctgcgacttccagctgaagctgcacccgcactcctcacacgggtaactccgggggcctgtgagtgagcgtcgggggtggtgcggaaaggccacctccccttgtggtggcttctctgtgctttccccggtggctagccccggggactgcacacctggcccactcgtgtgtgtccggtggtggatgacgaacactgacttccagtcgaagccgcggccacactgctcgcacgtgtagggcttcctgggggtggcagccggctccagtctcgtctctgcaggtgtgggctgagtgggcactggcggtgtccctgggcgcacagtgggggcaggagtggcagccccagacaagccctcccaggctgccggccctgggccctggggcggctgggcctctgggcagccaggtggaccctcactctcatttcctgggggcaggggcaaaccaggtgagtcccggcactcagcaacccctccctcaggcttgtggccgtggcacaagctcccgtccccccatgagtgggtggctcaggtcccaccgatacaggaggggtgattcaggctggatggtgtggggcactcacccgagcgcaggcttctgcagacgcctgtccccgtgagcagcatccccagctctgactgggcctgtgcctctggctggtggggcggtaaccctgcccgggtggggggcacagttaggcatggggtttgcatgaaggaggggtggggtcggttctggtaggtgacagggtgttcctctggaaggtgggagagctgggtagggctggtagcacagaggccctgcccagctaggcctgctgcagggtgggtgcaggccccagggagaggggcggggtggggctggctggtcctcacccagggagaccactgtgccgtacttctccagcatcgcatcccagtacagttccttctgtgaccggtccagcagcccccactcctcctgcggatgtggcccatcactgtaggcgtctttccaccccttccctgccctgtctggttcacattcttacctattacccggaagagtcagcaggttacctacgcctcatctgcccctcctgctgagaatga

SEQ ID NO: 1264 - DNA, 351065 bp, Homo sapiens
cgcctcccgcccgctccgcagcgccagctcggcaggcgcggggcgtgagtgtggagtgagacccgccgggctccaactccgcagcgtcggagcgcggcgggcagcaactttctccccggagcggccgtggcggcggctgctgccgtggcagccggagcggaagccgggaggaagaaagcggcggcagcggcggttgctcccgccggctcgggctgtctagctcgccgagactgccggcccgcggagccgcgtccccccgggcagccccgggcccctgccctatgtcccgcaaggcaagcgagaatgtggagtacacgctgcggagcctgagcagcctgatgggcgagcggcgcaggaagcagccggagccggacgcggcgagcgcggccggggagtgcagcctcctggctgccgccgaatcgagcaccagcctgcagagcgcgggcgcgggcggcggcggcgtcggggacctggagcgcgcggcgcggcggcagttccagcaggacgagacccccgccttcgtgtacgtggtggccgtcttctccgcgctgggcggcttcctgtttggctatgacaccggggtggtgtcaggggccatgctgctgctcaagcggcagctcagtctggacgcgctgtggcaggagctgctggtgtccagcacggtgggggcggctgccgtctcggcgctggccggaggcgccctcaacggcgtcttcggccgccgcgctgccatcctcctggccagtgccctcttcaccgccggctccgcggtgctggctgcggccaacaacaaggagacactgctcgccggccgcctggtcgtgggactcggcatcggtgagttcgggctccgtgaagggcgcccgggatcccattgtcaccgcccttgaccctgggtgttgcgtgcctcttgcccatcggggtccccgtctggtctcccagggtcagagaatcctccacttctctggcctccagagcccatctgtttgttggtccagcctccaaggctctcccgggaggtgggagggtcgggggggagggggtgtcactctagtctccctcgagcgcacgtggaatctttgataggccacggaccagtcagtccaagtggttgttgcctctcagcacttccagaaacctagctgagcaccagctctttccttgatccagcctaacctgatgctgcttcttgagcttacgagggtctctgctttcctgcactgtcccaccttgcctctccactgctagcccctttcgttttctggggctcccagcctggaacctagaccatcgtcaagttacagtgagataatatttagagttaagtaattctggactctgaaaggtttattagcgacccctgccctctttgcttatctagcatttgtctttagatggcatctccttttgcttttatgctttttctattgcctttcagctttcattcttttcccaagtaaattccattctcctctgtttttccaactttttcatttgaatccttttttatccattctcctctttgtttttcctctcctgctttccagttgggaaccaaattatctattaaaggtcatattcacttccttaattcatttaggagctactccccctgtggataaatgccccgcaagataaatgtttggaatttacttcaaaaatgaaggcattaaggttctcctggcgttgaatttttttcaccctggttgctgagcaggggaggtacaattggcaagtttttggcagagggaagctatttggaatgtgctctgtattattagaaagcacttttgagggaaagtggggggctgtgacttaaatctcactagtaatttttctaagacacaccgctgatgcttttttaatgtttcgtttcataattcagttttttgtttcccttagggtgctgttgaagtatttcttccctatggctggggcttgatgaaagcgctttaaacctggggctgctgctgatctgtgtattcaccacttgtttgatgtttgtgcttttcaccctttctctgtgggttctgaagggaagcaaaggccatatattcaactccacatgcgggaaccatgagcctaaaacccagctcactgcactttatattcaaagtttgtcagtagtgaccttccttttgctgtttattgtactgttaattagcaaaggtagggcaaagctctccgtaacatattaagttggcacaaaaatatccaaagtgaccaaaaaatccagctgaaatgaaacctatttgtgtggaaactacttgggccttcaggacccttcaacaaataacctgctgtttaagtgaccacgattcttttctcagcattgtctgcttgggacatctggaccttttttgttgcttctgacatagaaataacatcattttaggtagcaagaattgttctgtcaacctcaatcttttctgtaattttgaaattgaatcatgctttgcagagctgtctaaatgaagcttcctagtgttttgctatggcaggtattggttaaaatcttgggtattatgtttactctttttatctgacctgcgaattgagccctgttctgtgtaaggtccccttccagatgttgtgagctgaatagtgaggagaatgtattatactttagtaaatgtagcaagctggggcaaaagcaacgtagaacttgctaagctttataagataggttatcagagatggctgatgaattcagagggggtacagttatctccaacagagggaagccagaagctcttaccaatggaaatggtatgttgacatgtcagtattttaacagaaacgaggaaaggacgttctaagcaaggggcaaaatgggtaaaggaaggaaagcatagggcatacttggggaataggtggaagcagcaatagaggacaaagcaggagatcagattggaagtgttggtgtgcaagagctgtggaggcctctctgtcttgcagcctcattctgtggtctctgggctggttggttcaatagagaagcccagtttagatatgttctccattcagttctggtgtggcccatctcacttccagaaacatacctctcagaatagaagccctgaggcagtttcgtaaaagccctcttcatttacaaaatgaagaatgttttaagatcataaacaggctttgaaataggccgcattcaaaacaaaacagtaatgaaataaatccacttcaaattaggattaaaattaggatctatgcaaagcatgtaattatacacataaaatcattaaaacttacaaagaaaatcacttttttttaagctacaaggaaatgggttcctaacatgagcattttttgagggacattaaatcagtttgcttgtttggtacacaatctgggttaattttatgccattgttttttaagtagttaaattttatgtgtagtcagggatttgttgttttgtccttatgatatttaggaaatgttgatgaataacaaaatgtggcttttgatacctttttcagacaagtttgctctaagaacttctttcctccacacgtttacctgtggtaaaatatacggcccatgtgggtcaaggatttctgctcattttgttcactgatatattcctgccacataggagatacttgttgaataaatgaatggtgagcaaaaacgaaaaaaaaaaatccaaattccattgctggtcgggtagcactttaaggtaggattgttcttttcaaaccacaaaaatagtgcattatcaaaatatttgaaagggcatctaaaggttttggttgtaatagtttaatgaaatcattatctattcaacacttgctaattaagcttccattatggatcctgtcagatatggggcaggcagtaattagataaaaatcccaccctggaggtgttcattttataatggagtagaaagatacataaacaagcaattaaaagagacatttctctgtagtgccagatgacacacagaagagtaagtggtcagttgattctttcagggaaaaaaatagaacacaggattgaggaaagttctacagtgggatattcaaagtagggtttgaagagtgagtaggtgttcagcagatgatgtagatgtagccagaaaagtgcttatttagtgctttagtatgttcgagacctggtggagtactttacacatattacctcatttaatcttcctgagtctgaggaatgggtctccttttgttgggtgtggaaacagttaaatggcaaggtcactgattacagagacaggattaaaaaaaaaaaacaaacaaccttgagtcttttgctctgttaccctactgggcatttaaggtggagttaatagctggtgtaaaggcacagaaaaatcaaattagtatttgaagcatagatgagtgagggtggtgatgaggtggtcatgagactggaatgttttggggggattaggctgaatatggtttatttggagagcttttagaggtttttaacagtaaataatgtaatcagatttaacatctcttgaatctgagatgtgagggtttttgttttcccattatacttttaagctcttttaccttctttcttaagtcttctcatgtctttgaaattttgggtattagcaatcatttgctgagatggctactacaggatgggtaaagcatagcatgtgaccgtgaattactgatatggaaggagtcagtggacccttcagtagaaacctttgacaaaggcgaagatagcaaggagtagagtgtagttattaatgggtattaaatgaattgtatagtaaaagaccttaagtatcagaagtcagggatatgtgtatttgttttgatttaagggttctgttttcttgactggttgtaaaaaaaatactgcgtgcctgttttaaatatggcattattttgggttttcttttcttttttttttattggttcaccagagtcatctttggttcctctagtttatttttctcttccacttgagtcctgacactagactttctccattgtcgctgcctgctaccatgaccatctgaactttttaaacgtgaaaagtcgaatttcaaataggacatacgttttccatcccagaaatgattgtattctaacagggttaatctttttttttttttttttttttgtctgagatggaacttcactcttgtcgcccaggctggagcacggtggcgagatctcggctcactgcaacccccacctcccaggttcaagcgattctcctgcctcagcctcctgagtagctgggattacaggcgcctgcccaccacacccagctaatttttgtatttttggtagagacagggtttcaccatgttggccaagctggtctcgaactcctgatctcaggtgatctgcctgcttcggccttccaaagtgctgggattacaggtgtgagccaccatgcccggcccagggttaatcttattttgtatgttctttacacacaatcccattttcaggtgtttgtttagcagtattgtacctataatcaaggttttgaagtgtggttagttacaacaggattgaagaatatgagtttgctcatttgctttatttattttctatcattgtgtatctcccatgcataacacaaaagaaattgtctagaaaacacaaagtacaagagcatagtactgttaacactattagcatgtacacagtcagtgaaaaagcatacccattagccctttctccctggtgttggcatttattctactgcttattataagtggtgatttagggcctgtgtagggaatatcaagaaatctctaaatttgatagtcaccagtattcaaaacctttcctgagaattgacatactaatttatacagcacgggattcgttgaattaatcttagatttacatcagtttctcctgtgtcagcctctttccggactccctctacttgaacacaatttgtagctgtaaattgcagcttgtaattagtatattatggcctgttgagtaatacttttaaaaataccacattttttttcaaacagcactttgaattcttcctcagtgcaaatgaaatgtaaaatcttgtttgatcaaaaaaatgcaatgttgagatcaatgtcaacaaagaatgtcatttaaggtaagcatagttgggcagaagctcctaattttcaaatagttaatcagctaaaatacagttttggggggaggtgctcaaattttttttttttccactactccccactttctttctttttggttgtttttgaaggcaggaattctgtattggatttatgcttcctactggtgtgaaactgacacataaagcctcctttgacttcttgtatttccttgttttatacacattaacagctttgttccctccccttttctgtctggcagcctagggactgacactgcagttatagtgaggattatgatctagttgtgtttgcctagtagtatagcaacaccctcttcaagtgagttgtcagtaagataacgtaagtctgttaacgtgagttatgtgaaattgttcacgtgacttccttggaaaacattgtgctttttcattcatccattttgccctcttatggattataaacttaaagtaagaacacactcaaagttaactgacttcacactaacatctttttgaacacctttaatgatgtagaaactgctaagagaactgaaatagcaagcagtcgttgccatctttacccaaaatcacctgagtctaattttctttttctcatattgtacttggctcctttgtacatctttcttgtctacacctttttccatttctttacctttctttttcctgtgacccatcagagtaataaatagtagcaacacttcttatagcacctatttctaatagtatcaaaacttccattgtcaggaggaaaattcatactcaccagaaaaacctcaaacttttcccacatgtaaaatttaatttctctggttgtagaaagagagaaaaaagttttacgggtacttctaaactcaagttgagagtactacatgctttctagttaggccttttattaaaggccaccatttgaaatggtgcggtctgcagcatgtgtccaaggccacgtggcaggagcatcgtttcacagcagggccaagcaccgtgacagctggtcaccagcgagcaatggcaccagtgttcttctgattttagcgccaccctgccgctgcactgggaggagtctaggcagtccatcctcttggcagggtgtggattggccatcagcttagcggccaacaccctggacgtagtacttaagacttgttgaatgcttaacttctaaacattttgcacatggctaattcacatagtcttcataataacccagggggataatacggttacctttattttaagataaggatatttaggcagaaagagttgaagtaactttctcatgatcacaaagctactgggtggggccagagttcaaacccaagaggtctggcttcccagcctgtgctcaaccagtctgtgacactcactcactcactcactcctccctgaaactagcataattgttctttaccatgatatgtcatgtggacattacttttgtttgttttagtatagatttatttttttattgtggtaaagaacacataacatttatactcttaacccattttaaggtgtacagttcagtattgttaggtatattcacattgttgcacaacacatctctagaacattttcatcttgcaaaactgaaacactgtgtctattaaacacaaattccccagcctctcttccctatcccttggcaacccacctttctaccttctgtttctatgatttttactgctttggatacttcacgtaagtggaatcatgcagtatttgtcctttgttggcttacttcacttgaggttcatcatggtgtagcatatgatagagtttccctctttttaaaggctgcataatattccattgtgtatatgtgtgtgtatatatatacacacctatatatacacacacatataaaaataaatacacatatatgcatatatacatatatatacacatatatacatatatacacatatatacatatatacatacatatacacatatatagggcatttaatctatccattcgtctgttgatggacctttgagttgcctctccctcttggctgttgtggataatgctgcaatgaagatgggagtgcatacatctctttgaggtccttctttgaattattttggatatatacccagaattgagattgctggaccatgtagtagttctatttctaattttttgaggaacttctatcccattttccatagtggctgcattttacattgctaccagcagtatacagggttccaatttctcaatattcccaccaatatttgttgttttcttttcttttgacagtggccatcctaatggatatgaagtgatatggtggtttggatttacatttctcttatgattagtgatgtggaacattttttcataggcttgttggccacttgtacatttgtatatcttctttggaaaattgtttattgcattttcacgtccctgacctatttttaattggtttattgcagttgctattgagttgtagaagttccttatgtattctgaatattaaccccctatcagatatatgatttgcaaatgttttctttcattccattggttgctttttcactgtttattgtgtcttttgatgtacagtttttaagtttgatgtagtcctatttgtttttgctaaacacacacaaaactaaaactgttggagtcatttgtcatgccccttgagagtaagctttttggaagttctaataaaatactagattttacttctaggagtatgtcattttgttccctagaatacattctttgtgaaaatatattatcttcatttcctttgatataatgctttttagcagcttaacagaggcattataaaaagtaggctctaaaacaaagctcattctttatgcctataggtgtatatgtttgcattcacctcagtaagtaggaacattggtattttccttagtttaagtatgaattaaaggaagtgtagagaaattagggaaattagcactgttagtaacagtgctgagatttaaatctgatcaagaaccagtgtgcaccccacctttctattatatgataaatccagtttttgattgtgaaagcgaaatatggtcactataatgtttcgtaaattagtattagtatttaatgtgctagcaatgaaaatcccaagatgatactttctagaatttcacaaaatgattgtaatcagattgagggaacagtagtaagacagtagttatagacagaagaaattaatgcaaagaaataatatatatataatgtatagggtatactgtatatattattaaaaccagtataggatgaatggaacagaatcagaattccagtgatagatccaactgtttggaagagtttagtattgagcaaataagagggaaaagaacgaagtaactgagaagaggaaataggaatatgaatttaaaataatgtaaatgaaatttaggtctcatcttctctagtatattggtttaagagtctctaattttttttgttttttttcttatctatattgatgacatcttttattataatttttaaaacctcaaagcagagattttaaaagcaaggcaacagattggaaaaatattatggtaaatttatttacttaaaagaaaatatatttatcctcaaattatactgaatagactgtatacaacaagaaaaatacagttagtaaatagactcttgggaaagtgttaaaccttgttactaattacaggtgaaaattaaaagaacacgatacttactaaattagcaaattaaaaactcagggctggccgggtgcggtggctcatgcctgtaatcccagcactttgggaggctgaggcgggtggattatgaggtcaggagatcgagaccatcctggctaacatggtgaaaccccatctctactaaaaagtacaaaaaaaaaaaaaaattagccaggcgtggtggcgggctactcaggaggctgaggcaggagaatggcatgaacttgggaggtggagcttgcagtgagctgagatcgtgccactgcactccagcctgggcgacagagcgagactccgtctcaagaaaaaaacaaacaaacagaaaaaccccaaaaaactaagcaaaactcaggctaagttgttccctaggaaaatatgattttctgcttgtaaaataaattgcaataattttctatagagaatattctagataaaaagctgacatgtttaacatgcttcattcatttttcttcattcaacaagtttattttgaattactaatatgtattatatactgtgctcttgcagttcatttgtaaagttgctaataattctttgatctggaaatttcacttgagggattgtaatataaggaaataaagaaaaactcattttgtttaaaagtatttatagatatgcaatatgtaattttaaaaagctaggaggaacctccaagtgcctagtaattgggaaatgattagttagaccacatcacattgacattaaacacaaaaatgtgtagaccttagatacacatatcctgcaaatattaagcccaaagaatagaacctacttgtatggacctattgattgcaactacctaaaaaattacagctggacatagagtttggaagaaggaataaaggtgtatgtttagtttacatatagcacagggccttttttacattttgtttttttactcttccctttagatcattattttacttcacgcagatttttgttttaaaaggcacagacacacacataacaaaacactgtggcaagatacttttttccaaattagattttacttcttattctatggaaggacatttttaggaaataatgacaaaaatgttgcaatctaatcgtataatagtggtgtgggtgtattttttcccccagatttttaactcattgcatgaattagcaaggggtcatgatacatgaagtacatttctgggatcttactattgtatgtatctcaggaaagtgtcttgcttactttatggctgagaatgagagcttctatgggctcccattccacactccctcctctcttttgggtttcctcagctgttcctgcctgggccttgcacagatgcgtcttcttcctgtttctatagatgaactggctaaggcctctccctgtctcctattcaaagctgtcattccagctctttctcttttgtctcataaaatttcttcttctactgggttattcccataagcatggacacatgctgtaatttttgcagtcttaaaaatttctgtttctgccccactttatctttcagttactatcctatttgtctcctttattttacataaaacagttgcctatattccttctctgtagttcctctcttccctttttttctgaaccctatccagacaggctctcatccttaccactccactggcattgctcttgtcaactttactgtgccctctgtgttggtcagtgcaaggactgtcttcagtcctacttgtcctaccaaaggcatttgacacaagtaaatcatgtctttatgggccattttctttggcttttggacaccatattctcccagctttttctgtaggctgctctttcccccatctcctttgcagattcctcttcatctcccagacctcttaatttgggccagcctcagagctctcctcttctctacatttactcctttggggatctcatcttgtctcatggcttggaataccttctgtgttgcagagaactcccaaatctagatttcagcccagacctgtctcctgatctccagatgcttgcacccgacttccctgttttgtccaccatctcctgcttagcaggtcagagcattcctcctggggcttgcaccaaaagccttggagttgtccttgactacctcatgtgccccttatccagtcggctaggaaatcctttgaatctaggccctaattataactgaaatctgtttcttatcacttccactacaatcaccctgatcccaaatgccacccatctctcacttggagtatttcaagagtctgctacgtgttcaccctgcctttttcttgacccctctgctttctttttatacacatgagagccagaatgattcatttaaaatataaatcagactatgccacttctctgcccaaagcccctgattagctccccacctcagagtaaaagctagtggtctgcagcaccccatgggatctttccccatccccacttcttctttgacttgatttcctactgcttttccttccctccttttccagctgaccccgcctctaggaacacaatagacatccttccaggcctttttatgggcggtttcctctgctgggaagcctctgtccagattcctggagcactctttccctttctctcttgtgtttcctcaagcatctcttcttagcggggtcttccttgatcattcggcttaaagttgcagctcccaccaccagttttccctgctttatttttctctatagcagtttccactagccaaaacacttaatggttgtgttacttactgattgttttctctccactagagtgtaatctccatgaaggcagattttaatttttctgttttgtttattgctgttccaccattgaatagtgtagtgcctggtacacagcaggcatctagtaaatatttaatctatagataacaactaaaacagtataatcctaaggaataattttgagctgagattggatcaaggatgttgtaggaaatttgtgtagtggatggaagtaattaaatgttctctagggttgcttctgacactactctatggtttcaaactttttaaagtggttgggagaaaataggtattatttttaacttcaattaatactttgaagtctaacattgttttcagtacctgcaatgaaatgagtctctccatgtatctagggaacctaaacaaacaaaagttgatttgtgtctgaaaaatgatctgacagactctcaaggatgaacttggagtaattacacttagatgtgacagtggaatcaacagaaatgcaaacttattacgtgggatatatctattccacatgttaataatgctctaatgtctcctctctttcctggcagacagatttgtgggaagagggattactgattcacagacttgcatcttcgtgtttgaacctggaattaaagcaggagtggaaaggcattggagtcgtagttcacccagactgtaaagaggcttgatcagttttctctgaccttcacatcttctgtctgatgactcaagttttcaaactttagtgagtctttctcctggagaatggagatacggaagttgaaatctcctcttattctcttcttagcagccaatccacgtttcagattctataatacatttcactaggtagctattgagcatctgtattgggccaggcacattgtggcttgggattcaaaaaataagacacattttatttttcattatggtctgattataaatttaggggacaaaaaacatgtgtaagtgtataatgatgtgataaatttctaaagatggtattacatatgtggaatttaaaaaataagtaccataatcttgaggttgatctgatccttttaaatcatccagatttaattctggatggggttacgtttcaagtgaagccaatctgcaactcttcatagcaaatggagtggcactctcaccagtccaaattgtgataattaaaacactggtcttaatattgcattttaagcttatatttgaatatgagtgcttcaaataaatgtggaaagttacattgtccaacaaaataattaaattatgctgtgaagacttggcttgagccacatttcctggtttactgttctagtttttaatcttaccccataaaccctctatacttgtgaaaccattcttgccaccccagacagaccttattatacctctctctatgacacctctattactgcccatagtgatactcatatgtcattaatacagacagtaatagaaaaatatgtaagacacagtcgtgcagaggaaggttgatgaggtctacctggagctggcaagtcaggtttcacaaaaacctaattcatagagttattgtatggattaattgataaactattttctgttaaaagttaaacgtaattcctgctgcttattagcacatgctcagaaaacattagccattattgtagtaattaatgtgaatttttcttcccattttatctctgttggagacagacatcaacatattttggattggtgaacaaaaccagactgtcctgaattaagttttcctggcacatgtgtaattaaaacctctgtaggactgtaatttgcatattaggtagtatgagtacaaatgagttagttacctcatttcacctttatagtttctggttaaggagagaaagacattttgaaattttcgtagttcataatttgaaccttgaaatttaggattgtacaaaaagaaagggaatttaatgcatcaaatatatgacatgccattattctttgttgccagtagttggccaatttcaactttaattgaagtacaggcttttataatagtttgcaaaaacacagcaaaaaagtctagcaataagcttttaattttagatttcctccttatcctgtagaataaagttttaacaatagtgtcaacataagtaaattataaagaatctaatgacattcaagtgaatgaggatactctatttttgacctactgtacaaattacagtgcataaagtggaattcaaggatcttattttacacaacataaagttcagccatgtgccacataatgacatttcagtggaggatgactgcgtataggatggtggtcccataagattataatactgcatttttactgtaccttttctatgtttagccatgtttatacaaaaataccattgtgttacagttgcctacagtatttagtacaataacatgctgtacaggtttgtagcctaggagcagtaggctatagcatatagcttaggtatgtagtgggccgtaccatttaggtttgtgtaaggacactctatgaagtttgcaaaatgtattcctgagaatgtgtcgctgtggctaagcaatgcatgattgtatctgcatgtgcacatctttaccaagaatatcttactaaagattctgaggcagtgagttttttacttcttcatagataatataaaatagacaaatctaaaggactttatttattatgaatgaatagttcttgaggctggggaggtaagaaccctgtttaaaaaaaggtttataacctgattaaggaaatcatgaatgttgcaaaagaaacacatgactttgttacatttgtttggtaattatgcagttatttattcatctgtgcaagagatcattagagtctggattattttcaaaattttagtttctaaatatgacatgcattttcaaataaacatgaatatatattaagaatacagaattatagttattaataagcattaaaactttgcctatggatagctgctgctatggttaatagttaccttttatttgctttaagtgaacatctggctacttaatctaactcaaaatgatttatagacataaactcaaagccactgtcagtaaatttttctttatttttaagcagtcatgaagataagatacgcagagataagccatatgagcaaatagtgccttaattgttaaaaagggaatgaattctaggaattaagatgaataaacatgactagtttctagcaaaattataaaatattattaatgaagatttggaagcatttagaaaagagtctgatgattactaggaacttttgtgtgttcactagaaatatgccttattaaactaatctcttttgtttttcctttgaaaccatttcttggtgagtagattaggaaaattctgcatataaagcatttggcatactcctctttcattgaatatatttgaagaacattttctttgtgttaataaacaaaataagtgagcaaaataaactttaatctctgaaatttggccaataaaaaaaaagaagcaaacatggtttagtaggatgccttgtcagtgttgaaaagtgggcccagaaggtctctactggggtgcaatcaagcgctcagtccttcagctctgtgcttgtcaaatccagggagcccagagcaagctaaatggctgttatgcttgataacagagctaatattaaaaataactttaagatactggaatgctgttaaaaactaagaaaagttaaaattcataggaaatgtatttataatatgtatatctccatatattttacattttaaatatatttgcattattgccgttaatccactcttagagctgaccaacagtgagacagactccttacagagaacactaggagagagtttacaaagtctatacagggaggcggtcagtgtaaggtgcagggtgacctttgttgaggagatgaagaagtcttccttgtattcagagcctgactgaagggcttctctagtcccgcttgattctaaaattctcaagcttctttattgattacaattgagaaatggtttcatcaaagctgccagagaatttgtcccctgaaatggaataaatcatctgagatcctcaagattgcaaattactaaagaggaagacagtgtctctttttttgtaacttctatgagagttcagtagatgttggttggctcactgacaacacctgagttattctatttgattacttttggcttctgacttttacattatcaaattcacttttcttggatatattttaggtcttttgttatgaaatcaagaacattatgttctttttacagagagagtttataaagtacggagatgaccactctgaaagccatatgcccctagcaccctctgaagcacctcagtcctctcctgactctttcagtgattcattctgccatttgcatgattcctctgaagaaaaccaattatttagtgttcttgaggtgattgacttgcaaataatcttgtgctcttaaagcacatttttggtaaattttcaaatttctgaatactagaaattatttctttagttataattgagtgagatcagatattcacagactaatagactctcaaaaccagtgggtgctgccttcataccacacattttaccatgctaggataaacattcatcttcaatttttttgttgttaaaaaacatacttcaccaaggaatttattatcccactcattttatcacatacctcttctggagcttagggtctcagccccttcctgtctcttcttttgtgtctcccctgctacacccctaccacactttggtgtttttgaggtttcttaatcttaagtaaagtgtgaataaaaagcatttttagaaagtcttaccatgtttattgatctgtaacatgcaatatacatactgtgcttgctgtattaacacagctccaagacaagacccctagcttttctacagctagactaactcccccaaatcccacttctgtagagctttggagctgcagcagctgttgaggtaatggttactttcctcaaaaggtagccattatgatgactggcttcaaaaagtaaaaaaaaggtcttttgaaaaattgacagttctccccacaaagagttgagtgactggtcagctacaatttcttctaacttgtaattccttctaatatatgatgttgaggttttagagagagcagttaaaataaagtggtctaattagacagtgtttgcatcatctttttcagtttagatgttgaggaagtgttcagatcctaccaagcaattttttcttcttttgagtgagaactgtctatacttttgtacttagtgtctttacctgtcccccttttgagctttatgtcttaaagaaatgttatgccatttactccttttaatagattaaacttattttcaggttattgaagaaaacctgtctcacagaatcataagacaaactgtatgaaactcttggaacagtgcctggcacatggtagtatacagtaaatgttatctgctgtttcattttagttttaacatatctaccatgcacctgcctcaatggaatagtgtaaaaggatatttatacttacaatcagtataaattatagttatttgtacttataatcagtataaattatagttatttgtacttataattagtacaaattatttaatttatactagtgagttttatgaatttgtacaaattaaccccttctgagccctaggtttctcagctttatccacttcatggtggtttaatgagtattaagtagtagtacagaaggttaactggtacatgtaacctcctggtagtgttggcttactctggtctcttatgaggtaagagttccttaaggacagggaccatgtttttgtgtttatcccaggatctatcatagcctctggcacatagtagatatttatttagtaaatgcttgtgggttacataaatgggagcattgggaaggagaatgaacagaagaatgtgtagaaatttttctattgtaggtaacactcttccaggagaaaaaggttatttgaaagccacaggggtcttaaaaactcagttttttcatttaaagcttaaagcgttttgatatttacttctaaagtattacaactaatatgaccatgactgatgaatggaagaaacacagaggggtatagactggaagagaaaggagagagggagagaaagactaagagatttagtgagtactatgaaaatgttaaactctaaagttacactcttgaaagtagcttcaagagtcttagctcaattatcaggggcctttggaaagccaaataggtgattacctttattttaaaaattacttgcttttaagactttgaaggatcctttctgaatggaagatacagccaaaggtggtagtgagaggtatggaagattgaggaggatgtgtgtggttgtgtcttcagtaaccagagcaaacggcctgagattagaggaaatcaatctgaggactgggtacattttgtccactttcactgtcagagctaccaagcaattgggaggtaaggttgtagagttggttttgatgtcctgtctcaagacctaattatgcctcttgggattaggtgaggaaaatatgtgtcctgggactggccgttggtaactgcattagagaaaatgagcttgacaggtctcccacaatttggagatttctccagaaacatactgcagtattaggtccagggaacaatcctgatctgcccttggtttagaggcaacacataatcgcactacctatcagtttagtcctgacgcctatgaatgcccagttcttccttgtcattcagcttgtggataggagacaacaatgcatgtcttgtttcttctcgtatttgtaactgatttgcttttaagactgtcttgtctgaattgccttctgctgttggtgtaataagaaaaagcatgtggtgtatttaaccaatgggggaaaatatttcttatatatagagatgaaatagacatgtagctagagaataggcgagaatagacatgtagcttgtttgatggcccatgtcatttctcagatttactgctgtgtttttcttaacagctggttacaaaaacaagtggcactaaaggaaaagaccatattttcttttatcatggccacaggtgtttatttttatttatttttatgagtatataaaatgaaaagtattcagattaaccggttattcagagaggtgatatcaggtggggagtagtgggattaaaaaaaaataccctcccatgccacctgcattctgattgccaatgcatccgtgattggtgccttgctcagcatctcccaggtgccatcacttcagaagtttcccagattttgctctttcttagaaggcagcagggagggccaggcacgatggctcacacctgtaatcccagcactttgggaggccgaggccggtggatcacgaggtcaggagttcaagaccagcctgactaatatggtgaaaccctgtcgctactaaaaatacaaaaattagctgggcatggtggcatgtgcctttaatcccagctacttggtggaggttgcagtgagctgggattgtgccactgcactctaggctgggtgacagagcgagactctgtctcaaaaaaaaaaagaagatgggagtagcagaaggaatgcgggacgtgaaattggaaatcctgggtcctgctttcaaatcttttatgtaaatatgtgattttagataagtcacttaatgcttgagcttgctttctcttctgtaaagtacaagttatatgtaaagttccttctaacatagccatttcattggccagataagaaagaaaaaggagtactgtcatgatctgccacctacttaggccccttctgcaatgtgaaatggacactgtgagtataaaaacatactcaaaagtatattttttaattctctcactcaacagtcaacacaaaagacttctgtgaccaaatgtgggggatttctccccactaacaagcaatcagttttgcagcagacaccagctggatgtcctctaattcagttctcacactgtcaccctagaaatagcgtctgattccacaggttgagggcacagtcctcaagacctgccaccacccccaatgccaacagccttcagacaccggttgcaaatttgggtctctggaactttgaccaaccaactacttcaagttggagtttttacaacaccttttttgggttatattaattttctagggtggttcacagaaatcagaaaacagtttggtttactggtttatttcaaaggatacaaacagataaagagatacatagggcaagacttggaagggtcctgagcacaggagattttgtccctgtggaggtggagtcctccactgttggtacatggatgagtttttgttcccttcctgtcaacctccatatgttcatctgtcgagaagtgctctgaactcagcccttttcaccttttaaagaagtgtcataatcaattatatcattacctaggcataattgattaaaccattggcgactggttaccaacttaaccttcagcttctctccccttgtaggttgggggtcccaaccatctaatcctgccttggtttttccagtgaccaacccttatcctgaagctgcctaggggctaccagtcatctgtcaacttactagcatacaaaaagacatcactttgcagagtctaaggattttaggagttgtatgccatgaaacaagggtggaagacctaataaatatttcacactatcacagacagcaagtggagcatcaggccttaagaggagtcctcaatcctagtctcatacatttacaaaatgctaaatacataacatgaattcatttaaaaaaaaatgaagctgtaagcccagtgctgccttatagtataattttttacatttaccctaaaaacattttaactttcaatagaatgctccattggatttggtgctcagtcctggacaactcttcatttccagtgacctgacttaggttgaattttgttatttgagccagccccgtgagtaagcttggcttgctggctatttgtgtgtttcttgttatttaagacatcttgctgaagttgaagagtgcagtctttgaaagagtgctttttaatggaaaactgttgcattaaaaagtggctttgtgtttttatagaccacacaattctaagccaaatgacacagtttcaaaatagctattgatggatagaacacacaggtaagtacttgagagcctggtggcagaagttggaagtatttgtaagaagaaagcacagcatgagccagatctagagtttcctgtttgatcattttttacaatatcttagtatagatttgcagttaccctgccagatgtgtacttcatcttttattagacacattcaaatatatcagttaaagagcttttggttcagtatctgatattcggagcatttattctaatattgccttttactgcctcccaaatctatacttgtattggtactgtgtacagtaaaggtgaatgcattttaaagtataatgaatgatacctggtgttgatcgaaatggggtaagtcttccacagcctgtctctccactgattacaaccaagaactctggaaataatgcaaaatgcagctgaggattctgaaaagtaaacaacagcaggaagattgggtagggaagtcaaaatttgaagacctactggactggcagtgaatttactgtttgtatcatcttttctttcttaatctcctggcttttacctttggaggggtgagtcccaggactgctcattgaacaccaatggcagaaaagcccaacagaaaccccctccttctagtcagaagattcagaatagggacccttgtgagccagaagatatgggaggagttccccatcctttttttcctttttctccttgccctgccttgaggccagcccagttaaaaacctgcagtgctgcagtggtgatggcagtagtatagcactatggatgctgagatacagccctctttctgtacaaaggaaatagaaaagggatccctggggtctagagagtgtgggagggaatcagttattttttctctgtagtttcccttgctggtatgctgcaaggacagtcccaattatgtggaactgaaaaacagtgtaagggattaagttctaagagaaaatcctggttttatgcatagcagatttggaaaagaggaccctaggggccagaggggtcagggaagtggtggagaagagagctgaaaaaggggatcttctgtttctgtgtataagctgaaacaagtcctgagctcacccctaagcagcacatgcacaattcagacccaaaggggcacagcaaatgttttgagtacagaactgtgacataaggtactacacagtcccagtctatctcctgagtaatctgaataacatagctattgaaaattgctatttaacaagatggctgactagatgcagacaggaagaacttctcccactgagaaaccagaccatcaggaagaactgcatactccaaacagatcttcagaaagaaggtattgagagtagacagaagaaggatacagaccccgggctgaagtgggggaggaaaccctgcatggagttgctgagcaccaggacttattcctgaccctgagcagctcctggggaatgggcgagtgaaataggcttggagtggcccactctcgttacagacctctagtatcttcactgcaggagaccccataacccctatggatatttgagctggcagagacagaactccagcttgcatggatccccaggggtctggcgtgggaatggctgcagtggagcatagtcatgggtgctcatccttcaaggcccactgtactcctctaggtggctttagcctttttggctgccagacctggacagagcatatcttgctcatgggaaggggcctgtctgatctgagtgtccccctatttgctggcctatcccagggtccctgcctggccacacctgcttgcagcatggccttggttgcccagctgaggcacttgccggcagctactgccatagctcttttgttagaatatccatcctcacagagagcttctgtaggagttgtaactgattacaactcaaaactctggaaataatgcaaaatgcaactgaggattctgaaaagtaagcaacagcaggcagattgggtagggaagtcaaaatttgaagaccaacaggtatggctgaatttactgtttgtatcatctttcttaacctcctggcttttaactttgtagggttgagtcacaggattgctcagtgaacactatgtgtacatgccgtgtgcatgctaacctcactaccacactgtcactggtgcacacatgtgcagggacccctgctgccttgccgaagcccttttgctggcagactgcattggagtgttaccagcagactgggaacacctcagccccttcagcacagcaggagcttaacctcaaggggccagagaaaaaaggctgtgggcctggtcccaggtccccagggttagagcacacagcctaggaatgctaagctgagccttggccccctgcaatcatccagacatgaagccaatcaatttatacccagcttataccactgtcaaaccctcaagggcatcaaagaatataaaaagcaaaaagccctatatgaaggacagcaactttaaagattaaagaaacatcatctcacacagatgagaaagaaccagtgcaaaactctggcaattcaaaaagccagagagtgtcatcttacctccaaatgaccacatgagctcgacagcaaggattcttgattgaaatcactgaaattatggcatagaatacagaatttgcatggcaaataaggtcgtccagatttaggagaaagttgaaactgaatccagggaatctaaggattccaataaaatgatacaggaactgaaagatgaaatagccattttaagaaagaaactgttcttctagaggtgaaaatctacaagaatttcataatacagtcagaagtattaaagcagaatagaccaatctgaggaaagaatctcagagcttgaagaccagttctttgaatcaactcagttggacaaaataaaaaaaataaaaatgaacaaaacctctgggaaataagggattatgtgaagagaccaaacctacaactcatttacattcgagaaagacagagagagcaagcaacttggaaaacgtttttgtggatattgtccaggaaaatttccccaacctcactagaaaggtcaacatgcaaatttggtaaattcacagaacctcagcaatatactacaagatgtccatcttgaagatagatagtcatcagattctccaaagtcaatgtgaaagaaaaaatattaaaggcagatcaaagagtaggggcaggtcatatacaaagagaatctcattaggctaacagcagacctttcagcagaaatcttacaagccagaagagattggggggcttatattcagcagccttaaagaaaagaaatttcaaccaagaattccatttccagccaaactaaacttcataaacaaaggagaaataaaattttcttcagacaagcaaacactaagggaattcattaccaccacacttgctttacaagagatgcttaagcaagtgctaaaaatggaaatgaaatactattatctgccactataaaaacacttaagtacctagcccactgacactatagagcaattatataatcaagtctgcataacaacctactaacaacatgttgacaggatcaaatcttaacatcaatattaaccttgaacattttaaacaaggccaggtgttgtggcttatgcctgtaatcccaaccctttgggagactgaggcaggtggatcacctgaggtcaggagttcgagaccagctgggccagcatgatgaaaccccgtctctaccaaaaatacaaaaaaatagccaggcatagtggcacatgcctgtaatcccagctactcaggaggctaaggcaggagaattgcttgaacctgggaggcagaggttgcagtgagctgagatggcaccactgcactccagtctgggtgacagagcaaggccccctctcaaaaacaaaacaaaaccttgaacataaacaggataaatgcccactttgaaggcagagtgtgacgagttgcataaagaagaagacccaactgtatgctaccttcaggagaccatctgaaatgcaaacccactcataggctcaaagtaaagggatggagaaagatctatcaagcaaacagagcaagagttgctattcttatttagaaaaaaatagactttaagccatcaatggtcaaaaaggacaaagaacccaggtgcggtggctcacaccggtaatcccagcactttgggaggccaaggtgggcagatcacctgaggtcagaagttcaagaccagcctggccaacatggtgaaaccctgtctctactaagaatgcaaaaaattagcgaggtgtggtggtgtacagctgtaccagctacttgggaggctgaggcatggtaatcacttgaacctgggagatggaggttgtagtgagctgagattgtgccactgcactccagctgggtggcacagagtgagactccatctcaaaaaaataaaaaggacaaagaaggacattacataatgataaatggttcaactaaataaacagtcttaactatcttaagtatatttgcacccaacactggtgtgcttagatcaataaaacaagtttgtaagagacctatgaagagacttagataaccacacaataataatgggagacttcaacatgtcactgacagtgttagatcatcgaggcaggaaagaaacagatactagggacctaaacttgacacttaaccacatggatctaaaagacatctatacaatatgccacccaacaacaacagaatgtacattcttctcacctgcacatggcacatactctaacattgaccacacatttggccataaagcaattctcaacaaaaacaaacacaaaaccctaccaaccagtctttcagacctcagtgcaataaaaatagaaatcaataccaagaagatcccccaaactgtacaattacttggaaattaacctgtccctgaatgacttttgtgtagagtgaaattaaggtacaaatcaataagttatttgaaattaatggaaacagatacaactcacctgaatctttgggatgcagctaaagcagtggtaagaggaaagtttatagtgctaaatgcttacatcaagttagagctcagattaacaacccagcatcacacctagaggaactagaaatacaagagggagccaaccctaaagctagcaaaagaaaataacaaaaatctgagctgaactgaacaaaaaccacaggtgaaaattcatataaaagattgatgaaaccaaaagttggttcttcgaaagaatgcataagattgagagactgttagctagaccaataaagaaaaaagatcctaataaacacagagatgacaaagatgacattaccaccaaccccacagaaatgcagaaaacagaaccctcagaaactattacgaatacctctatgcacaccaactagaaaacctagagaaaatagataaattcctggaaatgtaaaacctctcaagattgaactaggaagaaatggaatacttgaacagatcaataatgagttctgaaattgaatcagtaataaaaaacctaccaaccagtaaaagccctggaccagagggatttacagctgaattttatcagatgtataaagaaaagctggtatcaatcctattggaacttctagaaaatattgagtaagagggactcctctctgactcattatgaggccagatcattctaataccaaaatatggcagacacaataaaagatgaaaacttcaggctaatatccctgatgaacacagacacaaaaatccttaacaaaacactagcaaattgaatccagcagcacatcgaaaagctaatccaccacaatcaaataggccttattcctgggatgcaaggttgattcaacatatggaaatctatgtgatttatcacataaaactgaaaaccacatgatgatctcaatagacacagacaaggctttcaatgaaattcaacattccttcgtgtaaaaaaaccctcaacaaagtaggcattgaaggaacaaacctcaaaataataagagccatttatgacagacccacagccaacattataacgaatgggtaaaacctggaatcattttccttgagaaccagaacaagacaaggatgcccaatctcaccactcctattcagcatagtactggatgtcctagccagagcaatcatgcaagagaaaagtaaaagtcatccaaataggaagagaggaagtcaaaccatatctatctacagatgatataattgtatatctagaaaaccccatactctctctccagaggcttctagaattgataaacaacttcagcaaagttttaggatacaaaatcaatgtacaagtatcagtagcatttctatacatcaataacgttgaagccgagagccaaatcaagaatgcaatcccattcacaaaagccacaaaaataataaaatatctaggaatacagctatacagggaagtgaaatatctgtgcaatgagaattaccacacactgctaaaggaagttgaagagaacacaaacaaatggaaaaacattccatgttcatggataggaaaagttaatattgtttaaatggccatatgtccaactcagtttacagattcaatgctatttctacccaactacctatatcatttttcacagaattagaaaaaactattctaaaattcatatgcaaccaaaaaagagaatgcatagccaaaaccatcctaagctaaaagaacaaaagccagaggcatcatcctaccaacttcaaactatattacatggctacagtaaccaaaacagcatgatactggtacaaagacagacatatagaggagtggaacaggttagagaacccagaaataaagctgcacactgacaaccatctgatctttgacaaagtcgacaataacaagcaatggggaaaggattacctatttaataaatggtgtttgaagagctggttagccatatacaaaagtttgcagctggaccctttcctttcttcatatacaaaaatcaactcaagatagaacaaagacttaaacataaaacctaaaactgtaaaaagtctagaaggaagcctaggaaataccattctagatataggccatggcaaagattccatgatgaagactccaaaagcaattgcaacaaaaataaaaattgagaaataggatctagttaaactaaagagcttctacatagcaaaataaactagtgtgagtaaacagacaaccttcaaaatgggagaaagtatttgcaaactatgcatccaacaaaggtctaatatccagattctgtaaggaacttaaatcaacaagcaaaaatcaaacagccccagtaaaaaatgggcaaaggacatgaacacttttcaaaagaagacacacacagccaacaagaatatgaaaaaatgctcaacatcattaatcattaaagaaatgcagatcaaaaccatgatgagatagcatctcataccagtcagaatggcagttattgaaaagtcaaaaacaaaaagcatacgaaaaacatgctggagaggctgtggagaaaaggaaacacatacagtgctggtggtggtaatgtaaattagttcaaccaccgtggaaagcattgtggtgatttctcaatgtaaaacagaactaccattcgatccagcagtccccttactgggtatatacccaaagaaatataattcgttctatcataaagacacatgcaaacatatgttcatcacagcactgttcacacagcaaagacatggaatcaacctagatgttcatcaatggtggactggataaagaaaatgtacatatacaccatggaatactacacactataaaaaaaatcagatcatgtcctttccagcaacatggatgctgctagtaacattatccaatgtgaattaatgcaagaacagaaaatcagatacttcatgttctcacttataagtaagagctaaacactgagtactcatggatgcaaagaggaacagtagaccctgactgggcttatttgagggtggaggttgggaggagggtgaggatcaaaaaactacctatcaggtactatgctctctacctgggagatgaaataatttgtacaccaaactccagtgatgtgcagtttacccatgtaacaaacctgcacttttaagaaaacatttttagcaggacccaatgaaaacataatatccaacatgttcagaatataatgcaaaggcacttaacatagagaatcagggaaatctgacaagttgctaagggaaaagataacaggtgctcactacaagatgacccagatggtggatttatcacacaaaaactttaaattggctttggtaactgtgatccaagagataaaagtgaaaacacttgcaatgaatggaaagatagaagttctcaacagaaaaacacgtactttaataaaggactcaaatggaaaatggattgatttaatggcagagagagatgaaaaaagtgagtgaacttaagacagataaatataagtaattcaaacaatagaaattacctaaaataagagggaaaatggaaaaaaaatgaaccaactcttaaggacttgtaggacaatatttggatttctaacatttgtgtcagcataatgccagaagaggaaaaacaaatatctgaagaaaaaatatttaaagatacaaggcctgaaaactctccaaacttggtgaaagacataaacttacagattcaagaaactcagcaaacttcaaatggtattatttcaaagaaagccatgcccagataatattataatcaaattgctgctaatgaaattgttgggcatatcaggagcttgtagtcaccagtctgctctaacaggtaaaaaatgggacaaattgaaaaatcagcagttcttcctggacctaaagagaagtgaggtcataggacaaaccactacccccaaaactggagaggcaggtggatacagctaaccataatttacttgagtgataaccaattaacaaagtcttccatgggaaacattgcttgtataggaaaacctgcattatagttgacaaattgctagagattcactgtggacaaatcttagattttaaaaactccaggaggacctagtaagcagaagtgggtggaggggtcttccactcttatgaatttcacctcttgctgctctaccaggttttcacagtgaatatttgagaaaatttccctttgcttctggcacaaggaagggaaaaggagccattttgaagtatgccagagtactctgttttgttttgtttttaaatgaggtctgcttcagaaaaaattagttaaaacacagtgtaagtggcctggggtaagcaaagcacccaattctagttctctctagccttttatttgagaaaaggggaatattaaactcctctaccctctagccattctgttccaactaagagagaagagaactgagaagcacttgtgaagttcccagtccagaggcacagcctcactaaagcttgagacctaatcataacactgtagagtgtttctccttctcctacaccttaccactttattactgacaatgtatttatatccgttaaccagtgtgtcatgtctggctatcaagaaaaaaatgagaagatacagtaaaagggggaaaaatgggctgaaggaagagacagagcaaacatcagaatcaaactcagatatgtcaggggttctggaatcatcagattgggaactgaaaacaactatgaataataagctaagggctctaatggataaaatagcttgcaaggacagatgggtaatgtaagcagagagatgataattctaagaatctgtaaaagaaatgctagagatcaaaaacactatgccagaaatgaagaatatggggctgggtgcagcagttcatccctgtaatcccaatgctatgggaggctgaggcaggagaatcacttgagactgggagtttgagaccatcctgggcaacatactaagactgcatctctacaaaaagttttaaaaatagctggacataggtggtgcatgcctgtagttccatctacttgggaggctgaggtgggaggatcccttgagctcaggatttggagtctgctgtgagctgtgatcacacccatgtcctctagcctgggtgacagagcaagactccgactcaaaaaaaaaaaaaaaaatgtctttgatgggctttaatagactggacatggctgaagaaagaatgtccaagcttgaggatgtttttaaaagaatcctccaaaactgaaaagcaaagtgaaaaaatactggagtaaacaaaccataacggaatatcagaaccatggggacaactacaaaaggtgtaacatacatataaaagaaatatcaggaagagagaaaggaaaagaagaaatatttgaagcaataatgactgagcatttcccagccaaaccacagatcctacaatttcctagttgacaaagcagaataaatggcagaatagctatgtgaaggcatgtcatttttaaactacagaaaaatcaaaggtaaaaatcctgaaataagccagatcataataaataatattatatattatctatataatagcaaagataagaatacctttttctcaggaacagtgctagcaagaagagagtggagtgaaatatttaaagtgttgagagaatgaagccctaccagtctaggattttgtaccctgttaaatttttccttcaaaagacaaggataaatagaaaattgcttaaacaaaggaaatttgttgccagtagacttgccatgcaagaaatgtaaaaaatgatatgtcagaaactcagatctacgtaagaaaacattggagagaaataaatgaaggtaaaataaaactttcattttttaattaatcattgatctgagacaacactttattgaaaatagtagcaataatgcctttgattatgtgtgcttgtctatatatatacttgtctatacttaagcacatatatacatggtttgtttatggttcatttccccccagtattttttctccttgcttttcagttttggaggtttctgttacatacatatatcctcaagctcagagactctttctggtgtgtacatgtgcttgtatgtgcatgtgtgtgtgtatatgtttatgcttatttatatgtgaaatgcatgacagaaattatacaagggatggatggaaggaattagcattattttgctattataaggtattcatactactcatgaaatgatctagtggcacttgaaggtggacctgaattagttgtaaatgtatattgcaaactctagggccagcacaaagaaaaagtaatgaaagcagtataaccaatgtggtgagaaaggagtgaagataaaatcacgtaaaatgctcaactaaatccacacaaggcagaaaaagggtgaatgacaaaaataagaacaaataaatgaaaacaataaatatggtagactttgatctaattgtcagtaatcacttcgaaggtcagtggtctaaatgtaccaattaaaaggcagattgcaggagtgcctataaaaacaagacccaactttattgctgtctatatgaaactctttaaatataaatacacatggattaaaagcatgggaaagatatgccatgctaacattaatcaaaagaaaataggattagctatattaatttcaaacagcagatttcagagcaagtaaagttatcagggataaagacacatgagttctataatggtaaaagtgttagttctccaatttaccttatgtgcctaataacagagtgaccaaattctcaatgcaaatactggtagaactgtgaggaaaaaatagatgaatcactattatagttggagacttcattacccttctatcagaaatggccagatttagcaggcagaaaatcagtacagacattgttgaactcaacaacaccattactcaactggatataactgacatctgtagactacttcatccaacaacagaatacacattcttccctagctcagatagaacatagaacgtagaacacattctgaactgtgaaaccttaacaatttaaaaagaatacaatcatataataactgtccttaggctacaatggaattaaacaaaatcaacagcagaaggatagctggataattccaaaatgcttgcaggttaaacaacacacttctaaataacatgagtcaaaaaatctgaataaaaatagcaaaaaatttagagctaaatgaaagtgaaaaatgaaaatttgtgggattcactgaaagcagtgcttttaaatttatagtatttgatgtatttagtaacagaaggagaaagtgctagagtcagtcttctaggctttgaccttaggagacaggaaaagagggaattaaatccaaggtaggcagaagataagaaatagtaaatattggagtggaaatgaaattggaaacaggaaattgatagaggaaatctacaaaacaaaaaactggttatttgaaaaggtaaagtaagcagagctttagtcaggctaagaaaaaaagagaccacataaattgcgaatatcagatatgaaagaggtgacagcactacagattccatggacattaaaaatgacaaaggaatactatgaataactctatccctacaagtttgataacctagatgaaatggaccaattccctgaaagatacaatatatcataaccttccaaaactgaaagcaccaggttcagatgggtttacaagtgaattctagcaaagatttaagagagaaactgtaccaattgtttagaatttcctttagaaggtagaggcagagggaatgctttctaactcattttatgaagccagtattaataccaaagccagaaaatacaagaaaactatagaccagtatctctcagatacatagatgtagaaatcatcaataaaatattataaaattgaattcaacactaaagacatataccattatgaattgggatttgtcccaagtatgcaagactgattcagctttttaaaattgatattatcacatcaacagactaaataatcacatcatatcaatagaatttcgagaccagcctgggtaacagagcagtaccctctttaaaaaatagtaaaataagaagaataactaaaaagtgacagtaatcaagacagtgtggtgaaagaatagacacgcgtagatcagtgagacagagagcccaaaaatggactttttaagatgcttagcagcatttctggcctgtattcactaagtgccagtagcaaaacttctgctggtttagcaaatgtgtccagtaggtgacagttgtccctaggtaagagggttcagagggccatatctgagaaccactgccctaatccccaccttgaagtccctgcatataaccggttgggtcttctgttcctttatataaatatgggctgatatttgtcctgcttatattccgaaggtggccctaagcttcaaatgagataatgacttggaagtgctttgacaaaaacgccaaacagagtttattattttatgtggttaggaataagaaaatgctgcaataaaaaatttttaaaggatgtccagaggtgaagggaagtaactaggatggtcacaacagaagaaaaagcattttgaatagagattgagaagattgatatttaagggaagatgtaaaatggctgttcaaaaaggatcttgttggatggcattactttggcatcacccaaatccaggttctggccttctatttttctgttctgtaaagttgattttttccttttcagttcttattgagttgattggggatagagctgattatttccattaacccaacctaaaatagacttgagaaaggaccagaatgctttttgtaaaataaggagaagtaccaagcgaagtgaagtgccctgtttagctggtcagtgttttggggttttttgttctgtctcttcttacagaagaaggatctgacacctttatggaaagttgtttggtgaacttgtaatcagaacaaagcagttatttgcattcctaggacagtgtagttggtgactgataaatgttcatgttcttttggtttctttccagtgtatagagaaatctaccaaatcaagcagaacttttcactggtttgtcagggcactctttaccctgtctctgccagaaacacttcaacaagtctctgagttttttttttttttcctgccatagattttatacagactaattggccttctaataatactctttgtcaaactaataataaatgacaaattaggttatatcatattccgtttatgcctttctgagggaatatacttattgcattcacttatgataactttggtgtttggaaacctccattcaggaatttgtttataaactacctcttaaggaaaggaaccatggtgatagtaatgtttttgtaacaatgacaaatagctctcttaaactgattgtatataagaaataatgagcagcaaaaagttaggggtgcacagtattgacatgaaaactgttgattaaacccagaatttaagaagtcatagcaagtaagtaatgtggaactgatgccttgtctgataaaaaaggttacatgcctaataattagattttaaaacatgagatatttgttagatgaataataataataataaaagctattgaaggaaaccgcttcctgtagaaactaggcacccttctgtccttttttttttcaaccatggtcctaattaattcatatattctgcatttccatggtaacaagatagcatctgtagatgctggtaatttagcagttgctaatgaattataataacaggtactattacagaaatgtcagctattatactggagaccatagttcaggagacttttcttttttctctgacttaatttcttttatatttcttgacatatttaagatgcacatagttttcacccaatttttttttattgagtggatgcaaaagagagataaatttgttactaaataccactaaaaggattgtttggaaacatttaatgaataagtataatgtataattgcattcattaagctatacatgttttttgaatgtattatttctgggaatgaataccagaaagagtgaataccagaaagactttgagattttagatacattgtatttttatctcctttttatttctctttttctttcctcactccttcatttcaacagacactaaatacctaatctttccaaaattatactagattctccttatacattatttttataactatagtatgaagtatataattatccattagctaagcacaaatgagatgcataaatgtatgcaagactgtcttcctctgcccattttatgtctagacattcctagacatggctgttcaccagtggccacatttcttacaagaagacactgtggtcagctcttgatggttcaggcactgtctagctctttctttgtgacttgtttttgggccatattcctgctgtttttacctctcatcagtgagtggatgagaaaaaaaaaacaagagatctcatattaagttaattagtttgatatttatcagctgtgtctatgattttttttttttgtagagtatgttatttttaaatttatgggaaaatttataattctgagggttaaattttctgtgaaacaaaatatttgtgcaccatgataagaatgaacaatttgcttttctcattccctggccatcttggcggctgttcttggttgggggccatctggcacctaagccaggaatatgatggtggcaaaaatgatggaaaagtcactggagttgatcaacgctaggctccaacttgttatgaaaagtggaaagtatgtcctggggtacaagcagattctgaagatgattagataagaaaaagcaaaattggtcatcctcactaacaagtgcccagctttgaggaaatccccaatagagtactacaccatgttggcctaaactggtgttcatcactacagtggtaataatactggactgggcacagcatgtggaaaatactacagactgtgcacactggctatcattgatccaggttattctgatgtctttagaagcatgccagaagatactggtgaaaagtaaaccaagcaaaataatttttctttagtaaaacttgccagaggtttatccttgtaatccctaatcccagcactttgggatgctgaggtgggaggatcacttgaggccagtagttggagaccaccctgggcaacatagtgagaccctgtctctataaaaataaaacgaaaaataaatagctgggcatggtagtggttccccgttgcccaagctactcaggaggctgaggcaggagtatgtcttgagtctaggaaatcgaggctgcagtgagtcaagattgcatcagtgtgcaccagcctcggtgacagagtgagaccctttcttcaacaagaaaaaaagaataagcaattttcaccggaagcaatctgtctatgggattaaacagtgaagaagaaagaagagaaaaagtaaatagaaaaattggattttatgctgaatattctttgactaatataaagtttggggagagagaagaaacgtgcagttgtatgtgctttaatatttctgcagtcctgaatagatgtgtaataaattagtaatttctgcagtccagaatagatgtgtagaagtaatactaattagtattagtagaatgatgaagacaaaaatgagtagaaagctatatgtttagggagacagcagaatgatattagaaattaacactaattgcatagaattagcatgtctgtataaataaaatggtttaaaaggatttggaaacaatattaaccatgtttattatgtttaaataatatactcattttattactaaagagtaaagttctttcaaataaacatggttcttagatacaaaatatattatcaacaacagcaacaaagtgagaccccatttctaccaaaataaaaaattaaaaaattagccaggcgtggtggcacgtgactgtagccctatctactcaggaggctgaggtgggaggatcacttgagcccaggggttcaaggctgcagtgacctgtgattgcaccactgtactccagcctgagcacagcgaaggaccctattgcttaaaaataaataaataagaatttatatagtaaactagcacttatgctttcctcatgcatcctgtacattagctaactgaatcctaaagcctcttggtatcaccctcgatttgcagttttgtacaccgggaaccaggtaagtcattttcccatggttacatatgaagtgtaagtggcagacctgcaactcgaatattgttcgttattgaaattcaaacatgttctgtctatatgccacataacatatatgatttactttgaatttatttaaattagtttccctaagaattgtaaaactaagtccttaagatttttaaatctcataatttgagaaaaaaagctttttgtcaactttgagatttagcttttgatagttatgtggctctgttatcttttcatgaagacttaattttcctttcattgacttacttcattttaacttgcaagcttagttcatgaaactgcctgacaaacccaaagcaatcttccgcctcttatgaatgaactcatgagtctttcttatccataggagtacacttaccacattatgcatcatcataattatgtgtttttattaactgtacttttttgtctccagctacatcactcagttccttgtattttacattttatatgtaggcatggcattttattctggttatgtgtgaaacattttcggaataagtgatggattattattgcttatttatatcttaattctacctctagaacatagtgggacatcttttcctagtgaatatttattaggcagagtctgaaggagctgatagtctttaatgctttatcgctttctttaaaagtgcatgttatttctctgaccagacattgatgtactactcaattttcctttaggatagtgacgttttagataagtagaactagcaagaatatgtgtgggtttgttttatagctagctttggggccatttactgaatgttatactcagtacagtttgttctttcactcattgcattatacatcatgagatgcaggcctgaagctttctggttgacctctttgcctggagagagtggtaggttccagggactcaaagttaaatttataaatatttaatctcaaacctctacatttagttacttcgattaggatgctctgtttaatatgtgtgtgtttcttaagttgctttgaatgtgtaagttttctaaagctttttgaaaagtgtgccaagtataaatacttttagagggactgtttagccacataaacatgaatattaggattagacagtcttgccatttactggctgtgtgaccttggatgttttgtcacacttgtgatgttatagctggttgtaaaatggggctaacaataactatttcaacgtgcttttgtgagactttgaaataaaacacttatgtaaaacctgcctcatggtaggtatttaagaaattattgtttagctcctgactcaccttatctccattgtggttatgttttgtaataaagtatcacaatagaatatttgtatcctctgaaaataattggccctttgggtcacttcaggttgtggtagagaagttataaggtgtccaagccatatagaacatttgtagagtcttagatgacagctaataatttttgtttgtttgtttgtttgagacagtctcattctgttgcccaggctggagtgcagtgatatgatcacagctcactgcagccttgacctcctgggctcaagtgatcctcttgcctcagcctcctgagtagctaggactacaggcatgcactaccatgcccagctagttttttttttttttcttgtaaagatgaggtttcactatgttgcccaggctggtctggaactcctgagctcaggcaatccttctgccttggctttccaaagtgttgggattataagataggtgtgagccaccatgcctggcaacaatagtttataaaagggcagattgtacagggtagcagagagatttgagtaagttattaacacagccagaataatccataattattgtgtactctcagcaatttattttcatgtcgatattcctgttcaggtagcctcctgtggactggagttaccttcattttgctttctgatctcactttaatattgctgttctatctcatttttttagtatctaaaatttaagcttttcaagataagtataactttctggtatcagtatatacagtatttgctgaacgaattagaaataaaaaaactgggattgttttgctgcatcacttaaggatatcaatatttagtttttaaatgctccttttaatcagtattattcagttttaagaaaaaataatttttctttgaaatgatcaatttttagattgaatttttatttgataaggtttgatttaattaattaaccatcagttacaggtttttgcaggatttctagtactataactaatgattcactgtgatttttgctgttgcttctcaccactaatacttagtcttttgtgatagccttgaacagcatccttgatggaaacagtaacaattttgatgaaatattttgctctatttgttatggtggaaagtcagtctactgagcttttcctatgagatgtagcttgcctgtgaaggattctgattttggtaattttaagaaggcaggagaacactgtgggacacttacttggaatgaagttcccttgattttaaaaagaatttccttgcactgtgggagtctgttagtctatttcagagattattgtcatttttattctttccttcttttatcaataaataatgactccatattaggtatttttatttacattgaaatatatcaaaataatgtttactatttatttttgaaacttatatgttaaaaagttaagtccactttcttgtgacaaatggattaagggtatgtgtgtatgtatgcgtgagtatacatattaatatatatgtatacacaatacacataatataatatatatattttagagacagggcactctctctttgtcacccaggctggagtacagtggagcgattatagctcactgcagccttgaacttgcggactcaagtgatcatcctgacacagctgcctgagtagctgggatcacaggtgtgccccactgtgcttggctaattttaaaaaatgttttatacagacaggttcttactgtgttgcccaggctgatctcaaactcctggcttgaagcgatcctctcatcttggcctctgaaagtgctgggattacaggcatgagtcaccatgcctggccatatattttatattttaaatgatatttataattggtactgaagaattctcatacaaaaatcactggagaaaaataattcgaagtttgatatattttgtgtaagaactgatgtttggtttttttaaaaagtaaaaaatagttaatgagattatagtcaacatttttctggggtaagctgaataaaacatgaagtcaagtctttaacatatttggatttgcacaccttaattagtccgtcctctatgactttcttgttggagtcattcttccggttataaatagccccggcttggtcatccaaatgaacgtgcatggctattgtcatttcattgctatggcaattttgcaattagtgtggtagttgctggcacacttctgggcaagggttttgatgcattgacttggaagtggaagaatgaaactgctttcacagctgctgtgtgattctgaatagagacatagcagctgctttttttttttcttcagttttttttttttactaatttagatgtaggcattatgcttcgatgaattgttggcaggaatatctccttgttcccctgtctgtcaaaggaaaactaatttggatttcaagtaaatattggggcaggttgtttgtgaaagtttctttcactccttgtgaaagaaagtagtcctgtaactggtttttctgtctatcctttatcttcaaaacggaaatgtcacaagttgtggaataatcagtaactgacaaataaacttcactgggagatttttagttattgaaatgtatggatttgtcccatttctagggataaaacaaaaagttgattggaggcattaatgagggcgtatctatataaaataagttgtaaaatagataccggaaaatggtattaatagaatcattaatgaaggggtatctatataaaataacttgtaaaaatagatgctggataaatgatatttatagaagcattaatgaaggggtagctatataaaacaacttgtaaaatagataccagaaaaatggtatttatagtggctagcttgctattaacttttttggtcaatgtcacttaaaatgtgagctataatggctccttattcttccatcaccaagttctcataaagatagataaagcagggtagtaaatcagtctttcaaaaggaacactttcctctaaatttagagcataattaatgttaatgtcaccctcgaagatttgaggaaaattttctcctacaactttaatttggatgtttatagtaaaccctttaattttttttccaagagcttattacttttcttttaaacatggaaactcagtataattttcttctagaaatatggaagcttatacaatgcagtaaaacttagtttagacattgatttctctgctgaaagtactcctaaaatatcttagagagttgatgttttaagttacaaacgtcttcttctattttttcctgatagtcctcagatatatatgcttttttttctgttttgcattatgagcaaataattagtacttctttacatcagtatccatgttcacaagtgatggatcttttgaggttttgggatttttttttcccctgaagctacaaaaataagaaagtaagaaatttagtttttttcatgaataataatcttgatttctgctcaggggactatcctctaccatcagctagggcagattaaattgaagattgcaggatttctcattataaaactgtagcctcacaagaccacctatctgatctcttaaaaacttaataagcttatttttggtatgtattttttaacacatcaatttttaacaattgacttttgtatgtaataagaagtaggggttcaattttatttttttacacatggatacccagttgtctcaccaccatttattaaaaggtccatctttcccccctgatctacagtagctgttctgttgtatgtcaagggctgatgtgtgggtgtgtctcattctgggttttctattctgttctaatggcctttctttttctgtatatactgtgtttattatagtagcatataataaatctcgatatggggaagaagtcctcctttatttttcaagagtagtgactaatcttggcccattgtccttccagcaaggatcaacttttaaatttcctttttttttttttggattgtcaaatttgaaaacccccacaaactcatttgggttttgatgtcaactgtattaaatctgtatgtcaatttggaaagtacagtcatcttttgatgttcatgggggattgggttcacgaccccacttgtgtggacaccaaattctgtggacgttcaattcccttgtataaaatggtatagtattggcatatgtccaacacctatgcttcagtgtaccttaaatcatctctagattacttgccgtgcctaatagaatgtaaatgctgtgtacatagttgttacactgtacctttagaactttgtattatttttgattgtgtttctttcccagaatgaccctctatatttctagttatgttttttgcctcaatgtttatgttgtctggattaatatggctatcttcactttcttttgtttagacttttctctgtttgttttttatccttttgcttttagtcttgttcctatcattttaagttatgtttcctgcacaagactaaagtataaattttaagtccagactgattgcccttctttttacttggtacatttgattcatttatatgtattagatctaccattttctgttgccttttctttcccagcttatttatgctgctgcttctctcctttttgcctttttgaattgccttgcttgtgtgtgtatatatattttttcatacaattttttctcaagtagtttggaagttgtatttgcatgtatttttagtagttgccactgaaattttactcatacatatttaacataacaaaatctgaagttacataatatctttatctttattctgaataatatatgcaacttaaagcacattaactttctttaaccttctcccaattttagttctattgttgtcatgtcttttgattctcttctcttgagcttgcatttatgcaccacaagataactgttaatgactttaaaatttattttctacatctttatcattttctatgctcttgatttcttcctgcatctttattcttgcactatccatttgggatcactgtttatctaaaatacactttcagaatttccttatttaggaattttgcccttgttcttgaaagatacttttttctgttggactagaaactaagttgattgtgcaatgaggatactattttactgttttctgggttccattgttactgttgaaaagtcagctgtggtttaataaagaaattctagcagcagtgagaatattgagtatgcccaaagtaaagcgattatttcttgtttcctacttttgtatttaaaacaaaaacaaaagctaaagcaaaaaaacaacccagtgtacatgggaattttcctttctgcgttgatttctgatccctttccataagtatgaagataaacacacaagcttaaggttgaacatacctaaagaaagaaaaccttaggattttggggatcctttacaacttgccatgacaaatgtaacaaaagaaggttttcaagtttttgcatttactgctacttatttaagtagttttcatcaagttaaagtcagccctttgaaaatgaatgtaaattatctttagccatatacctatcatatgttatttacctgtcatccattcatcatccttccacatctgtctatatgtctgtgttactatatgtctgtgatatgagctgtctgtccatcgatgcatccatccatccatccatccatccatccatgcatccatccatccatccgtccattaatatagattttcatccacaatttctggcttacaactcccatagacctttgttacagtctttttaaaataatattggggccctttgggccccagaagtaggatcaggaaacagaatctctctctccctggccttctcttgatctcctttcactgtccaagacaggactctaatcttccattgtggattataaggcccccagtccagagagcatcctccctatacccttggaggaaggaatgccacacagaagggtcaagaagaatctaacaggcctttctgggtttcctcattcattctgttagtgtaaggtcataccctttttgtccgatcacattttgatatggttatctatgcttcaatcatgccttttcaatgaagtctccataaaaggcccaggaaactagctgaacacatggaggttcctggagggtggcacattcaggaagggcatggaagctccgtgctccttccccatacattgtcctatgtatttcttcatctatatccttcatcatatcctttagaacaaaccagtaaacaactttccctgagttctgtgagctgctctagcaaagaaatcaaacctaaagtgggagtttgggaacaccagcatgaagctgattggtcagaagttgattgttgtggtgtgagagcagaggaaaaatagtttaaggttttccatactcaatgtgtatctgttttatctatctatatgtctatcttatctatctgtcatccagttttccatctacttcctctgtctcctctggcatagggtattgactctgtataaatgaaatgtattgaaatgtgccattagcatacttgtagatggagagtttgtaaaaatctaataaaaagggataagacaatggagctaggtgttttacaatcaaatcattgagtagcagcagtgccaaaagttatattacctcatcatatgtcaaagaaaatcactacctctattctggctgtgtcagtgtctcagagttactgcagcagaaataagtgataatgccagcattcatgccagctaatttgtacaagagctaggctctgttggctgagtcacagctgccactagatctacaagtagagtgaaaagatgtttattagccatggagagtaatacatgggtttattttaatcaacttgttctaaagccagcctaagagagatgatactgcccttttcacagtcatctgactcgttcatgaagtgtttgtcatataatgtagagtctgtttctcagaatattatgagccatagttacggcatcttgcttatcacccttcgtaaatgttaggtagctatataatctttttcagccctacaggaaaaagtttgttcaaatgttgtaaaatgtttcaccataattagtgcctgccatttcaaagaactaagcaatttggagttacatgtatatagctggtttactgaagaacaaaatatgaaattgattaagtccattaaaataattttggctgcatagtaaagagaatcaaatgacgttccctctcttttttttcagtccattcccttttatctttagtgagatctagctttatgatgaaagccaggtgatacagaactagagctccaaaaaacagactttttgtttcattttaggaatgcaatttctaattcttctcattgctctgtaacaaacttttctattttctaatttaaaagtatcttggaagatcaagtgcaaaaggtatgcatgtagaaaataattccctattttatagttataaaataagggaaagtgaaggttaatttggctgtgtttttcctcaaacattggaaaactgactatagttagaggactatgattgccatggattatcatcgaagaccctgggaaaacaagttatgtgacattgtttgtagatcttaaaaacatgcctttttcttctgcatgtttacttcgttaagtttttactatatatttatagtaaaatatatatagtaaatcaatctatctatctatctatctatctatctatctatctatctatctatctggagagaaattttcaagtgtaagcagcatagggacatttgtatgccctagatggaaagataatattgtaagtggttgatgaagataatatccgttggtgggtggcttttattatttttaccacttaaaaattcaaaggccaggtccattcagtctaagtttcagacacaggaaagaattaacagagatctttggtaattaaggtggacattatgttgccctataaactgtgcttctttgaaagttgaaaaaataagcagaaatttttgtgtaaaaattattcaggcatagtgttccaactgcgtaaaattcttagccattgttatcacatgctagaacagaaaaagaccagttaatgctttgaagttgatatcagagaggtcaagaaattctatcagtgtagctcaagaaatatgttacttagaactaagaaaatagaaccactggaaaaatggttaaggaaacgctcagcagtgtacccatttacctggatttctgtagtccaaattaagtaaaatattaaataaaacactcgagtcacaataatttttcctcaaatatctgcagttgttgctctatgtcatttcatattacctactttttattactttatggacaagctgttttttcttcctgccccacccataaattttttttaaatcaatttttattaaccttgcaaatcagaaaattgtataggatgtttccagctttagcacccatacctgagttcatttatttttcttataatggtttctttttcaacaatatcttttatcattgcaatttcctttgctttctgctcatggagagcatattaaattgatgttctatacttctgattcagacttcacacagcttcatttctactctttactgtgtccagtatggggtttacttttgttattattatgtattctgctattaaattcgtgtgtttttacagtccttccttatgctactcatttccctatttaattttagtctattgtctttttatttgattccctcctcatggctcttcgtttctgctttttttgtttgtttgttttgttttgttttttgacacgaagtctcgctctgtcacccaggctgcagtgcaatggcgcgatctcgactcactgcaagctccacctcccgggttctgctttttaggcaaggtcaaatcatcttataaaaagaacagcttgaaaaaatggtggagactgtgttcatttattattttgcaactctagtatttccttcaatagtttattctattttactcctcagccctttattgtatgagcatttctatagctaaattctagtcctgggctagtcatattctgtacatattccttgtgcatttcattgacacctatgcaattatcatctgtattcaggtgattcacgtccttttagctctgatttaggccacactgttgttcttagaacatttgcctctagatgtcacatagagttaaatatgacaaaacaccacttatgctgttgcttgttaaattcactgccttggggaaagcatattgatttcttattaacctttgtgcattccacttttcaggtggaaatgcatactgcttctgcttatgtagcacttcatacagtgatctttcccatgtttttataacctcttaaatctattttaggaaatttcttgaatatcaatttcttattttgccatcacttccagtcaagaaattctttctttctctgtgtttttccctggcctttctcatccagtgttgttctctttataacactactattcttaaacttaatttaattgatgaatactctctccaaaaagcagaacttatttccagtatctgaaagttacaggcttcccattctaatgtgtatgtaagaatctagtatggaataagaagggaatggttacataagttatatcttagtattggaatattatactgttatttaaaatgattttgtactataagggtgccaaaccagggtttgttgtatgtggctctgtagagatgtgttttgtttggctggtgtttttttttgttgtttgttttgttttttttttgtttgttttttttggcctgtggagtgtgttgtaccttagttgttatgcaagcagcttaatatcttccactcagttggtctcctatatttgtggtacctgcctagcttatgtaggaagtttgagaccatttttggaaaagaatattttaaagagaaggaaaatgctgtatgagtgaaaactatagatttgtagaaaaaaatactgacagttataaacagatttaaacagtggttatctatgagtgattagaggcgatttttattcactttgcttcttacctgtagtttccaaattttccctaatgaatatcattagggaaaccaatcagttaaaaccaatcagttaacactagtttaaaagaatatagttttgtgtatgcattccatagtactaatcaataactttttattaatcaataacttagtctacgcccttaggcttgacacttaggcaacttatagtacagaagatatgtgaaatctgatcattccattaacaggcttgtagtcctgcttggagagacaaacgtgatacaggctctactgggatgttaccagtgaaaaaggacatagacagatagaagattctcaagcaatctaacagaagtggtcattttagccatgggagacttcactgagttgaaaggctgatgacatgtttgtgatactatgttaagagctctttaagtttgtagaccattgacgttgctagttatctccacagagagaatctttcttataacctgactcttctgttacaggcattttatgttggtattttgtacactttgaagtttcccagcatcttttctgagtgtcttaagccttattagaaaaaagtagaaactgaattctaaattgttaacaacctggtaaccatagatacttgactgtttggaaaaaatgtaaacatatcagccctgagcaagacagccaaaccaaaacaaccacagcgagggattctgattcctttgacagactctgtttctttttattaaaagtatttctttagagatgataaagcaataatttgcaaaatgaaattagaacatcataatccttcttgttcaagaagcattattattaaaaggtagcttcatgtgctactaagaagctaattagttgttgcctggcttatcatgctgagagacagctgtgattcatgggtatttatctatcacaacaggattttctaatggtatttggttatgaaattatttatacttctgactcaggcctttaaaagggcttccagccgtttttgaaagccaacttctgcactccagagcgttttgtgctgttgagatggtgaatcagcttggcagtgtggtagtgtgtgaatccggtcgcactgcagtgtctgagatgcagttttctggtgaaacttctcaagccaagtgcgataatgagtgttcattgatgtagatcttataattttgtaggaaattttctaagaaactgagctttttcaaaatatttagaaataacaccaacatggatttttgtggttatgtttactctaataagctgttaataggaatttataccattatattccttgtgttaatttcaatgtgtgagtttagtatggactattaataacttgttttttctttatcaggcttttattttatttggttagtgattagaataggaaagaaatcaaaagctcttcatagaactctcctgaactttaaatatttaaatcatatttaaatattattcattacattcatttttaaagcacctaactcttcattttgaagatctcaaatcatcatctttgagttatagtaccagagcaaaaatgtgagccttgatatattttctttctttaaaacaggttttaggtaaataacaggagaaatttttgctcatttatttgaatatttctgtggcttatataaatcaagggctgaattacacaaatacataatagtgatttgaaacagactctaaagttaagcagtagttttacttaaccatcccttcttaagtagaataatgagctttgttgagggacaaaattccatttgttttcccaaagtggaaagtagattttggggtgacaaagccttcatgttcaaggttttccacaagtgagctccatgtttagaaatccataaattatagtttgcatgggttgcttttattaacagcaaggtgagttgttaacaggccctgtgcctaacatgtgcgtattgggcagatgtgagtagactgagcacggatcctcctactttcccagtttcataaagcggttttaaggtttaaacttgcctagtcccaaattatacaattaatcatactcagttgtcatttttcttactaattgttccaagctctttaacatgatgtctggtggcagtaagtcacttagcaggcaatagtggcagggaagagagaagactcttttgcccctagaagtttatgtatgctagtcaaagtaagaaggtcaaaaataaaatgtttctaagacatttccaaaggatcacataggcatgacacccagcccttgaatggcacattacaaaggttagaggacctagatctgtgagacccattttgacattaacttgccatgtggctttctgaaaatctctttatatctgtctctggggctgggcatcattacctttcatagggggataataaattatatcagttccaccagcctgtttataggatttttttttttttttttttttttgagatggagtctttgctctgtcgccaggctatagtgcagtggtaccatcttggctcactgcaacctccgcctcccgggttcaagcaattcccctgcctcagcctccagagtggctgggattacaggcatgtgccaccatgcctggctaatttttttgtattttagtagagacagggtttcactatgttggccaggatggtctcaatctcctgacctcatgatccacctgcctctgcctcccaaagtgctgggattataggcatgaacaaactgcgcccagcctgataggatgattttacatgataagacaaaatgataacatagaaagcctttaaaaataacatagtattgaaaggtaaggtagatatttgctcgtcatgaaccttctcagttccccctcctagtcccttaattgttggactgtttcaggattctattctaagcattcttctcgtatgccattgagtgatcttatccatttccgtagtttcagttatgcgcattgtccccatagtaccatcctttgagctccacctagttgtgtaactcccaagccctacctggccgaatgtcagtttgatgttgcatttgaagaaatatagtccagcaactaaaagcaatagtaaggcagaactgctcttaacttatttctcttgaagaatataatagcatgtagcttacaaatcagcattatttcttaaaatcgctgtcatctcctcacttccctgctcaagggttactccctttgttacaggctcccattttccccagactcaccccgagactctcactcacaactgttttttgtcttttttggtcttaacttctcccaatatacctcatgatttgcccatgttttcttttctccaccctttttttgcttagcatgataaaagctcaagaactagactgacaaagaccaaattctcccttgaggataaaggaggagacaggttattctggcgaagaccttattgggtaggggaaacagggagggggtgggaccactcacatgtaaataatctgtattcccagcacaccatcaagcaggccacttactatctacttctatatttcacaaagtgcctctgactcaattccatctatgacctgaccttattatcttgtactcaaacttcattttttccctccctatctttgtacaaagtgcccatcatgctcctagttgctttttcctgacatcaaaacatcatcctcagcttccttctctctttatccttcacatcctattcatattctctttaacctagataccaaagacataattctcaaatctcttcatttcagtccatcaccattgctgccactgtacgtgttgcttccctgcaatcaattttccgtactccaactagaatgatctagttgatcctgatcattgaacctgatcatgcatcttcctcttctaccctattcagaggcttctgcgcactaagcccttaatttggcctttaagatcctttacactgtggttgatccttgcccatttctctaaaagtagtccgccaccccttcctcagcaggatgcttttcgtcctgcctgaaggcccttacctaagctgatctgattgtctgcagtacctcccaactctcccctatctccaacctactctcacttacttattcactacatctcagcttaaatatgacttctatccaaggcccctctgactcttcaggctgggccggtccctttgctatagtctgatgttcctcacacttcccctttggcaatacccatcccactcgactagcagaccctaagctccacgagaacagagctcatgtctctctcctacagcactatctccaaagtgctaaacacagtgcccagctcagatccagtgtctgatgaatactcactgattaatggatgctgcttccatgacttaggcgccctctgtctctcccatcttatctgcacacatattccgcctcacattttctatttatctctcagaaaaccccgtgtcatttcatataaagatttaagctcatgttctgtgcagaattgtctgcccaacctttccaactaccacctggtcattgtcagcttgccacagtagaatccagtgtatagctttattatgacccttaccatgttattttgaagttatttacttgattgtatgcttttgtgagtaggtcttgtgtgtactttccttcatagcagggaccctattttatttgtttgtactcatccttataatcctgtcacctactatagaaagaattgggatgcctcataactagagatgataataagaataaaaataattgctgatcttattgactaccttctgtaagccaggcacaattttaagtgctttacttaactcattgaatcctctcaactcctatgaagtagttacttttattcttcctattttatagatgaggaactttagacccagaaaagtcaagtaagttgtccaaacttaaccagctgataagtggcaaggctggaattgaaacccactggttccagagccttcccttacttatgatgatccgtcaatatagtttgtgccatcaaaattgggttttagaatcttgctgtctgctttaaattctgattcttctacctactcatcatgtgacctgaggtatgaaaaatggagataattacatgccctttaaagggatatcctgaggattaaataagattattagtccctataaaatatctgctgaatgtaggtagttgttgcagtgttaagtcagccagagcactcattggacagaaggtctttcatggttctttccaactccaaatccaatgagtctgtcttcaatctttaccctttgtcagtacgtattactttcaaagctctggtgtttgttttaaataatcgaactttatcagggtctgaggacatacctgcatttctgtcaagtaaaatctatgtgttttttatgagcatgtgttgcctaaaaccacagtcctgatttcccatgctcaaatctggggctacatggctaaataaagatctctgtctaaagagaacaaccaaattcctgtttatagtcagaccatagcagaaaaagaaatccaagttgtaaattattgtttgaattatgaaagtttgagatgttctaatagtaaaagaactaaagagaatatacaaatcccgtgtcaacatttgcagcagatgtttgtttcctctttccaagttagatgagggcatttcagggtggtctgtgttattaaattgattagcagtcaaatggaaacttcagctgcttaggtgatgatttaattgtgaagactgttaatactgtgtctattagcacatgcttattattctatgaaactcaaagtcgtaagattattgacaggcactacagtagcaaacaacattggtggaaattagtatctagttctgagacttaatggtttgacttgtgtgcaaatttaataactacttatcagtagttatgcaataatacagtgaattttcccaaataaatatgtattacttaaataaatcttgcctatctgttcatctatgtatttatttgccttgttcaaagatgtaacaaagcaaataaaaatagaggaaaaatacacttataataggataaattacaactgttatggcattaggagagagtttgggtcacaaaataataccttgaagtccaaaacattggatggaggtgggcctttctgactgtgtacataaaaagggaaatgaaaaaaagctgcaatttataatagccatcaactaacaaaaatcacctgtagaaaaccacaactattgcagttactgagaccatagagaaatgtcacttgctgtatggaatgtaataaatagcaccttcaacagcacttgtacagaaaacacagcaacaggtttcttagtactgattccttcaacacaagctgtttttttgccatcataaattcgttaaaaagcaattagttaaaagcaattctatatagatctgttttattcattttattgatgttctggcttaatctaaggattgatttatagtatctagagatataaacattaaattttttaggcaatctttttttttttatggaggctttggtaagtattgattagatacagcaaatcagtatctgtccaacctttgggtaaggctgaatactataacaggctaaataatactaaatactaaaataggctaaataatcagacatacatggaaattgcaggggccacaagagggtgagactttaagaaatcatttggattggcttaaagttctgtactatacaactttaggtttttaaatacacagtaagtgtcaagatcactctggagaattttaaaaggacaatctcatcccccacctctgtagttttctatttagtaggtctgaggtgggtgaggtaagagcaattttatttaaagaaaaaagtcacatgagtaattctggttatcagtgaagttagaactactgccatagagaatactgcattaatttcagatagaaaaaaatttaaagctaatataatcaaatacaccttagctgtaaaactcttttattctgaaatgtatacctagccaattgaataaggtgatttattatatgaatttcttattagtaaaccaattaaaagtttagtaaatctactggcatctaactatgtctttgaatagttaatatgtatcctaagataattttttattctcactattgtctgattacatttccatatagactaaaaatatttcagtaatcattctatctagagaactttttttgctatttttagtcctcaagaagttataaagcatacttatatgcactctgaaattatcttaggtctttaggggtgctttcatttgtaggctttcaagtgataataagaaaaatgatatctcacatacatttttacttgtctgcagtagccccaaattagttatgaacaaaatcttaaatatgtggtaaacctttgcttaaagtagaaaaccaagcccatatatgtaagtgtatgcctaaatctagcattagtatttattgcaacagaaatcttgagtaaatgtctcacatttacttttcattgtttttataggcattgcttctatgacagtgccagtgtacattgcggaggtctcaccacccaatttaagaggccgattagtcaccattaataccctcttcatcacaggagggcagttctttgcaagtgttgttgatggagccttcagttatctccagaaggatggatggaggtttgtaaatactttttacatttaatttttcaaatcttgattttggggaaggggagaaaaattgagaaatcatagtcaaaatatagctgtgtgttttgaatcattattgctaatttataagtaggtgacattcagcaaaactgagagtggacaggaagctgatatttattttgatgatagacaaggaacctaccattaagaattgatatttacagggcttttttagcatttaggtgacatttctcacactgtgtgcaatcttttgcaatatttgtttaaaaatgaatgcagtgataaatatgtatggagttcatgaattctacaatgattgacaagctgtttatgaactacagatataactaacatcctttttgcattctggaagctacattttgatctgaaagaaacgtagtgtttaaagataaaaatatacctctataaaaagatatacatgagtttaaagtatacaaattattccttgatatttggcttattttgaatcaataaatgacaaaagtggttttaaaactgctttaaaataaatacaaactattattaaaacaaaatcttatgttaaagcttaaaagatattatgggctctggattttgatatctttatagtactcatgtaactgttccagagaaattttattaaaaggcattagaggttatacaatattgcctatcttgttttcttgcctctacttattagaacaaatatttattcagtatttacttctctgtagatactggggaatagaatattcaacaatataaactcaaacccttgtttgcatggcttttacagtgttgatgttaatcctcaacagtagaagaaaaaagggtgtggactgggtgtggtggctcacgcctgtaataccaacacttcaggaggccaaggtgggcggatcacttgaggtcaggagtttgagaccagcctggccaacatggtgaaaccctgtctctactgaaaatacaaaaattagccaggtgtggtggcacacacctgtaattccacctacttgggaggctgaggcaggagaatcgcttgaaccctgaaggcggaggttgcagtgagctgagagtgtaccactgcactccagcctggacaacagagcgagactccatctcaaaaaaaaaaaaagaaagaaagaaaaaggtgcaatatgatgtggacccagggaattaaactgcttgtaagaagcacgataaaccttgtggcttaggatgagccattaaagacctaaatgggtgaagttttaattaaaagtcatgtgagaaaactctttgaagctaatgagggcctacatttgtaaggaccattaaggggaggacacagtttttaaaaacggttgttgtgtctgcagatgttgctaaactgaagcaggaagtttctttcttcttttttttttttctactcagtagatgaagagaaagaggaaagacgataactgttttcagtataacctggtattttgagtttttcttgtaaatgcaatggaagtcagtctttcaacttacatgtctttaagaagttctaaatcatcaatttatattttgttaaaaatttttattaatgtaagtaatatagatatattcaaatgcatagcatgtatagttgcataaatcacatttttcacttacgcataacaattaagaaatcttttctcagtcctggttaggaaagagaaagatctcacagtagtgacaatacatttatgaatgtggtgtgcccgtgtaaaagcggaggtgttgggacaagcctgaaacccccttgcagaggcaaggagacatcatagacagacctggattcaaatctgttttttaccattgattagataagaaccccaaacaaatcatttagcccctctgagcttcacttttctataaagtagaaccagaaatacttataagattattgtgggatccaaattacttattatatgtaaagtgtttagcgtagcacttggcacatggcagataataaatgaagaatcacattgttagttgctgttctgatgaattgagtaaaagatggatgctactatcgatgttgtaagagaggctgaaggaaaatcaacattctgtgttatctgttttctttattggcaagaatgatgcttcaagatggtagggcagaagactagagaaaaaaagatttaaagtgtattgctgctgtgggaagcatgagaaggaaaagactagggacaacacatgatttccaagtaaccatggaatcccagctgaagctggagacatatatttgcagtaaagccaattagcatgctcatgtttatttttctggcaatactggattgcctagggatgaaaaaataaaataagagtatgggaaaactaactcccgttgatatatagaccaaagtattaacaaccagattgttttgaacccaatttattctttgcatgaatacacatttaattatgtacacatgcaaacatgtttccttttttttaggtgaattttctctgttattgtcttctgttatctagtatccttatcagtatatttatctcatctgactcctgggctaataggaatgtggttataagcaaataaaaattgaagtgctaccttagcattaactttagactctgtaattgtcaacaattgataacttattcataattataacaatagataactcatcacttttatagcaatatgtttcaaaaatcttaaggaaaaatctgaaggaaaatgtgggtctaaatatatcatgtaaaatttcttttccatactcatatttttatatatcttcacattagatgtccccagtcttcaaataatttgaatattttaaatttgttttatttccctttttggcttttattgcttctgaaactctacctcaagtttctaatattaaattttatactacaatacccagtgtcccagatttactggtcttgcattatagtgatgaacagtttcagcgtctggtagcaaataccatttgatcctaaccaaaatcttgacaggttagtggaattggtattattctcattttgcagattaaaaacttgatgcttagagaagttaaatatttgcctgagaccacatggctattacttggccttggcagagattagattcaaatcttcttattcaaaagctaactcctttcttcctcatggttctgctttcaagcgtttataatctaacagccataatttttgataatttttacagtagtgattggattaagacagatggaagatgaaatcgattgacagaaaagcaatttagattttgatgttgtagaaacattatagttcaccttttatgccagatgggtcaaagtttctgttctcttattttttagatatcatagaaataaattgttttctgctgaacaactggaagtttactttctctagaaaaaaagaactgccagtagcagaatcaatgttgctatttttctggcacttcattatcatagtacattctgtactgggaaggataccatctggcttcatgaagaaagaggaaataaaattttgaaaatattgttaaagatttgattttttaataaaaacaactttattgagatgtaattcatgcaccattcaactcatccatttaaattgtacaatcacttggcttttagtgtattcacagagctatgcaaccatcgccacaatcaaatttagaacattttcgtcaccctaaaaagaaaccttgcactccttagccatcaccccctaaccccccaagctgtcccacatttaggcaaccattaatctactttgtgtttctataggtttatgtattctgtatatttcatatatgaatatgtggttctttatgactggcttctttcacttagcaaattttcaaggttcatctaagttgtagtatgtgtcagtacttcatttctttttatagcaaataataatatggatataccacattttgtttatctattcatcagttgataggtattgttaacattttggggctatataaataatgatgctatgaacatttgtgtacaaattttaggatagacataagcgtttacttctcttggatatacacctatctgtggaattgctaggtcatatgataactgtatttaggtttttgaggactggccagactgcttccaaagtggctgtattattttgcattcccacaagcaacgtatgagggtttcaatttttccatgtcctagtaaacacttgttatttgtcttttttgattacagtcatcctagtgggtgtgaagtggcatctcactgtggttttgatttgcatttctctaatgagtaatcatgaggataacttttttttttcctaatatattgtagtgttgacaaagatggcagagatgtttcgatagttaatattaatgataaagttctatcgctgcttgcccttttctttgcatatgtatatatttgcattatagtgacgaacagtttcagcatctggcagcaaataccatttgatcctaaccaaaatcttgacaggttagtggaattggtgttattctcattttgcagatttaaaacttgatgctcagagaagcatatatatatatatagtttatttttatttttagtagagatgaggtttcaccatgttggccaggctggtctcaaactcctgacctcaagtgagccacctgcctcagtttcccaaagtgctgggattacaggtgtgagtcaccatacctgtcttctttgctaatatttttaaatcttacttcatgaacatagtgagatttactcactacacttcaagcaaacaaaaaatatccttttttgaaaattgcttagttaaatcctggcttatcagtaaatatatagtaagtgaacttagccatcagaatgatctgtctagaaaacttatctgggcatgccactagtaaaatgtttcaagactgtctatttcctacagggaaaaaaaaattaaattctttatcatggcttgtagtacccaatccatgcattcttttcaagattcttctaactagtgttgcccccgactccactttgtataaaacccaagcttataaaccaaccatatcttgctttgtcatgtttctagttttttttttttttttttcattcttatgctcttttttgcctgtagtgtctccctaccctatccagggattctggtccagctcctgttcatcctgtaaatctctgctcatgaatcatggaaactctgttcctttgtcttttcataatagtttctacaaagctccatttttatactcaccatattatattcaactacttgcttactcttctatctcctctcattcattttggaactcctgaatgtcattgaccttttactcatttttagatctaggaagggcgcagaacatagtaaatattcagtaaatgtttattgaactgagctgaaattcactgggctctagggaagggactcttagttagcataaaaagatatttattataaaccaaataccaatgtattaatttatacagagggatatatatacttcatagatagataaaaattaaatcattaattatatgtgtttctgcaggtacaaataagagaaagaaaattagtttctgagcctatgaaaatttatctccttcaagagaatatacctccctaggaacctgaaaactttcattattttctctttggtaatgctgattttcaaatgagtgtctctgtgtttacaagtatatagtcatcatgtgatttgtattaatagggataggtatatatacagaggggctaaatttttctgtttcatgctgatttttactcatcttattcctagatctactttaaaaaaaaaacaggcttatcttattccacctcactaaactatgtacaaccatttgttaaatgtctggttgtgctagtcattttcatgtttcatcatttaattgatgtaatataggtattgaatgagaaatacaaaatattagtcctgggaacctctataggagagattttcctgagtatcctgaggctgactcatgcacaatgtgagacatgctgagttttgaagaattgatgggactcaggtggacacaggtggatatgggaggcagagtgtagaccaggagggggtaggatcagggaggattaagactacagtgatgatgtacatgagaggctgaagccagattccaatggtctatgaattcaagtccaacttctgtctacaggcaaagggaatttattatttttttagcagagtgtgccatgacaggagtcaaagatcactacggcagtgatgcccagaactaactggggctctcgcctcttgggtagatttaggaaacctagttatgaggctgctgccaaggtacaggtgtgaggttatacttttggagtcatcagttggtgtggaaataattcagtcattcattcaaaagagtttcttgacactttctgcatactagtcttgtatttaatactagagatggaaagatggataagaagtgctcctcctgtcctgaagcctctaatggcctaatataggagagagactttttttagtctgttgaataaatgatggatatagtgtaatgggagctcccaagatgaatgaataacttagcctcacaacagaaagatatttgagctttttgaataaaagaattccaggtacagtgagggagagggaaattctaggtgaaatgtaatcttcaaaggccctgtcatctgaaagaaccagtcatgcttggacaagagtgagaagttagagcagctaggaggagggctatgatgatcatctgggagtttgggggtgaagtgggaaggccggcctttggtgggtgtggatggaacttgaaatcctttgctctcactttcataacacattagatttgggtttgtttattgaaagcctcaaaaaagaccagcctggccaagatggcgaaaccccgtctctactaaaaaaataaaattagccgggcgcggtggtgggcgcctgtaatcccagttactcgggaggctgaggcaaagaattgcttgaacccgggaggcagaggttgcagtgagccaagatcatgccactgcactccagcctgggtgacacagctagactccatctcaaataataataataataataattttaaaatccatgtcaataagatgcttctcagaatgatatttaaatggggatgttatttctaaacaactttatgctggagaatgtgttcttaaaatttcgtgctaatagatcagtggtacttggctctatatgaaatgtagaatatgagtcaatcactatcttaaaaatagaagtatgcagtggtcattttaagaatgatagatttagataacacatgtattaattggtggcaaacagtctcattacaagtaaatacctgccaggtgccatggcttatgcctgtaatcccagcactttgggaggccaaagctggtggatcacctgaggtcaggagttcgagaccaccctgcccaacatggtgaaaccccatctctaccaaaaaatagaaaaattagctggatatagtggcacatgcctgtaatctcagctactcaggaggctgaggtgggagaatcttgaacccagaaggcagaggttgcagtgagccaagatcacgccactgcactccaacctgggtgacagagtgagaccctttttcaaaacaaccccaaaaagtaaataccttagtgctgaagatataaatacgactgtttatcatgaagatattacagtgtggtgggaagaatatgtttaagatttgctttcacagcgtatgaattaatttatctaagctctaatagtctcacctagccagtgttccagcagtcatacaatgttatttacgggatcaaatgagctagtagcagtgaacatacttacaaactcttcagtgctattaggtattgtttgctgttatcttcagaatgttttaggttaagtctctatattcggcatttaagctggcaataaaaattgctctcaccttcagttatctgatttttttccaggaaaatgtaaacatggtttggtaatgacagagcagtttgtataagtctaattcccctgaagatgaccattataaaacatggacagaatgtgtgaatgtatggagcatggaagatatttaggatagtgaaaatactctttattatactttaatggcagatacatgccattatacatttgtccaaacccatgaactatatagcaccaagagtgaaacctaatgtaaactttggactgtaggtgataatgatgtgctaatgtgggctcatcacttgcaacaaatgtcccactttggtggaagatgttgataattggggaggctatgcatacgtgggcaggaagtgtgtgggagatctctgtaccttcctctcaattttttgataatagcaaaagagttggaggcagtaaatggaattatatatttgtgaagcagtatctctaggtagactgataagtgaaagatgcatgtttttatctgtagaacaatgactagaatatattacaaaaagaaacacataagaagccattatgagcattaaaacgtaatacttaaaatatttggataagctgaataaatgcaataaattaagaacacaggaatgaataagagatggcacaaatagcaaatagcaaaatggtatacctaaaacccatttatggtaataatcgcattaaatgtaaaaaattattgtgtactaaaaatgtggcacagatctacattgtctaaagagacacactttaatgctattagattcaaagtgaaaggttgggaaaagatgtaatatacaaaagtgagtataggaaggctggtgtggctatattaatagtcacacaaagtagacttctagagagacagtattagcagagataaagaaggacattttctaatgacaaaagagccaagtcatccgaaataataatgatacaaaatgtgtagtttatctaataagatagcttcaaaatacatgaagcaaaaattatcagctggcagttagccagcagtgtgaatgcacttaattctgtagagctgtatacttaaaagtggacaaaatggtaattttatttatattttaccacaataaaaaaatgggcaaattgagcttatatttgcagaatttttaactcttttttttaacaacgatagaacaactagataaaagattataaaaaagcagtacaatactattaaataccttgtcaaaactgacatttgtagactgctacatccaacaattgcactatacatattattttactttcccttttcctttccttttccctttccctttccccttccctttccctttttcttttctttcttttttttttttttgagacagggtcttgctctgtcacccaggctggtgtgcagtggcatgaacatggctcactgcagcctcgacctcctgggctcaagtgaccctcccgcctcagcctcctgagtagctaggactagaagtacatgccaccatgcccattaatttttgtattttttttgtagagacagggttttaccatgttgcccaggcttgtcttaaactcctgggctcaagtgatccacccactttgggctggcattataggcgtgggccaccatgcctggccttatgaattatttttcacatttacattagacagtctccagaattcatcatatcctggggtataaaataaatgttagtaatttattaaataaataaatgaaatatatgccccctgaccacagcagaattaaattagaaaccaataacaataagatagccagaaaaagctgcaaatctttgtaaattaaagtagcaggttctaaataattcatgggtctaaggagaaatcagaaggaaaattggaaaatagctttgaatggaaagaaaatacaatatattaaaatttgtgaaatgcagctacagcagtgcttagatgaaaatatgtggcttaaaagtgattgcagtagagaagaggaaaggtttaaagtcagtgatctaagtttcatgttaagaagctagaataataggagcaaattaaacccaaacaaaacaaataatgaaatattaaagagcagaggtcaatgttaacagttggttctttgaaaagattaatcaaattgatacactggctacgactgattaaactgattaagaataaaaagataaagtacaaattatcaatatcaggaataaaagagggcatgtcattctatggacattatgaggataatgaaggaaaaatttgaacaactgtgaacaacttggtgccaataaatttaccaacttagatgggatggtcatttgcttgacaatcacaacttaccaaaaatggacatgaaatggaaaatttgagtatccttttatttattaaagaagctacatcattattaataagttacctgcaaagcaaattccaggcccatatagaattttttttttttttttttttgagacctgagtgccaggtctcactctggcactcaggtggctggaatgcagtggcaggatcatagctcacttacagcattgaccgcctaggctcaagggatcctcccagctcaacctcctgagtaggtgggaccacaggcacatgcaaccacacccggcaaatttttgtattttttgtagagatgaggttttaccttgtttcctgggctggttttgaaatcctgagcttaagcaatccacccactgcagcctaccaaattgctgagattagaggtgtgggccactgcacccagcccctggtgaattctataaaatatttaaggaagaaatagcttcaatcttaaacaaaaactttaagaaaataaaggtagaataaacacttcccaataaggtttttgaagccagcataattctattactagggcctgagttgttacaagaaaagtaaatttgagtccaatttcatgaactcagaccaaaaggtatccttaacaaaaaattaataaaactgaaccaagcagtatgtaaaaggggaataaatcatgacccaggaaggttggttggtttagcatatggaaaaataatccatgcaagtcaccatattgaaattattcaatggaggcaaatctgtatgatcatctcagtatatgcagagaaaatatttgagagaataacattcatttatgataaaacctttcaggaaaccagagtagaagatgacatccacacaaaaaaattgcagccagctttattctcagtggtgaaaaaatgatgctttcccttatgactgtttgctaggcaaagatatccactatcatcacttacattcattcaaccagaaaagttgattctaaattttttatggaaaatcagaggacctagaattgctaaactatctcaaagaacaaagttggaggattcactgtctaatttcaagacttattataacactaaagtaatcaggacagtctggtaacagtagataaatgaatcagtgacatagaaggaacaaccatatgaatgaattttttaaatattgtgctgattaaaagaagctagacacaaaacagtacattccccatgattccatatgaagttcatcaatgtgcaatggggtcagaaatttgatcagtggttgtctacggcaatggggattgactggaaaaggggtacgacagaacttcctggaattatggaaatgttctctttcttgattgagatagtgtttacaagggtgtgcatattttcttaaaattcagaatggttacaccttggatctctgcattttcttgtatataaattttacctaaaaataaattaatttcagccttatggtggatttctctgttatattcctgttctgcattgaccaatgaataacataaatgtttctgccagaatttttttctaatagcttctgttggaataactgctctccttaactcctcctacactgggcctaaacccccatcatggcagttaaagaatcctattttgtttgatgattactggagtataggttacttgaagcaggggatgtctgttgatcattactgtttctctataatccctagctcagagcttttcatggatgattctcagagtttggggggaaaaaaggatatgtgtatatttaagaagtgtgtacattattttcagcaacagtactgtgaattttgtgcaggtcttaacgtattttaccatgcagtttaaaactacttaatatttgtgcaaaatgccatattcattgatttcaacgatatcacattctgtcagagcatattttacttcttccactataatcatgacattttaaataaccctggccaagccacttatatgctgatattagtttacttggtggagtcttcttctaagctatgtagacagggttaatattttgttatgtttacttacctggcaattagggtttgtttgtttacagtgtatacagaatctttctcgaggtaacacaggtgttgatcatttgcggatcatatattacctgcttttaacgtgaaagattccatctgtgcacattgaaatttttcttaggtaccttcagccatggtcttatgtttattctctagctgccatctgattatcaagtgtatcagtcatcagggtgcatgtcttacatggtccttggtggcagaggaaaagtaactttccagcctgggatctcaatgtggcaatgttttcttttctgctaaaatagacttgtgaagcatgaactaaaatttaaaaatatgttaccaagtaagttgctgtaacataactctagcaactggctaaattcagtgttatctgtttgcatctaaaacttttgcattaagtagaaacatattacataaatcataactttggtgaccatgttatcatgtaaatatctagttattgatcaataacgatgaccatttcttttgtaaatccatggatagagatctttcagtaaacacatcactcatgtgattattccttcagtatatgaaaaattcaaaattcattggaacattgaacaatgtagttggatagctctggatgttagactgagggcacagtgttcttggatgaggttgaaggggtttgagttatgcttttttaaggggaaaatgtttcactgtcctgtttatcattggaaagttccagctcggggggatgccatctctgggtaagtttattcatgatgctcagtgattagctgtagtgcttggcatttaacatacattcaggagatatttgctgggtaaatagctgagtaacagctcagagaaatcacaaggcttagctttccaagcaaacacaatacatcttcattagttagtgttttcaaagaatctattgattctaattgctaaccctttttattttccgtgaactaatgcaggaaaaaaagattttgagtttattttatagttatttgtgaaagaataccaacttgaagctatagaattttaaagaatacatcatcttaatatttataatattcctctgagctattcagaatgggctaacatggacatgatttgttaatcaatagcaaaagtgcaagccagaagacagagtggaaataaaacttaattggaattacagatacagttttttcatttcctttttttagtttaagacagtattggatattattagagaatttgctagaaagccccactgtactcaggatgacatttcagagattgtcagtgagccaatcttagtgtttcagaaagtatcaagattaactgtgactaaaaagtatgaggtggttattttgcttggaaccacagttttgacaacatgaagttgggaaaccagtaaggaagtgatagttgacctgtaccttaatgctttcatggcctgttgggaggataattgactaaatgagtatggtgtctgaaaacctttactgtgcctctcaaagtgaaaagtgtcttctcttagtagaattcagctcctcaagggctacaaaaacaattgcatgtttttaaaaaatacaatgtagtgtaataaacttcccttaactaggatagtttttccattacagcttgacttaaaatgaaaaccacagatcatatagatcttccagtgtaaggcattggcaactttttcatgtcatttgggttaaggaggaacaggaacataggggagaagggaaagaaacagagcacaaatgcgggatgcagttgttcactcctgtacaatttcttcaggaggagtgaggcttggggaaacctttgggatgcagagattgaaaaataaagagaaagcaactttcgatctatcatattcatcatagaaaatattttcaaaggatcaaatcctttaaaatcttgcagtcgaatatttttgctcctaatggttttttttaaaaatacctaccttcttgttatccaaatttttcctgtatgaaaagcttactagtgtatgttaaagaaacattaaataaaactttagtttggcacagtggtcaaaagaagcagtacaaatttaccctttacacatgaggtattttaactagtagtcagctattttaacagtaatgctcttagggagttttgatttagtaaggataggtgttgagaaaatcacaggatattccatttcctcctagcagttctgtgttatttaaatccagcttgcagttacccagcccagtgggtggtactgtgttgggcacctgtgctgggcacaattaggagtgacagctcccagccagccagctttgcttttgcttttgctttgttatttctgcagtgttttactgcatttaacagaggtgagggaataatacttccaaagggaacctctgaattctttaaacatgaagctaaggtaaattaatgcactttttaatgtgttctacagaattaattatcaagtaattattgaacagttaatatagcttgacttacaataaacatttattgtaggagccagacttcctggattttaactgtagttctgttgcatactaaccatgtatcttctttgtgcctcattgctttgtctataaagtggggataataatggcactcgcctcatagggttgttgtgaaatcatgggagtaaatgtttcctaactgttctgaacagtgcttggcacacggtaactggtgctacacattagctgttactattgctattagtattgttgttactaaacaattacatgtctatgctgagattgtgcattcaactagattttcacatatttggaacataatcatcacacctctggaactacgaaagagcagataacatgctaactcatgttatcagttcagagaggaggtcaatgatcgtgaagtgcaaaattctgtaacttaaggaagcagatatgagaggattattgtcgttagttacataggtgagagcagcaggattgctttaaaacaggaatgagagtgaatgtttagttcagtgaagaacctgtttggtttgttgtgaggcccctggccatctgatggaagagacagcaggcttgctcagctgagccatagcaggaggtctggccccaggaatgcaggatccaccattcacagagcttccatctctggaattgagaaggcttaacctgaggtgaaattggtgggattgttctttgttgacagctggcctaaccttgtcttttggaagtattcctctgcctttaaatggcctgctttggtaggcaggtgctggtactgctagctgtgccagaaaatagttcattttgtaactgtaagtttagaaaattttaaatctttagatgagtgatcatgatggtaaagaacatactaaagatttaaaaactcatgagagcttggcatgtctgcttgactgtgtgtttgtctggtgcgcttgcttgtccgtagaaggtaaatggcttttgccgtaaggtgtggaccttgggtgcttgttgttcatgtttaccctgggttttaaaaacatttagatccttggttctcagccacaactgcacattagcaccacctggagagcttttaataaaacaactccctgggcccagagtccagatcaattaatcaaaatccctggggaagggtggggcctggaaactggtgggttttaccagcctcctaggtgattctaatgtgaagccaggtttagaaaccctgacttaatttagaataatgagatctcttgtatcaataggagactacttgcttttctggggactgcctgccccagtgtatcacaatactctgtcattcatctaattcctgctttccttggatttagaggactggtagtcctactactgccttagtttagtttatgaagagccttctctttttgtctcatgttgaaatttttattagtaccacagcaaaacagcctcttatttatctttcctattctccagtctgcacatcgttagaggaatgtttttcttaagaaagaaattggttagttgtacctgctgaaaatttagttgggtgatacagccagaacaaacacgttacagtgaattgattgcgtggttaggagttcagggaggtgaaacattttttccgagcatcctctctgccttggtgaatgatttcacttaattcccccagcagtcttatgaaatagatactgtcacctgtgtgttaaaatgttaagtaacttggccgaaagcagtggcgcgtgcctgtaatcccagcactttgggaggccaaggtgggcggatcacaagatcaggagtttgagaccagcctggctgatattttgaaaccctgtttctactaaaaatacaaaaattagccaggcgtggtggcacgcacctgtagtcccagctactcaggaggctgaggtaggagaattgcttgaacccgggaggcggaggttgcagtgagccgagatcgcgccactacactccggcctgggcaacagagtgagactccatctaaaaaaataaataaataaataaaatggtgtaagtaacttgaccaggttcttgtggtttgtatgcccggagctgaagtgacacccacatccattcctgtgtcctctctgtcatataagctctgatcttgtgtattgcatttcttcaaagccatgaaaattattcatatcaaaatattttcatcgtgaaaggtaattaaaacaaaataagctttctcattttacttttagaagtattaggatacaaacgtataaaacatttttttattgactaatctctagaaagaagctttaatatgcttaaggattggcaggagggtacaaattccttttccacacgttagggcaacggaattgtacatttcggacccagactcttgcacagatttcaaaaggtgggaaggcctattctgtcttctgtagctcacttaagaaacacaggctaatatatatgtctgtattttccttttctttttgtcttctcttttctcttctcttctcttcccttgtctttttttctgtttaaaaaaaaacttgtaaaaatactgcatcctgggatttaatagcaagtagcagagtgcaaaatattatgtgagcatcttggacctgaaaatgattcagtttctacattcatttcagtgctttttgaagtattatctgctgcttttctatcttaattcatgatctttctttggaaagatcatgagaagtgtagataaatgaaacataaaggctttcacctttaggacttttaaaatttatttcctaatccagtatatttagggtctaccttgaaaaatcccttttaaataatgagcaatatagtataaacatgtctttgacacagctcagatggaagttttattgatttacagcaataaaacatacatttaaataacagattaaattataccagttaacatcttaaggggaagaggccagaagtacatatttttgtgagctgatctctgtagctctcatccgaggactcttccagaagagacggtccagttatatctagaataatgaatggtttggttggaaggaattactgagcaagtaaatttgcagagctaaatgacccagaagagttgttacctaagatattgtcatataaatccaaagcacagttattttctggttagttaatgtagaaagtttagatatacaggtgcttatgtgttatttcataaaatatgtactcaatgcctactgtgtgcaagttaactaaatgctatgttgaatacaaagttaaataatattaagcaattgattgggatagctaaataatgtattataatacaagatacaaagacataaattaaggttaaactgtgtgctctgtgggtgagcagaggcaggagtgactaaatattggtgtaattatcacaatccatggcctaaagcgtaagacacctccaataagatttaacactgcaggccaactgattcatttagccattcattcataaatagtttatttactttccatatcctggttaatttttctgtttccatgtgtagtttaagtttgtaatttgtagtaggaggtattcttactacccatgtaataatcatattttttcttctactggttttttaattaaaatgaaattgcttggaaaatagcagacttattttgtgagatttatctctggagcctttaaggctactatcagtttagcatagcttaaaaggtagaatagctttgaaaaatatattgagccaagtgacttccatgacttatgcatatcagtgtggtttgttatagaaatagaattggcctcctgagctctattgttaggaatctaccctagaacatacctagagaagttggattaacagaaaacattcaggtatcgtagatgcatggaagtttccatttgaaagacagcttaaattttatctaattcagcccctttggttcaaaaagatggaggccttagagatgttaggaaatcagtctggtgatcataatttggagagatctttgatatagatatactcattactatttttgttatttcttggagggagttaaaatgatattgttgtttgctattttgaattttgccagccattaagaatagatatttaaagagataacagttaacttacaacaacatgagcagatttttattaggattattgatttctgactccatctttttttttcctgtgggcccccattcctcagttaatgatgatgaacatgatgcttgatggcaaaatgaaataggaaaattgtaacaacaaaattataactaatgattcacaagtcagaaataactataaagaaacaaatttgggcacttattttaatgaaaagtgtgccttttaagcagatatcagaaagttttatcgtagccccattttatattgtaaaatacaaaattacatatgttagccttacataggaatggtgattatgatgttttgcttaatatatttgggttagaatgtgtatacataatgactgtagcttttgctcattctttttcaatgtaatttgtgggaaaggtagagaaataattagatttttctcattttttaattttcagtgcagcacaaaaatatccttttttcctagtgacagacacacacataaatgcacaaataattctggctaacttcacagtaagtattattgttgtcaacacaacacaaaagtatgtggtgagcacatgatggtaagagcaaattttacagtaaatgtggattttttttctttgcaggtacatgttgggacttgcagcagttccggcggttatacagttttttggctttctctttttgcctgaaagccctcgatggcttattcagaaaggacagactcagaaggcccgtagaattttatctcagatgcgtggtaaccagaccattgatgaggaatatgatagcatcaaaaacaacattgaagaggaggaaaaagaggttggctcaggtatatagactttatacttatatgaatttaaaaactatacagtggtcttatttgtcattattttgtgtgcgtgtgtgtataatatatttttaatatatgggtatttatgtataaatatggatatttatatttatacaaaaatatccatatataaaattatatatgtattattgaccttccatattcatttaaaagctattgaactgttttcaaaataatctttgtaaaaaattaaaatgcttcgtttacatgtgttacattaattttcatactaatttttataaagcgtatgagtacctcatgtactagtttagggataagtttgtgtttccctctttccattaaaatatttaattcattgtctattctgaaattcaccatgtcagaaaaccaagaaaagtctcatgttaatttatgttgatgaatttatttttgaagaagatttcacatagaaatgtaccaaacaattctgaggcaggatctataatcttgacagtctgatttgggtaagtgatttgtaggatgtaaacgaggaaaaggtagacatttcaagatacattttttcaacaataacaattagcctgctcacttcacatttcccaaattggtcttattttctcttgcgcttccttttgcctctacattgttagctcaaggggagaagcagatttgtattagtcaaattatttttcatacctgagaaaatgccaagcacacacactcctttgctgatacatgtctacacaggtgttagaaggtctgtccagtctactttctcctaccatttttggtggagctgaccattgttgccttcctgaaacaacaggatgaacactctgaagaagctggtctctgtgttagccacacgtggcttgatttaactttacctacctgtagcatgatagcatgatgctgtcactttgttgctgagatcaaagcctcaacaaactgtgagcccattctatgtgaagttcattttttttaacgctttttgagcatcagccaggtgtccagcaatgtcagcatttctagagtaacatattagtgcaaagattaaggagaattttgctttaacaaaaagttttacttttactgagttaaacatcgtgttccttaaaaaatatcttaaaatatctatttaaatgacaacttattttatgctcctgtctaaatttctcttctcagtaactcaaatgaaatatgaattttttttttttttttgagatgaagtctcactctgttgcccaggttggagtgcaatggcgcgatcttggctcactgcaacctccgcctcccgagttcaagtgattctcctgcctcggcctcccgagtagctgggattataggcatgggccatcatgcctggctgatttttgtattttttgtagagatggggtttcaccatgttggccaggctggtcttgaactcctgacctctggtgatctgcccaccttggcctcccaaagtactgggattacaggcgtgagccaccgcacctggccatgaatttgttttaattgtagtaattcatacatttgaaagttatgtacaaattatgtgtgagtggaaaaacttttcagagtaagagaaaaattgttaaatactatttagagcctgtatttttcttaatttatataaaggataaaaatttaatttttaaaagccttcttgtttagggatatggatatcattgattttattgcaaagcattaaggatatagcttcattttgactgcttaaaaatatgtctgactactctagccatgcagtgttgacggtgtatcctatttgagttttagacattattcggaatatataaccaaatgaatttttaaagaaatctggggtacatagggttgcaattatcaacatctgctttagtttttatcagaagtctttgggagctaaatagcacccctttgcttggatatagataaaataattccctattccccagttttgttttacattcacatttggcacaggtttttaaaaatactataatgttattcactggatcctaataacgtttgctcatgcttgagtaaatattctaaactttggaactaataggattattaacctatccatttctggatttgtattatttgaagtaatatcatcttgcttaatttaaaagctaatcttaacgttctttttaaaaagtacgcagttaagagcattattgcatgaatgcattcagacagatttgccagattacatggcaccagtgattgaggacctgattttttatgattaagaaacgtgaccacagtaaaacatggtctgcagaactgtgaattgtattatcagtattgtaatgtccaggagcaagactctgggtcagtttaattggaaaatagagagttaacaaactgacatggtcttgtccctccatcatgcttcattcaagaacgataggctagatggacaaatgcacataaaagaatggctaacttcaaagtaataaaaatgcactggcacagaaaagatgaatcagccattgtgttgaagggttagggaatggcctgttaatctgtccatggatcctgagaattttgatccacaacatcaagcctgggaactgtgggcaatagagtgcagctacctgaagggaaccttaatgtaggtaccacaaattatcctgatattccaggaatttagaaagacgttgtttaagacaccctatttcttataaggaggaatgtgttatcaaacatggtggcttagatacctgttcgcattgagcttactaataaataggtctgattctggatcagtaaaccatgtcttatctagcagttccccagtggatttgtgacttgtgacggttatggcacttgcatatgtgatccttctcttttcataggaatttttttttcttgttcacttgaatttaaacttgacctctgtgaggaaaataggcctagctactgaagtgtatattggctacattaatttattttttggatgtgtgagattgttagtgcctagagcatttttcttggtttaaaaccacactttatatagtagatatggcagttgctctggccatgtcagcagcaaagttgaggcttccaggccataccatggaataaggttggagtgcaatggaatctcatctcttctgcccatggcattgaggtcagactcatttgcatgacatccaatgtcttgtgtgtttttttccactatagttggcaaaacaacaacaaaaaggcagtatgggaaaagaagcaaacatttggttttcacgtgtgctcagcactgttgatacatcctgtaggaataataaagtaagactagcagaaacaacagcttggtttggagagctcgctggagtgggagacagggagatggaagaatatcactggctgtgtctcaaacttgccatcttaaatgaatctcgggagagttgccgcgcctcagtttctttttaggtttgtaagaaaagaaaaccagattataataactccaaggtctgtttttttaggattttgaaagtctctgagaagtgcctcctctttatttctaaatgctgtacagcagtatttctttcaaaagtatttattgagtgacatgcatcagaggtggggatgtggcagtaaataagactgacaagattctggtccattctcattggataaggcacacaataaatgaaagagcaattaactactagataactacaaattatggtaattgctttgaaaaagatgaagagaataataaaatgcttatagagggaatgaaaaggggtactttacatgggatggttaggaaagcctctctgaagagatgaacttgaagggtgaaaaggaatcagcaatacagagaactggagggaagactgttccagaaagaggaaacagcaaatgcaaaattctgttttattaagtgggccagattgatttttgcaagttttgatcatagctacaaagtgtacatgtaccagacttctaagatattgcagtaagaactaactatacatcttttatctcaggttcccaagcctaagtgttaaattagtagggacacaattactgttttcagaattgaaagcaaatttaaatacaaagaaacattaatatgatttccatcattttgtggtatgtctggtttgttttcctagtttatatcatattgcatagatgtgtaatagagtcatggcctgtattatcaacagatacagaatcctgatagagacataggtaattacttaagcaatgattggcaaacttttctgcttagcttcaaagttgagtgaagagaggcaggccctttggggcctggttattataacaggaagcagctgtggtaagctcaaatatatttgaatttttctgctttatcctagaaattaaccaaagtttgcattctgttctataatataactgttttacttgactgtaaaccgtttttttcctaaatagttccagttttcattcattggcttcatggaacccatcactctgtcatttatatccctgggatatgtatccctcagtttgacagacatgtcctgaaagagtttggagtttctctcctgggcaaattcattagagatgatattaaaagtagggtctgtccatgtcactagagatgagaagtcatttcttggattactgggcatatagaaggcatagagtctttgttaggagctttagttcctgaaagttaaaaattgtctctcatgacaaaggaagtaaaatcaaccaacagaagagacaggattcttctgaaggcagtcttagggaacaatccagaaatgagaggtgtgttttcatgtgctttatataaccttgtttgatagcacttatttgacttctttagtttcttatcctgtaccagcgaacaagtgtaccctgagaggagatgaaaggaaagcaaaggctgttgctgccatgacttgtcagaagaagccccctggccccgctgcaggagcccctcaagcacagtttctgggaggtcttagataaggcaccatctctgtcatcctcctctccactctgaagtgggcgtgctaaggcaggatcattggatgcttaaggcaggatcattgtgctaaggcaggatcattggaaggaaagcatgaacaacaaaagcatgaacaacaaaagctttctctagagaaacatacagatggtggtgttagaaccactgcaaaaagctagggaagctagggaaattaaaaagcagtatgtttagggagaatgaggttattaggacagcatcagtgcaatgacagattgagtaaaggaaggcaggcaagggagacactgactgcatgccttagggcagtaaagagcagccttttataaatctatttatagcatgggttcaatccaaggaacttaaaaatggtcatgggctttttttcccctaaaagaaaatggctttttttggggggggaggggtgaattccatgttaaaaaattacatattaaaacttttttttttttttgagacagtcttgtactgtcatgcaggctggagtgcagtggcacaattttggctctttgcaacctctgcctcctgggttcaagtgattcccctgcctcagcctccccagtagctgggactacaggcatgcaccactacgcccagctaattttttgtatgtctagtagagacggggtttcaccgcgttggccaggctggccttgaactcctgacctcaagtgatccacctgccttggcctcccaaagtgctaagattacaggcatgagccacaacacccggccttaaaaattgttttacagttaatattacctagatcatctagatcatgtactttcagaatggacttattaaacagaagaatgccagccagaatattggccctaccctttggtcagtaaaatctcaacatttaatcatataggagaagtagcaacccagaggcactagctaatgtttcagattggaattagatgcaggcccactagttgctagtcactgtagtagggcatttaggttacctgtgtgatatgtaatctatgtgaaaatatgcaagccagcaagatttccattatttaattttatcaacaaatgagtttaggaatctgggtgaacgttggctttgcctttgacaaagagtttgatctctagcctggaaagcaagagtattgtagggaagagaacttattcaggagcttcctgtgagttcattttaaaacatgatttgatttacctccagttccttgggggtcatgtctgtcatgtataggaagggacagctgcatctcttttttttttcctctagtaattttgcaatttggtcatgaagtcttacctaccttcgtaagtcattttctttttttgtgaattgatattgactgtggccctttcagcaaatcatattctgcagagaggtcagagggggtaaatatttatcgtattttgatagaaattcttctgtatgtttctttagaaatccaatttcagcataatgacactgcagtcaaatactcgttgcaattgacatctgctgcacttagaggaaaatagtcattctctctaatatatttggtagtttgcttttatttttttcatgtggtagtactacagtgttatctgacccaaaacaatgcatggatgtcatttactaggtgaactttaaatagatattgataaattgttcttggtaagatgacctgcaattttctaaatattggcaaagaaaacatttctatatccaatattctagaggtggttgtaaaattccaaaaattgtcaaagtattaggctggtaaacagtagattaaaacaaaaggtcagataaaaagctactttaattctcaatccttatgttaagctgtaagctgaaggactattaaaacaatacacaactctgttcagtttttagtaaaacttattttcttaggcatgctgacttacttaaaagaaacactatttcattcaatatggctttaaataaaggttgtcgtcgattttctaaaccccagacaacttttaaaatcttatgcagaattggaatcattcttggattttacattaaaatgtcattgactgttctgttgttatatggggataaagaacagcacagagattttccactgagcatactcacgggagaagaaaacatttttcagattacttgtaggcttttaagtcattttccttgatttatactgagaatccagattgtcttagtaagtagataggtaatacttcaaagctttatatttttgttttcttgctaagatgtacttaaatccatatctcataaaagaagatccatgcagaaagaattgtgactttgtcaaagatctcttttttcccacttaccgttaggttcatactatattttactgctctgtatttaatacgattaaatggaatgaaaaaaaaaaaacccacaaggtagacatttgaaaatgaatgtaattcatgagttgctgctcagggtagctcacttccaacttaacttgaaatccatcattcagtataggtgatagtctgcttcgtaaataaaaccatgatttggagacattttttcttcaagatacgacaaattgctatgccctttaaaggttacctgatctttgtagaaggttaccagaaggtcctgaagaaaacccttttttttttcccacctcaaaggggaaggcacaggagccattctttagtgttgggacattttagtttaacaagacaattccatggatagtctgtagaatcagaatatcaatggccatgtgtattagtctattttcacactgtgataactactcaagactgggtaatttataaagacaagaggtttaattgactcacaattctgcatggctgggaaggcctcaggaaattcagaatcatagtggaaggtgaaggggaagaaaggcacgtctcacatggccgcaggagagagagtgaagaaagtcacacagttttaaaccgtcagagctcgtgagaactcactcactatcatgagaacagcctgagggaactgcctccatgatctgatcacctctcaccaggtcccttccttgacacctggggtttacaactcaacgtgaaatttgggtggagacacagagccaaaccacatcaccatgtcatatactatctgaagaaacctgcctattctcaaatgtcagcagagatcttctcagagtttcttaaaaaatcaaagaaaccttattttttccctcatattttaaattggatttgtattggggagctacagtggtcaaatgccattaattttctcctcttacctgaggccctctaaaccctctggtactaagcagtatttttaatcagtatcttactgaataccttgctttagatgcacatttcagttaactcacttattaacacctattatttcttgaaacgttgagccttcaataaggaggtgtgtccttggcaggatacagtgaggagaaaattattaggtttatgaagccggaactataatcagttgctgtgtaagtgtctcacgtttttcagtacagtttttcccctggatttttcaaggtacttccttgaaaatgattcccactgcacatctcttagaataaaataaaccttcaagataattttttaagaaaactgagcccagtaactgttctttcctaaaggggaggggcaactagtgtgaaaatactagtaacaatttctttttcctgaatgcccatttctataaatgttacaagcacatctatagaaacacattctccctttctcttttcactctcattcttaaaacaatcctaaaacagacattataatccacgttgtactgggaaaatggagtgctggcaagggcaaacagctaggaagtgaaggaggcgggatctgggccccagctgctaccactccagcttctccctgttctgctctgcagactgcatctcatgccacatctgtgccatgcagtttggatgtaaatattaggaaaaaaaaaaaaattaggcattgtccttgctcttaaagagcttagaacctaacaatcaaatgtccttaagaatatccttttctgaaaggaaagcattcaaacaactataaaaaatgtgaaaaagccaatgaacttcaaaatcagttggcaaaatagttcagttgcttccaccttgagcctgtattcccaatctctcttctcttctcggttcttgctgccattgcctgggtgaggtctctggtgcttattctctctgccagagtaacagtgtcaactgtccttgtttctagtatcttccctctccatcctttccccatggcctccaaaattatcattgcaacacacagacaggatcatgtccctctcctcttcagaaacatgttccttaacttattattaaacttcctttacaatcttgtttgaatgtatctttccaggtttatttcagtagtgcccagactccatcatcataccaagagagcaagcaagaagcactcaacattactaagtgccttctgactctcagggtgaggagaaaatggtgtgggtgggatctgaggaggtaaggtggagcctggagacaccctgagattgttcacatcccctgaccttccctgtttaccccaatcagtgaaccctgcaaagaagatgcaattattgtctcgcaaaaagaattatattaaatttgaaaagcagtaacatattaggagttttctctgggcaaagaaggccttttgatattagtctccattagcaaaatttaagacaatttattgttcggttgacaaaaaggctgaactaaaagtgcttaagcatttcttcctgcttagtccaatagatgctggtattattttaattgtgttacacaagaatagaaagtctacaaattaggaaaaatcgtatttcatccacaagaaagaactattgagaaagtagaatggtgatcttttaattatactttgaatataagcatttggaggctgttctctgtgttgagggttaggtattaattttgatgcattatcctaggggttgtcaaactttttctgtaaagggccagatagtaatacttggctttttggccagtggtcttcactgtaactacttgtctctgctgttacagtacaaccatagaaaatgtattttaaaaaggagtgtggatttcttccagtaaagtgtgaagcttattattttgtgcttgttatgttttattatttataaaaacagaaagccggccagatttggcccatgagctataggttgctgattccttctttaaccattaagtatgtctgtttttatcagtttcctcagtttttattctttggactaatttgaggatgctattcacgttctttcctttcttttttctttctttctttttttttttttttttaaatatgtgcattgaagccacttcagtgtggtaattcctagtgggtttggcttctgtgcagaaggtaaagttgtcaatgtttgtgtccacgtgtaagtgtgcacagggtgtgtagtcacagaggaacctctaaagaagtattgcagggaagcctctgtataattgcagcaacagacttttatgagaccactgctcagagcacattgcttcttcaaggcccagccacagtcacttctgcatatgtcacagccccacaggtccatctcagcacatgatgtcacatttgatctaatggggcaccaaaagaggccaggtttctatggtgagagttgagtctgtcatcatctgagactggagccagctgtactatcaaaatggcttgatgcaccaacagaaatcttagctcccttgccttgaattgcagtcaaagcaagatgataccttttgtgaatgttaaaatgcaccaaacaattaaggagatggttttattcaggctcttgcaatagagagaagatgtattaatgaggaaatccttaaagaagagggagaaattctgggattttatacagcaggtaaacaaaggagtcagaaggaaggttggaagtaatcttatattggaatatgagagggcagagtgccttccttctctcgactccctggaaacctttgtgatatgtctctggagcagtcagcattagatttgcttccactagcaacttagccttacttatctttgtatcctcattgccagatacagtcattgcctgacgttagcaaggcacttcataaatgtttctttgactttctgtttacgtgagaggagtggatggtgatgtctgatctttgactcctgagatttggaggaggaaatggagctcttacagtgtgtagactccttccctctgtcctacttagtcatcatgagaccctggggaggtgtggttggtgaggagaagacataagtcagtgcacaatgactatttgttgaatgtctctatttacaaaggcagatgtatatgtttagaaactcgttgtggacttttagcaaaacagtttggaatttatgtgtatattaggagttattagtattttcttctagttgctaacatgttgggcccatcgaaaaaacttattttttgacatcaagtatttataagtacaatgaaatttcaaatatgaaagttataaaatctcatgtgatttattatcttagaattaattttgaaggagatccttgttactgtctgaatttaggaaataccccttactaattaatgagccaatttttatttataactctagacaatagattataattcagactaggcccttattataggtatgtacacttcaagatgtgatggaatttctctctactatgaaaggtgagcctatgaaattcaaatatattttcactagctatgactacagtggcttcagcacttttaagacaaatgattatcttgaccatagaattgtagtcagaatcttagatgtgaaatttggtgtttgttttgtttctgctactctcattagctagtttatatttatatacacccactttgagaagtaattggaaactcatggttctcaaaaatgttctgtgaaaaatattttaattttactttctgaaacagcttatcagggtttctgttcatttcacaagaattactgaaaacacaggtggcatcatttatgtaataattctgtagatttttctgtcttaagcttaataatggtcctgtggatattcagatttcaagagtagtttttttttgggggggtggtgtagtatgttttcaaattataagttctttattcttacatggaatcatggctgtagctgcataaccatgcaggtgacatttgtggcagcaaagaggaataatataatttaaagttttattactgttaaagagcaaagtttgaagagcaatcatgtgacttttctgattttatctgttagcagtttttttgaaaactaataaaagagcattattctttttttgaatatttacgatgtgtcatgtactgtgcgtggcacttcacatggtattattatatcttttaatgctacaacaatccagtgtgaaatcgttattattatcatcattattatattatactcttttagagatgagaaaaacctcaagtaaactgcatagatctccttggctactaagtggctaaattcagaattccaacccatctgcctttatattttgctggacaacagcaaaacgtctgctttcgtggatatacatgctgatgaaggaacacagacaataaaggaatatataacacaccaagaagcaatgagtgtgatggggaaagatcaagtgcagtggaggagggagagtgttggaagcctggggttagaaaggtgagtcatggcccttttgatgaggtgccctctgagactggaggaagtggtagtacatttccagaaaggaaacccagacatacatttgcctttagttttattcaaaaggaaaatttgtgctgagaagctctacctgccaagtgaattagtaagctactcaggtaaactggccagagacctaattattaacaggatcttgatgtcagaggcttgttctgataaggaattccattaggttcagcagtattttacaacaaaactatgttgaacaacttttagaaaggtgctttttcaacatcagaatcacctctgttattaagaaaaaagaaaggccacgaatataaattgcataggtctccttggctactaagtggccaattcagaattcaaacccatgttgaattccttggaattttttttttttcttcttaaatgggccagtgaaggttattgttctgatagtcttaagtactcagataagaataaattatagttattaactagtcatatataatgtgagaaatagaccctttaaaaattctttcacatacttcattacttgtaaaattataccagcaggaatagagacgtacctacaagatgtatatttaatttagtcttggagtttttacatattacttaattcagcggtcttagaaaattatttttcccaaagtgtagtcatttgcataaaacatttgttttctataataatctcaaataaaaattggctggatctaatatagcattacgatagaaatcttattttgaatatgaaggtgataattcaagaatatcttttggctggcgtggtggctcacgcctgtaatcccagtacttcggcaggctgaggtggatggatcactgagcttgggagtttaagaccagcctgaccaacataaagaaaccccgtcttgactaaaaatacaaaaaaatcagctgggcatggtggcatatgcctgtaatcccagctgcttgggaggctgaggcaggagaattgcttgaacctgggaggtggaggttgcagtgagccgagatcatgccatggcactccagcctgggcaacaagagtaaaactctgtctcaaaaaaaagaaaaaaaaatgaatatcttttataatctggactagtccaacacttaattttgaagtattcaagtggaatctttttatggaattcttaggtgaattttctctcaatttggggtctcagtgtaccaatctgctatgagttggaaaaccttcctcttttacaaaagggatagtttccttctgaggtaaatcagtggaagctagagatctccacaaatgttagagttttgtactttgtacttaattgacttaattagcatacagttgtacattagttgggtgagttttgtttacctctgggccagaaatacatattcatccattatttgacacatgtttctggggcttttactacttgcgcattattatactaaaagtaatgtggtgtacaaagtttttataaacaaaggcttttgtctccaggaacttttataatgtactagataagatcaggtactcaaataaggaagcaagaagttgatgctatataatgtttgagtatagatatgttccaaatacaaataacatatacatatatatgaaggcatttcctccttatttctcttgaaattatgtggcttcgttttagtatgagtctcatcagttacacaattgggcaagtgattcaacttttccccccaagtatttagtctcttcctctgtaaaatcaggtgctgaaggttgttccacatcctggtgagaagtgaatgggatgagggaaatacagtgcctgcgtagggccgcacacgtaagagctcattaaaagtggatttctcatcttttgtacattagtgaaataagctccaaaggaaattgtaatgattttcattatacaaaatatatatagtgtctgagtggcttaccattgtagatttagatagtggttcttgtgtcatatagtgggctcagcttttcagaaagacagatttgagttgtccaaggctatgtgccgttgggtgttacttaatatctagaaactaattgcctgggtttaaattgcagctgtgcaactttaggcaacttagttgacctctctgtgcttgtttcctcttctgtagcatggagatagttgtaatacctgtctcagataattatattttaaagattggatgatttaatatgtaaggctgtgagaacagtgcctggcacattataagctctgtaaaagtattcattcaataatatttttagacatgaaaagagggtggtaacaagatcccctgctcttaagagcataatccatccctttctcactgtattgtaaatttttgacctcacttagcctttgtagaaaatagtttatattactcaggttttttttttttaaatcattttgtaagaccacttgatgatttgactataccctttttgcacttggttttggaagccatcctctgcatgtatcttttgactatagaaactaaaaacatttttactgtagctgctactgcatattcctttactgtctccttatgtctgaagatcatataaatgtctttagcaggatttttcttaccaactcacttgaacttagaaactgaaagcacagagttagaagtggcatctcctgtcaaacattccctagcgaaaatttcttacagcattgtcattcagtcccggaggcctgctatctctgagtgctggagtgtgatttcctgtgtcactttcctttctgggaccataaaattggattccagacatttgttgggaagtttgcgatatgctgttttgaacattactgaaccaatataataacccactacttgtgttttggaagcagtgttatctgtgacagttattgctttgctgatttacatttggaagaatgttgaaaaagaaaaaggcagagcagtaaaaggtagaagcatgtatgtcctggtgatctttagcaggtaagaccagactgatgatattaagctagaatttaggttcatcatggtcacatccatgcgatagaaaaatatcacatcacatctttaagcaacacacattctgaccttctgtaataaattgtatatctcccttgatctttctggaaacacttccagtttctacacctggagtgaagacgcttgccaaatgacaagaataaattagagaattaatccagtgccaaagataatttttgagaaaagagtatctgtttccaaatggcaaaagaacatcattaatatcttctctagcattcaaagacaggagacagatgctactaataaaatataataaactcctcatggttgtttccaataaaacacaaatgattttgtagttctataattggaactgtcaatctaatttagtaggtttctgttgataaatttgatttcaaaaagttgagatgagaaactaattcactattatgtacaatatttcttgctaagtataaggaatattagcaaaaactgtagtaaaaattaggaagttgaactattaatacctcttggcttattgagatgcagcagatctttatgtgactgtcagtttagtggaaagagtgacaggaatcccaggttgtaactcctgctctgcctatcactaggtggctattgcagggctggcttcatggacacgcgacctctgcagctgcccagagccctgcactcagaagggtcctgcccttggtttaatcctcttctgtcactgtcttcagagttgtaatttttgagcacgggactcacattttcattttgccctcagccctacaaattaggcaaccacaactggctgttcacagcttacttctctgaatttcagagaaggcaaccaaaagattctggagctaggcatcgggtatacatggacataaagatgggaacagtagacgccgaggactactagagggaggagacggggagggaggaaggaaagggttgaaaaacgacctattgggtcctgtgctcactatttgggtgacaggatcatttatgcatgtttatgatgttaaggatcaaaccttagcatcacacaatatatctgtgtaacaaacctgcacatgtatcccctgaatctaaaataaaacttgaaggaaaagattcttgatagatctaagagtatgaaattctgtgagtcccaacaaagggaaggacccaagaaagtttattagaaactgaaagctcctgatccaccctcacttgttctcagtcaggaggaattttgccccctagtgggcatttagcaatgtctggaggcatttttgattgtcacagctcagggaatgtgatgttgacatctagtgggtagtaggatgtttaatgctacaaatacacagaacagcccctgcaacatagaactttttggcccaaaaagtcaacactcaacacaggtgatgttgataaaccctgcctaccgttattatttgtgtctccaactcttggtaccgggcgtgggaggttactcaaaagttagttgagcctctggctgtagcctggatcgtaggttgttgtattttttaccacatgaagactgaagaacgaagctggtgagtaggaagtgtaacttaacatttgcacgagatacactacacagatgctcttcttagggcctctacatctcacacttaccaaaccaactggtgggccccagactcttaaaacctctaaaacacaacacactcacagctggcagatgactttccaggacgccctggcacttgtgatgcggtctgttgggctgtttaccaagtcatttaggtttgtttctaaatctgtttatgccattgtgctggttgctgtaattaggcagtagaatcaactattacagaaatttaaagaaagaaaaatataaaaaaaggagagcaatttcagtgaaaacctaagttgaatgttttggaaagattcaataaagatgtcattaaagaaaactgctctcaaagtgtgggcaagatggttttaaaaggtttgtgaaaaaatcattaaaattagatggattctatattgaatttgcttaactgtcttaagttttcagtattatttatggagattgtagacaatacatttttttctgtggtttttgcaagaaaaacaatgctttagtcagctgatccaggctcagaaaaaaaaagccttacctacatcacaagatggaagaatgaatggcatttatatattttagggtgataaaattatttataaatgtaacctcagctgactttccctaataatcaatatttcagacaacagggcgtctattacctttattttccagtgggaaaaatatcaaatattctacttttctcacttgcagatccaaacaactctcagctcagtgatgtctctgaataatgttccttatttaacactaccttatatgttaagaagatattcatttgatttctgactccacaaacaccatcataagatctgtctcttgccagattcaatactgaaatgtttaagaactgtgcttccttttcagtgcatatgttttcttgagttgccatgtgcctgtatagattagcggcatctgggatttttaccacgtcacattcttttagaattgaagaagtataaatattaccagaattgtagtcaaataatttcaagttttttatagaaaatatgacaaataacctaatgtataaggaaacaaaagtttctgcaattccatcactgtttctaatagaaaattatgaatgagacattaattgtcagtctgcctcttcttcagatggcttttgacttagtattattttgttttaggacccatgtctctacattggactttagagcagagttctggcctcttatcttgagcttgttaaaagaaactgtcgccaggcatgatggctcatgcctgtaatcctagcacttttggggaggccaaagctcgaggattgcttgagctcaggagttcaagaccagcctgggcaacatagtgagaccttgtctctgtaaaagttttttaaaaaattggctgggtgtggtggcacatgcctgaagccccagatactcgggtggctgaagtgggacaattgcttgagcccagggagtcaaggctgtagtgagccatgaccattgccactgtactccagcctaggtgacagaataagacccagtctcaaaaaacaaaaacaaacaaacaaaaaaaccttaatgttctatttcctattaatagtcacaatattatagatattatctaacagtttaaagccataaacattctatttggctagtaaaatgttttcatcatttatgatcaaagatttcaggcatttttcttctttaattagtttaagttaacaataaataaattcagcctccctttggagggttagaacaggacagataaagctaaattcctctttgcccatcacatcgatcccacgcattttatacctctctgctccactgctggccataacagatttggggaatattcttccagacacacacacacaaacacacctagagaatttttatggtaatagtatcataatgcatgtattattaagttacttgtttgctttctttcaagttgagttgatttgagtcagatcttatataaatctagtccatccctttaaacttctctgtgatattccagatatggaatgtcacattctgtttatgtgttcttttattaataggcattacatttgggggtatcataaacagtgctgtaatgaacatccttgtatatgttttcttgagcacatgtatgtgtgtttctctagggtagatatctagaagtagaattgtgcacaaccatttatctcatggtgttatagtgttattttagttcatttgtttccatggtaatttctttctaagcttcaaagtatattggctggaagtcatcgaatcacaaccttttagaaatcaaagctcaggtatcatcttacaatatgaaggattagtttaattgtttctccatattctttttttttttttttggagtgacgcagtctcgctctgtcgcccaggctggagtgtagtggtgaaacctctgctcacagcgagctccgcctcctgggttcaagccattctcccacctcagcctctcgagtagctgggactacaggtgcccaccaccatgtctggctaatgttgtttttgtattttcagtagagacggggtttcatcatgttagccaggatggtctcgatctgttgacttcatgatccgcctgccttggccttccaaagtgctgggattacaggcatgagccactgtgcccagccaattgtttctccatactcttaacatttggtatcttgaccctggagcttcctgtcatcaccaccaccctgctgctttttatgccttagtaaaatctttttggcttctctgttctacttttattaacagaatttcagataagagaatgttgttataaggaatcattttagcaggtgtgttactatatttagtctaaaattttaaaaaatctggataggttttttaaaaaaaatccttaaatgttttgagatgctgattagttcagaattatacatatgttggtttaaactagttgaatcttttgatgctgtttaattacctcagactctacctcagaagtagaaagtgcttatattttaaatctgggttttcccgtaaaacccattgtatattataaaagtaatatagataaggcgtttttccatgtatggaatctttaaggctggtaaacgatatcttccttctttgaatagtgtttcttcctttgaataattatgctaccactcatatttaatggcttctatgtgtgaggtattgtgccatatttttttcttttaattcttacagcaagccaaataactaaaatgtgaactattatcattttatagttgtaaaaattgatagagaagttaacaatcttgcccaagtttaccctgttaggaaatagaagaactaagaattcaaaacaaagcttatcttattagaacagtatacactcttcaatgtactatataaggatacccttttccatcatcatttaaaaactatgtgagtctagttctgggattatgcttaattttaaaatagtaatgacctttttttaaaaaaaagttttaaagttgttttcagcagcaattgtaaataaaatagtttggtggacagtcaattaattttgtgtggcttttttttggatagcaaaaaagaacttatgaagttttagaatatttatactattcttgaactatttactgattcttctttcatatacttactagaccgtgtgcttaaaattttgaatctttaaaagtaatgcaagttttttatagaaaatatgacaaataacctaatgtataaggaaacaaaagtttctgcaattccatcactgtttctaatagaaaattatgaatgagttcccttctcgcagcatctatgtgcccacttcacattgggcacttctctcagccacagagcaaaggtgggaggggctcattagtttcaagaaattcttatactgggtcaactttagtaagaaagaaagaaacgaaagttgaacacacatgactgttagctaattaaaagatgtggctcatcttctttataaataaataaactgattagtgacccattgctggaaactggaagaatcagaagtaagtgtgcatctgctagcattacaaatactcaaatgggaatttctttatattattaatgattaaatttatgaaggaattaaaaatatgatcttggcagcagagagtatgaatttgttatgtgtatttgagatctgtctagccgacactgtagacatgggtttattcttgtaaaccactttttctccagagagacttgagtgaacaggtgggattgcttccattgataggaggataagggaagtgagtacaatgtttatatctaactgtacttgcttcctgcacttctgatatggagaccttcacctaaatctttactactgttattgtcttaatacctctttttctttgcttagactattagaaagaaattttacctgactcttagaatttattcattattttgttactatattttcattttaacataattttcttactaataagcttacatttaatgaacataaactatgtgccagttatggtggcaaatgctttacatgctttgttttgtttaatccttaccacatctctttgatagagattcatattattgactgttttctggaggagaagtggaggctaaggaaagaaaaataaaattaaccaaaatgttacagctgatagaagacagaggcaaatctcttgcccagatatacctgagatacaaagtcaagtattcttgccactctgttacagcttatacatttcaaaatttctttttggaaaaaaataatattgtattcttatgttttcccagtgagctcctgtaaacatttaggtttcattttaatcctgcgttattaatttcaattttgtattttgcctaagtattagctgactgtatggggttattaatttatactcatatggtgggaagttgagtatgtttagacttaaaacattcatgtactgtttttctttttcaaattttaaccctgtttgattgaaattattaaatcatctagaaatgtgattctcaaccttggctgatcattggaagaagcaaaaactgtgaaatcagattctctgaggtagggccttacgttggaagcttcttaattatacacatatgcagccaaggttgagaaccacggacttaaaatagcctttggtatccacgggggcttgattccaggatacccctcagataccaaaatctgtgattgctcaagtctctgatataaaatcgtatagccttttggtggcacactgccacttagtggattttagagcagtggttcctaattagcatgcatctgaatcagtggcaagagaccctattaaaacatagattactgggcttcatgcacagaaccctgaatcagtaggtctaacgggaggcctaagaatttgcatttctagcaagtttcaggtgatgccagtgctgcttttttggactgccctttgagaaccacttcagatttaggtatcactctttgagaaccactgatttaggatcttactttctgagttggtctcttaaacttccttttagtttaagtgatcaccatactccactacccaccagatacacacccacataccctttgtaagctatcattaagcattactaggagcctccagatgcctgcactaatactaaagggtagttgtacctctggatgagggatttgttgtggctcacctggggacacttcaaatgaacttcattcttcccttcctctattctgtgaagtataaagtacacagattagtttagaggtctcttcatactgtagctacaggcccctttttctttaactcttcaataattttgaaaaatctcaaaagtttaatgttttcacccctaatttctcttgctaatttgtttctagcaaaaatgtgtctttgtcagcagtgctggtaagtgattacagataaggtagggttaggcagtaccgatgaccctccaacaacatgggtttgaacttacaggtggattttcttcccccgccacctctgacacagcaagaccaacccctcctctgcctcctcttcctcatcctactcagtgtgaagacaataaggataaagacctgtacgataatccctcttctactcattgaatagaaaatatatttttctctcttatgattttcttaaaaactttttcttttttctagcttactttattgtaagaatacagtatatagtacatatgacttaaaaatatatattaatcaactgtttgtgttattgataaggctcccagttaacagtgggctattcgtagttaagcttttggggagccaaaagtgtttaaggtgccatcttgaaaaccagaggctagtaacatgatcttcgacattttagcctctagaactgtgaaaaaaaaaaaaaaatctgtcctttactcattgcccagtctgtgctacagtcattttttggtatccatgggggcttgattccaggatacgcctcagataccaaaatctgtgattgctcaagtctctgatataaaatggtacagtggccgggtatggtggctcatgcctgtaacaccagcactttgggaggctgaggtgggtggatcacctgaggtcaggagtttgagaccagcctgtctaacatggtgaaatcctgtctctactaaaaatacaaaattatccaggcatggtggcacattcctgtaatcgcagctacttgggaggttgaggcaggggaattgcttgaagccaggacatggaggttgcagtgagctgagattgcaccattgcactccagcctgggcaacaagagtgaaactccatctcaaataaaataaaataaaattgtatagtatttgcatataacctatgtacatcttcccatatacttgaaataatctctggattacttataaaaccgaatacagtgtaaatgttatgcaaatagttgttatactatctttttttaaatttgtattttgtatttttattttttgtgttttttgggaggaattttttgttttgttttgtttttgagatggagttttgctctcattgcccaggctggagtgcaatggcgcactctcggctcactgcaacctctgcctcctgggttctagcgattctccttcctcagcctcccaagtagctgagattaccggcgcccgtcaccacgcccagctaatttaaactttctgtgcttcggtgtcctcatctacagaaagggaataatactcccattttgtagaatttttgtgtgtggtattatatgagagaatgagaaaaaatgtctggtactttgtaataaattaaaaattcaatacatttctaaatgtattgaaaaaaaaaacccacgatgatacctcttgagtgtttcttctccttggagatgacttgcttttttatagaacaggggttaaggcatattaggggcctggcatgtcattagtcccttcagtaatacacgttgatagggaaccaacagatttagctaccccacgatatagcatatccaaggcttagatttatagattcaagaacatttaaaaatatttgtctatggggcacctctgacggttgagttttgttattgccatcagcgcccactcactttttggttaagtgttgtttttgtctctcctcttccttggtccttggagataatcgttataattttaataagctagcactgcattaaaaatgatatgcattgaaatttaagattctagttgttaaatagggtaattcatatactattctttttgaagtggaagttgaggctagcataattcataaactccttctcaataggtattgctttttaaaaaattaactttattcctgattatataactgttttaatttacatagttgtgttgggtgaactgtataaatgtccatatttacaggagtggttcccaaacatctctccctgtcccagtccattatgatggcattattattcaccaggggagagggtggttgtggagcacagagcagggcactgagccagtgaccaatacgcctagcgtgagggctcctttccagtgtacaaatcatggatgtaaattattaacccctagtttgctttttttggctaacaaaatatcattatgtcactggctgtcaaggagagtgaaaagcagctttatgaagttccttctcccattttttttttttaggggaatatacactatactcagccataccctagaaatcagagccccatacatgctaggcatttttgtaaccttagcctatgccatcatccatattaatgccttttaaaacttcctctgtgtctttaccttcctcagtggactttgaacccttcacggggatggattgtgtcatattattctcagagtctcaaggacctaagagagttcctagctcatgacatgtgctgagtagttttgctgcatgaaagaatttgaattgaagatcatttgttcctttttaaaagacttttagaggaaattccatgacctcattcattcatttcatgtttaatagtgcatattgcttacagattttatttattttgttgctttctgagcccatctttcagtctgttttcagttgtgataggcaattcattcattattctttgtatttgggatcaaggcattagagagatgtgtaatacagactttggagtcaaacagagctgggtgtgaattgggactttgccactttttaaatgttgttgttggatacattacttaacttcactattgtctcttcatttgtaaaatgagtatgaaaaagtacccactataggataattatgaggactgagtgaggcagtgcacacaaagttcttaggctggcgcataataagtgcccaatacaacaattttttattgtagttgacgtttagatagttggttttcaataagcatgtttttcttaaacctgattatttaaagtcatccaatgattcatttgttttccttaatttcagttgttagttggagaaatgtttacagcctagtgaaaatgtgtgcggtagaccagtaagatcacctacttaataaaatcatctatttgctaggttaaattttgctctgtattattaattatggaaattgattttcttgctttgaaactttattatgtttacccagttatttatcctagtgaaataaattatcaacgaaaatgctgcttctaaaattttcattgggatgattgataacttagaaatgtcatatttattgaagaaatagaattatttttattcagaacaaattcactttgtgattatgcacatttaattttatttatagacttttacatcccagtggtgctaagtgaagtgaattttgcaagatcatagtttcagtgccttgaatgtcattaagtcccaagaataaagagtgctgacttagatgtcagaagacttgcattctcattctgattccctcagttcttagtctgtgaccttgggcaagtcatttaactaccaagtttcattttctttatcttttcctgccttgtctacctcacagagtcattgggagagtgaaatgaaaaaatatttaagaatggtgaagactgtggaaattaaagatattatttttggtgtaaggcaatttttagaaaagataacagcatgtaggctaagacagtgaaaatacatccattcacctgactttttattccaaatcaatatcagaaatattcaagaagtgtctttaatgtcttttttatagctcactttgaaagaaaatttacaaattacagggtggcttgttatttgtgttcccctctccagtatgtgctgccagtttggattttggcaatgcagttttttgttgtcgttaaggcccactttgagtgaatgctaacatcagcagatagagttgaggaaactttctgaaaacagctaaacataccagtgcttatccattgagtgtgtgagtcaggagactcctgtttgcttggtcatgttgatgtttacatatgctaaaataatttctcctgagtgtccatgccctctcttatcatttctcctcttggtgaggacctggagcttttggacattggggaatgcattgcagcctgtgtgtggcactcattggccggccagctagccttttttagtgtttactgttccactgggattaagtagtgagtggggcttcatgtaataaattgtgtcccctacaaattcatatgttgaagtcctaacccccagttccttataatgtgactacatttggagatagagcctttagagatgattaaggttaaatgaggtcatatgagtaaacgctaatcactataactgcgattcttataagaagaggaagaggcaccagggatttgcacacacagaggaaagaacatgtcgggatactgcgggaaggtggctatctgcaagccaaggagagagaggcctccagaaaaaccaaacctgccaatgccatgatcttggactttgagcctctagaactgtgagaaagcaaatttctgtttaagccacccagtctgtggtactttgctatagcagccctggcaaaccattacatggagatcccaggtgcttggcactaccaggtgtatgtgtcggtcattaggactgtgaaaagcaccttaaaagacctgatgaccttaatgtaaattgagtttcagtttaaatttagtagagggtagaggttcacagattatatagcctgttacagcctgtaagtttttgggttttgttgctgttgttgttgttttttaatgtagagctaatggtttattagtccattttcatgctgctgataaagacatacctgagattgggcaatctacaaaagaaagatgtttaatagacttacagtaccacatagctggggaagcctcccaatcatggcagaaggcaaggagggtaagtcatggcttacatggatggcagcaggcaaagagagcttgtgcaggggagctcccatttttaaaaccgtcagatctcatgagacttatttatcgggagaaacaggccccaatatttcagtgtaggttctttctattttccataagtgccagctggctgagaaataaagagaaagagtacaaagagaggaattttacagctgggcctccaggggtgacatcacatattggtaggaccgtgatgcccacctgagccttaaagccagcaagttttattaaggatttcaaaaggggagggtgtacaagaacagggattagttcacaaagatcacatgcttcaaagggcaaaaaggagaacaaagatcacatgcttctgaggaaacagcaaagggcaaaaccagaaactcctgataagggtccaaaaaagatcacaagacaaagggcaaatgcaaagatcacaaggcaaagggcaaaagcagaattactgataatggtctatgttcagcggtgcacgtattgtcttgataaacaaacaacagaaaacagggtttgagagcagagaactggtctgacctcaaatttaccagggcaggtttttttcccaccctaattagcctgagggtattgcaggagaccagggcatatttcagtccttatctcaactgcataagacagacactcccagagcggctgtttgtagacctccccccatgaatgcattccttctccagggtattaattattaatattccttgctaagaaaagaatttagcgatatcttccatacttgcacgtccatttataggctctctgcaagaagaaaaatatggctctttttgcctgaccccgcgggcagtcagaccttatggttgtcttcccttgttccctaaaatcgctgttattctgttctttttcaaggtgcactgatttcatattgttcaaacacacatgttttacaatcaatttgtacagttaacacaattatcatagtggccctgaggtgacgtacatcctcagcttatgaagatgacaggattaagagattaaagtaagacaggcctaagaaattatgaaagtattatttgggaactggtaagtgtccatgaaatcttcacaatttatgttcctctgctgcggctccagctggtccctccattcggggtccctaacttcctgcaacacttatttactctcaggagaacagcatgggaaagacctgcccacatgattcagtgctctctcaccaggtctctcctacaacatgtgggaattcaagatgagatttgggtggggacacagccaagccatatcattctgcccctggcccctccaaaatctcatatcctcacatttcacaaccaatcatgctttcccaacagtcctccaaagtcttaactcatctcagcattaactcaaaagtctacagtccaaagtctcatcctagacaaaacaagttccttctgcctatgagcctgtaaaatcaaaagcaagttagttacttcctagatacaatgggtgtacaggcattgggtaaatacagccattccaaacgggagaaattggccaaaacaaaggggctacaggtctcacacaagtctgaaatgcagtgagacagccaaatatttaaagctccaaaatgatctcctttgactccatgtctcacatccaggtcatgctgatgcaaaaggtgggttcccacagccttgggcagctccacccttgtgacagactgttttattcctcacccccttcccacccttttccctcaagtccccaaagtccattgtttcattcttatgcctttgcatcctcataatttagctcccacttatgtgtgacagcatacgatgtttggttttccattcctgaatatttatttcacatagaataatagtttccagtctcctgcaggttgctgtgaatgccactaatttattcctttttatggctgagtagtattccattgtatacatatatatatacataccacaatttctttatccactcgctgattgatgggtgttagggttggttccacatttttgcagttgctaattgtgctgctgtaaatgtgcgtgtgcaagtatcttttttgtataataacttcttttcttctgggtatatatccagtagcgggattgttggatcaaatgatagttttacttttagttctttaaggaatctccacacggctttccatagtggttgtactagattacattccgaccagcagtggtgaagtgttccctgttcactgcatccccatcaacatctactattttttaattttttgattatggcaattcttttttttcgagatggagtctcgctctgtcacccaggctggagtgcagtggtgcgatctcggctcaccgcaaactccgcctcccaggttctcgccattctcctgactcagcctcccaagtaactgggactacaagcacccgccaccatgcccggataattttttgtattttttagtagagatggggtttcaccatgttagccaggatggtctcgatctcttgacctcgtgatctgcctgcctcggcctcccaaagtgctgagattacaggcgtgagccattatgcctggcctgattatggcaattcttgcaggagtaaggtggtatcacactatggttttgatttgcatttccctcatcattagtaatgttgagcatttttttcatatgtgtgttggccatttgtagatcttcttttgagaattgtcttaggtttaagtccttaatccatcttgagttgatttttgtataaggtgagagatgaggatccagtttcattctcttacacatggctagccaattatttcaggaccatttgttgaaaatggtgtcctttccccactttatgtttttgtttgctttgttgaaggtcagttggttgtaagtatttgggtttatttctgggttctctattctgttccattggtctatgtgcttatttttatactggtataatgctgttttggtgactgtggtcttctagtatagtttgagatcaggtagtgtgatgcctccagatttattctttttgcttagtcttgctttggctctgtgggctcttttttggttccatatgaattttagaattgttttttctaactctgtgaagaatgatggtggtattttgattggaattgcattgaatttgtaaattgcttttggcagtatggtcattatcacaatattgattctacccatccatgagcatgggatgtgtttccatttgtttgtgttttctatgatttctttcagcagtgttttatagttttccatgtagaggtttttcaccttcttggttaggtatattcctaagtattttaatttttttgcagctattgtaaaaggccaaaccccgatttttgacttctgtgcactggcaggctcaacacaatgtagaaggtgccaaggcttgaagattgcaccctctgaagccacggcccgaactctatgttggccccttccagccatggctgaagcagctggaatacagggcaccaagtggctaggctacacactgcatggggcggggggcccagcccacaaaaccactttttccttctaggcctgttggcctgtgatgagaggggctgctgtgaagacctctgacatgctctggagacattttccccattgtcttggggattaacatttggcttctcgttacttatgcaaatttctgcagctggcttggatttctcctcagaaaatgggattttcttttctaccacattgtcaggctgcaaattttccaaacttttatgctgtgcttccctgataaaactgaatgtctttaacagcacccaagtcacctcttgaatgctttgctgcttagaaatttcttccactagataccacaaatcatctctctcaagtttaaagttccacaaatctctagggcaggggcaaaatgctgccagtctctttgctaaaacataacaagagtcacctttactccattccgcaataagttcttcatctccatttgagaccacttcaacctgggtttcattgtctatattactatcagcattgtgggcaaagccattcaacaagtctctagagagttccaactggtatgttttcagcagcgccccactccaatgtactgtatttgttttcatgcttctgataaagacatacctgagactgggcaatttacaaaagaaagaggtttagtggacttacagttccatgtagctggggaagccgcacaatcatagcagaaggcagggaggagcaagtcatgtttttcacggatggtagcaggcaaagagcggcagcttgtgcagggaaactcccgtttttaaaactatcagatcttgtgagacttactcactatcacgagaacagcatggaaaatacctgccccccatgattcaatgacctctcaccaggtccctcccacaacacatgggaattcaagatgagatttgggtggggacacagccaaaccatatcagatgtcaaagctacatttggtatggaaaagacaaaaacaacaatatttgagatagtgcatttgtatgcctacttttatatctttaatagtttgatatgcttttttactcttaaaaatctggaggaattaatacatgtagctcaaaatctctttaagtgacatgcacatgttctcatatgggagctaaaggagtggacttcatggaggtagagagtagaatggtggttactggaggatgggaagggtagcggggaggggaaatgagaagaggtggaaggaataaagtgtagtgtttgatagcacagtagggaggttatagttaatggtaatttattttatattttgaaatagctagaagaaaagatttagaatgtacccaacacaaacaaatgataaatgtttaaggtgatggatatcctaatcaccctgatttggtcactacacattgtatgcatgtatcagaatactacacgtacccataaatatataccattattatgtatcaatagaaatctttttaaaaaagagacctgcacaacgtgtattatttttatagttttgtttgttttaaagcatcatgctttctcatactggttaactcagaccaagtattgttttgatgttaatattaatgacacagtctaatttatgtatgaattttggggaagaagacacttatccattaatgttttttagttggcttaattttgatgtttaagtattgagtcctgttgatatgcctgttcactgaagtgaccattttatagataagaaaattgtactatcttttcatacacagttctgtgctatttgttgttgcttgcacatgcactatctcatcctctcaaaaacctgtagaggttagcattactcccttaattttcagatgaggaagcgatttccagaaaagttaaggtactttctcagagtcacacagtaaattcatggatcccatatttcctgactctctagagctctttttctgtttattacgcccaggtagatgaaaagcccaagaactgagaagtgcatttgaaatgtgcataaaactatatgcacagatatgcttgtgtttgtgtgtgtttgtaatgtgagacagaatgtgcttcccttgtttcgagttctttgcctttctggttattatggtggtagtgatatgggtatgtttttttttccctttttctatcttttatgtatatgcacacacatatgtatgtacggcagtatcaaaatacagcttgaagtgtgagattagtttttttttgttttttttttttttgagatggagtctcgctctgttgcccaggctggggtacagtggcacaatctcggctcactgcaagctccgcctcccgggttcaagcgattctcctgcctcagcctgccgagtagctgggactacagtgcctgccaccacgcctggctaattttttgtgtttttagtagagatggggtttcactgtccaggatggtctcgatctcctgacctcgtgatccgtccacctcagcctcccgaagtgctgggattacaggcgtgagccaccgcgcccggcagagattagtttttatcatctgtaagttgataggatgggtacaacttctgactggaaaaagaagattgcaagatgtctacagttattacattttatttcagtggataccagaacctgtttcttaaagctaaatgatgagaatttttattattattattaaacaaatctgtgtatgtttcctttgctccttgcttttcaattagatttaaatgatatttaagtagataagaaacaaatacgtgtctgttttcttagaaagaatagtaaattcaatgttgtttggaaatatttgtaggcttttgaattttctccacccttttctacagatgaatgcaaagattttcctaatcattacataagaacataacacttttatatcaattaatggctcatgacctattaaataagcaataagtcttgcttgtatctcaattatgtttttcagtccaaaagagatgggactacatcaaaatcagtttctctggaaaaacatcacatgtaatcttcagtcttctaatgttgacaacagtttatgaaggatatgtgttagtattcagataactcttaagctagctcattgttctgcagtttttactgaatccctgtctttcacgtttcctagcaactggctcacacatggaagatgcaggagtaaagccatcagggatttgctctgcatctatctcttaaacagcatctgagaaatggtagccagactacattgtttcacttcatagtttccactaaaagcttgccttttatgtttattagcttctaaaataggattgccataaaagattagcattaaaaattgagtagtgatgataaaatatcaaagtcaaattattggaaatttttatcagtaatatttcttgaatagtcattgctatttatgtatatctaaaaatgtgatggttactgtgatacagagatgaaataaaacgttttatatttgagaattaaaatctttattacaatattattcctcttaaatgcataagtactttagaattgtaaaataagatgcatcttcagttttgttttccttaaaagaaaagagagcaataaactttaaatatattacatgtatatgtatgtatatgtaactgtactcatatctgtcaattttaaatatttaagtcagcaaattgaaaaatgctttgtgagctaagtgatagattttattttggttaaggaaaggaaaataacaaggacacagccccagtttttctgtgtgagaaaatggtagtaatttgattgtgtcaattttaacacatttggaaaatagaagctacaatatgaatttgtgcttttctgccttatattttcattgccatttaatctttctgtctaatcttggtggtcccaaatgtaaactataatgacatacacctgttaatactactactactaagaacatatatgttagtaaatatgagtactccaagcttgttgagctttttgggttataagaatcttaagtgatgtctctttcatttttaactgtcacggccattttccataattaaccctaggaaggggatgaaaaggaaggaaaacagtgacaggggaaagtggcaaaatagagcaagagaaaaatagaaagaaagatgaaaatgagtgaaagaaaatggctatgagctgtaaaaggtagagtggtagaattcagccaacctgctattgtctttctccctgccacctctgtggtagtaatattctgtttttctcttgcccagtattgagtttgcatatcatgctagcatctgtcaggggagaaatggtgtgatccatggaatattcagaatgaaaatagaataagggtagaaagcacaacgtaatcacttgggtcctcatgtgtgtgctctctttagaatataggctgcttaatcgcccctttgtcctctcctgctttggacccccacccattcacaatatcaattcagggcaaatgaaggcacctccctcactcctctcttctacccctacatcaggcatcgctgagcaaggtcacaggtaccaggggagctcagtggtggtattttggataaagctgtaatccctgctacaattgctgtttctctctcctttgtaaatcagctttggggcaatggtagcatgcatcttactgagatcttaagcataattgcaatcaaagaagaggaacaaggatgcctgcagaacattcaggctcaccaaatcaggatgtgtgagctataagggcaggatgggtgagctataaaagcttttgattttacatcagaaacaaaataactcaactaccatcaccgtttcatttttttttaaaaagatagtagaatataatcttgaaatgaaggacaatactttcaaacaaagaatattaggcaacttcatactgacacacaagaaaaaataataggatggtgagtgggacatatttttattgccctgaattgatgctgtggatgggtgggggtccaaagcagcagaggacaaaggggctggtaagtagcctgtattctaaagagagcacccatgtgggaagagaggggtcttcctcacatcccaaaccaaccaatacagatcaagaaaatcattggtaaacatgagagggacctgcttgactgggagaggctaacatcccattgcctagctagacatgcacttatgaggcgtccttgctaatctgcctcctgtgtctacttaagtaggaacactggagcatgatggcagcaggggagtggggtgaacacggaagatgatgggagcagagcactggagtggcctgaaaaactatcatgtggtagggctacgatgtcacttggagcccatttgagatgaaggaaaaagctttaacccagatataagattgaagttttaaagcaaatggacttacacaaattgaggaaaaggatttgagaactctgctatctatgagaaactgtgggcagttctacaaagcactgctgtgtgaagtaagtagagaaaaacacagtctttcatggttgaactccgtgaagttaagactgtataaggaacaagataactgtctgcaaatcagaggaaacttctctgtggaccagtacaggctcacagattgatttttaggaaagacctaatctggtccaagccttcactttacaggaggaaaatcagtgtttggcacacacttcagggggagagagagagctccgttgatgaaaaaaggagacttgaaccttgaagcctaggtttgagaatcgaatacaattgagactaatttgagtatgtgtttgtgtgagtttggaggtttgaaaagctctgattagagcttttgttgtagagagagttggcattgcttaaagtttctaaactgtgatcatataatgcatacataaagtatggatattaatatattgaagtgtcccaagcacagctgccactagggggcaatggaggccccccacagtgtcacaaccacctagtcgtagccctagaaccagggttgcaagaaaatccctttgcctgcttttgccctgtttccttcagcactgttcagcactatgggtgaatagagcacccattccccagattttgtgcttccctggtgtgtgctgagatactatccccagaatacagtacagccagaaatccaagtgtgggcacatccttcttgtacttttgataatgttgttaagtagaagaactcttactcagaggagaatgcactgctggaacatgtgttagaagttaaagtccacactccccatgtaaaatatgtatttatctctcatgtgaatgttattcattcaatcattgagcatttattgagtactctgtgtgcttggccctcttctgtcctcagggatattgtgaagagatagagacattcctgctctgttagaaggaactcactttccagtgggaggaagatgagaaataaagaagtaaataaatatgtgtaagactactttatataataaaaggaactaatatttgatcgttatgactccagaatacatggccataggtgttactagagtagacatagaacaatagaactgtatataaaaggaaggagtcctagacttggaataatattttctcctcactggcttcctgttaaaaattagagctatagtcctatcagagaaaactccaggagaataaaattgtgattttgtggccaaaaaacccaagtgtggatgcaaccataaaccgatcactaagaacacatttacattatttaggagcttgatgtattttacagtaatttctcatctgtaaaatttcctgacagcagtggcaattttctttttgtttacccaaaccttgatcctcttctggatcatggggattaatttctttactggggattctctcaactagaacattaaaagtctgcttccctacagtgtattcttatgcaagactttgtggaaaaaaagttgtgcatatggcgatgatatttttagccctttccatgtcagtcaagcctgaatcttcttttaagacctagtttcagtgtcattggttgtgtgtgtcttcttccctggcattctccataacccagccagagcaagacatccatttttgattattcattcactcagaaaatgaatacctgttacatgccaggcaccattgggggcactgaagatttggcagtgatgaatgaaaggaagcctgccttaaagttttatttctagtggggaggggtgaccaaggaacacataaacatatgaaggtggtaataaatgttaacagataatggtgataaaaggtaaaatttaatgagcagattgataaaggatggttgaggatattgaggcaagagggttgcacctttttataggttggtccaggaaagtcagagaggtggcatgtattcaaaagactaaaatacgtgaggagagtgagccatgtggctatctgagtctgtgtgggtaaagcagaattggcatggagagtttcagggggtaagggcagaagaccagattatgtagggactgtgaggatttaggcttttattcaagaatgagaagggaagccactgaagggttatgagtagaggactgacacagcagacttaggtttacaaaggctcatctggctcctgcgctcagagtacatggagtgagacaatggtggaatctggccccttaaattggaggctgttggaataatttgggaaagagatgctggtggcctaggcctaggtgattgctatgggggttgtgagaggaggcgacgtatagagttaacaatatttactgatgcattggatggggatattagaagaagaggaatgaaagatgactcaaaggtttttgacttatatatgataaaaatcttaagctttggtcataagctatgaatttaacaacttggtttcctctttagcagcattttcctcccccccttccttccttccttccttccttccttccttccttcctccctccctcccttcttccctccctccctccctccttccttttctccctctcctccccctcctcctccttcccctcctcctcctagtcttcttcttcttcctctttttttcattcattctttttctctttctttctttcctttgttttcttttttctttcttctttctttctttcgttcattctttctttctttttctccttccttccttcctctttttttaaatataaaaacaggcaagtttcatgaaagataactcacacaataagtaacatatctgactaatagatatatgaaaagatctttattttccaccagttaaagtaatataaattaaaacaatgcaataatttttttcaacaattatgttgttgatgattagaatattgataataccaatgtgccaaagtatgaaaaaatgattactcttttacacattattacttggtggcagcttatattggtacaacattttaaagtggcaatttagcactgttaaaaataagacatttacaaaactttcggcccagcatttttgcatctgggaatctatttaaaaaaaactgtccctacatatatgcaaagatatgtacatctagaagattgttccttgcaatattgtttgtagtcgcgaaaaactggaaaccatctaaacatttatcaataggggatttactaagttcagaccaaggcaaagaattaatagtgatgattttcacgggtagaattggagggtcagtgggggatttcactctttttcttgtgtgcctttattttaatgttttactatattaaacagtacttttacagtaagaaaaatatttcaaaagttatttttagaaaaagcctcaaaattattttgatagaataataatacaaaataagcactcacaagtatatgacagcattatattaaaaagattaaactgtagtaataaaggataatcccaggaatccgatgatgctttattacaagaaaatatatttgtaatttatcaaaaagtgaaaaaaaataaatttgacctttggcagcttttcaagtaaccttttggttttaagaaaaaacagtgtataaatgtataaagatcatggtctcaggtaccttctacatgctgttgattactaaattcatagctgtttgaatatctcaaaggatgcagtagctattaattgagaaggactgtgagagaaacaggttattgttattattttggggaagggagtcaggagtttgcttttgacacatttcatttgagatgtcttttagacatccagctgaagaaattgagtagacagttggtgagcaagttttcggttcaagagacagggcaaatttggagatatgaatttgggaatcagcagtgtatagatgtatcatgatttttatacatgtgtcagttgcagcacttacctcattattttgtcattgtttgttgacatatttgtctgtctacattaaaatccttgggggcagagaccacatcttgtttgacattttaatatttcattcatggcaatcttgccatgatgtgaagctataggtttgttttctttggatatgattgactggagctatgattaacttaggctttgtccagggaaagccatttttcttaaaactaaaaggttatagcttaaaggcagccaaaggggaaaccaggttgttaaatttatagtttatgatcaaagcttaagatttttattatctctaggtatttaaatcttgccctcaattgctgatatccttgtgtctctaggaaataacatgccttttgatggctcaactcagtacacagtcataatctaggcacaaatggcagctttaaccaagaccaggcttgttgccttcgaggaaataaacttcatgccaactcagactgttggcaagcaccatagatatgcctgagatttgttctctttgaaattggtcggtttgatcagtgtggtctacagactgatttctgtccataaacaccctccctctttttttttttgtctgctaagatacatttaaaaaatctttttttttttggtctgcttaaatacaggttaaatacagaaaaagagagtaggcatatagaaagttttatagcaatcagtcaccgtaattttatgtctattgaatttagttttcaaaattgtattttgtgtgccttttttcattttttttcagtaattcatttcgttgtatttaacaaaagtatcaatctgcaacagattgaacttaaaaaacattggtccttcctccatagtttgagaaaccatgcactagttcatatcacgaagcacctcatagattgagagctcagataaatcagtggcgacgaggtgggtgaacgtgtagtaaacaggcatggatcagtatctccagaatatgtgtatgctttgaaaataattctgcaatggtccaaatgtttgtgtccctactccccaccccaattcatatattgaaatcctaaccccaaggttaggccccatctcccgatgaccccatctcctaatataaatcctcacctggaggttaggatttatattaggatatggggcctttgggaggtgattaggtcatggtggaaccctcacaattggaaccaaggcctttattttaaaagcctgagagagatctctcccctcccgtcatgtgaggacacagtgatgtgctgcctgaaccaagacacaggccctcaccgcacagtgaatcttctggagccttgatcttggatttcccagcctccagaatggtgagaaataaacatttattgtatataaacccctaagtttatggcactattatagcagctgaaatggactaagacaaattctttactccatttttcgtatcatgacttattgaaggaggtatgatatggtagcatgaaaagaggtaaagaaccaccctactgcagagaacagaaaaggtttggagtttgatttttgttgattaagctgcctgtgatctcaagtctggcatttaatgggcagactataaggtatgtgaccactgctggattttgtaaacatttcattttagcattcaagctttagatgtgtctttctgtatcagtacattgttttatgctttcctaaaagcagccttcttgtctacaacctctccatgcactgaattcctatgcactgaattcctaactttattttttagctcctggaacacttttatacctttcatttctcttttgatacttcaagcagaagctatttagagacacactgtgaataaatcattttagtcagttccttaatacttttcttaaccattattacctcctatgaataattttatttcacttttattaaataagcagaggtaatctgcatcagagaatgcaaataatggctaacttggtaattttaggaaagagaaacaggcagatataggcataacagtaaagggaagctaaaagaattctaacaaactaacaccaagaaaccaacagcaggaggagtagaaaacagagcactgggaagagagacaaaattgcgataatcatgatttcctcgagacagtgtttggagatggtttccctttgtttttcattttttgtaattttccagattgtgaacattaaccatgtattactattattatagttaaaaattgtttgcatatatccctcccccatatgtgtgagtaacttaagtataggtaacagaagcaaactggtgggtttggtattctagttatgatattctcgcttttatggggcataaaaatcattgtcagattcttccttcttggtgatttccccagtggcctcccatagattgcttcttcgtctttgtaaagatatatgacagcaaatctctaccagttaatgagcacgtgaaaagctatctatctaagggctgtgtgttttgctacttacaaagccgtaaagatgttgacaaaaatatctgaatccctgtaggatattctccatttttcatcaagacggacattagcctcttaaaaaaattaactgagagaaactgttgactaccttttaagtaacatcatcaaagaagtaaatggctttgattttttttaaaaagcagtttttagaaattatgaatggaatatattcactggatattagtaatccagaacttctgcattaaaccttcataattaattgtagtaatgcttttctaaaaatttactttgtctattgtatattacacaatattgtaatctagttttggtaccaggaatttacacttaaattgggtaaaaacaaaagttaaatgaaaaacatttaactttttaaagttatttttatttccgtctcttttattaaattctttgtttatagaagattgcacttaccgttgctctgttctcatattttataagcacttttttttttattatactttaagttttagggtacatgtgcacattgtgcaggttagttacatatgtatacatgtgctgtgctggtgcactgcacccactaactcgtcatctagcattaggtatatctcccaatgctatccctcccccctgcccccaccccaccacagtccccagattgtgatattccccttcctgtgtccatgtgatctcattgttcagttcccacctatgagtgagaatatgtggtgtttggttttttcttcttgcgatagtttactgagaatgatggtttccaatttcatccatgtccctacaaaggacatgaactcatccttttttatggctgcatagtattccatggtgtatatgtgccacattttcttaatccagtctatgattgttggacatttgggttggttccaagtctttgctattgtgaataatgccgcaataaacatacgtgtgcatgtgtctttatagcagcatgatttatagtcatttgggtatatacccagtaatgggattgctgggtcaaatggtatttctagttctagatccctgaggaatcgccacactgacttccacaatggttgaactagtttacagtcccaccaacagtgtaaaagtgttcctatttctccacatcctctccagcacctgttgtttcctgactttttaatgattgccattctaactggtgtgagatgatatctcatagtggttttgatttgcatttctctgatggccagtgatgatgagcattttttcatgtgttttttggctgcataaatgtcttcttttgagaagtgtctgttcatgtcctttgcccactttttgatggggttgtttctttttttcttgtaaatttgtttgagttcattgtagattctggatattagccctttgtcagatgagtaggttgcgaaaattttctcccatgttgtaggttgtctgttcactctgatggtagtttcttttgctgtgcagaagctctttagtttaattagatcccatttgtcaattttggcttttgttgccattgcttttggtgttttggacatgaagtccttgcccacgcctatgtcctgaatggtaatgcctaggttttcttctagggtttttatggttttaggtctaatgtttaaatctttaatccatcttgaattgagttttgtataaggtgtaaggaagggatccagtttcagctttctacatatggctagccagttttcccagcaccatttattaaataggggatcctttccccattgcttgtttttctcaggtttgtcaaagatcagatagttgtaggtatgcggcgttatttctgagggctctgttctgttccattgatctatatctctgttttggtaccagtaccatgctgttttggttactgtagtcttgtagtatagtttgaagtcaggtagtgtgatgcctccagctttgttcttttggcttaggattgacttggcaatgcgggctcttttttggttccatatgaactttaaagtagttttttccaattctgtgaagaaagtcattggtagcttgatggggatggcactgaatctgtaaattaccttgggcagtatggccattttcacgatattgattcttcctacccatgagcatggaatgttcttccatttgtttgtatcctcttttatttccttgagcagtggtttgtagttctccttgaagaggtgcttcacatcccttgtaagttggattcctaggtattttattctctttgaagcagttgtgaatgggagttcactcatgatttggctctctgtttgtctgttgttggtgtataagaatgcttgtgatttttgtactttgattttgtatcctgagactttgctgaagttgcttatcagcttaaggagattttgggctgagacgatggggttttctaggtaaacaatcatgtcgtctgcaaacagggacaatttgacttcctcttttcctaattgaataccctttatttccttctcctgcctgattgccctggccagaacttccaacactatgttgaataggagtggtgagagagggcatccctgtcttgtgccagttttcaaagggaatgcttccagtttttgcccattcagtatgatattggctgtgggtttgtcatagatagctcttattattttgaaatacgtcccatcaatacctaatttattgagagtttttagcatgaagggttgttgaattttgtcaaaggctttttctgcatctattgagataatcatgtggtttttgtctttggctctgtttatatgctggattacatttattgatttgcgtatattgaaccagccttgcatcccagggatgaagcccacttgatcatggtggataagctttttgatgtgctgctggattcggtttgccagtattttattgaggatttttgcatcaatgttcatcaaagatattggtctaaaattctcttttttggttgtgtctctgcccggctttggtatcagaatgatgctggcctcataaaatgagttagggaggattccctctttttctattgattggaatagtttcagaaggaatggtaccagttcctccttgtacctctggtagaattcggctgtgaatccatctggtcctggactctttttggtgggtaagctattgattattgccacaatttcagctcctgttattggtgtattcagagattcaacttcttcctggtttagtcttgggagagtgtatgtgtcgaggaatgtatccatttcttctagattttctagtttatttgcgtagaggtgtttgtagtattctctgatggtagtttgtatttctgtgggatcggtggtgatatcccctttatcattttttattgtgtccatttgattcttctctctttttttctttattagtcttgctagcggtctatcaattttgttgatcctttcaaaaaaccagctcctggattcattgattttttgaagggtttttgtgtgtctctatttccttcagttctgctctgattttagttatttcttgccttctgctagcttttgaatgtgtttgctcttgcttttctagttcttttcattgtgatgttagggtgtcaattttggatctttcctgctttctcttgtgggcatttagtgctataaatttccctctacacactgctttgaatgcatcccagagattctgatatgttgtgtctttgttctcgttggtttcaaagaacatctttatttctgccttcatttcgttatgtacccagtagtcattcaggagcaggctgttcagtttccatgtagttgagcggctttgagtgagattcttaatcctgagttctagtttgattgcactgtggtctgagagatagtttgttataatttctgttcttttacatttgctgaggagagctttccttccaactatgtggtcaattttggaataggtgtggtgtggtgctgaaaaaaatgtatattctgttgatttggggtggagagttctgtagatgtctgttaggtccgcttggtgcagagctgagttcaattcctgggtatccttgttgactttctgtctcgttgatctgtctaatgttgatagtggggtgttaaagtctcccattattattgtgtgggagtctaagtctctttgtaggtcactcaggacttgctttatgaatctgggtgctcctgtattgggtgcatatatatttaggatagttagctcctcttgttgaattgatccctttaccattatgtaatggccttctttgtctcttttgatctttgttggtttaaagtctgctttatcagagactaggattgcaacccctgcctttttttgttttccatttgcttggtagatcttcctccatccttttattttgagcctatgtgtgtctctgcacatgagatgggtttcctgaatacagcacactgatgggtcttgactctttatccaacttgccagtctgtgtcttttaattggagaatatagtccatttacatttaaagttaatattgttatgtgtgaatttgatcctgtcattatgatgttaactggtgattttgcttgttagttgatgcagtttcttcctagtctcgatggtctttacattttggcatgattttgcagtggctggtactggttgttcctttccatgtttagcgcttccttcaggagctcttttagggcaggcctggtggtgacaaaatctctcagcatttgcttgtctataaagtattttatttctccttcacttatgaagctttgtttggctggatatgaaattctgggttgaaaattcttttctttaagaatgttgaatattggccctcactctcttctggcttgtagggtttctgccgagagatccgctgttagtctgatgggcttccctttgagggtaacccgacctttctctctggctgcccttaacattttttccttcatttcaactttggtgaatctgacaattatgtgtcttggagttgctcttctcgaggagtatctttgtggcattctctgtatttcctgaatctgaacgttggcctgccttgctagattggggaagttctcctggataatatcctgcagagtgttttccaacttggttccattctccgcatcactttcaggtacaccaatcagacgtagatttggtcttttcacatagtcccatatttcttggaggctttgctcatttctttttattcttttttctctaaacttcccttctcgcttcatttcattcatttcatcttccgttgctgataccctttcttccagttgatcgcatcggctcctgaggcttctgcattcttcacgtagttctcgagccttggctttcagctccatcagctcctttaagcacttctctgtattggttattctagttatacattcttataaatttttttcaaagttttcaacttctttgcctttggtttgaatgtcctcccgtagctcagagtaatttgatcgtctgaagccttcttctctcagctcatcaaaatcattctccatccagctttgttccgttgctggtgaggaactgcgttcctttggaggaggagaggcgctctgcgttttagagtttccagtttttctgttctgttttttccccatctgtgtggttttatctacttttggtctttgatgatggtgatgtacagatgggtttttggtgtggatgtcctttctgtttgttagtttcccttctaacagacaggaccctcagctgcaggtctgttggaataccctgccatgtgaggtgtcagtgtgccgctgctggggggtgcctcccagttaggctgctcgggggtcaggggtcagggacccacttgaggaggcagtctgcccgttctcagatctccagctgcgtgctgggagaaccactgctctcttcaaagctgtcagacagggacatttaagtctgcagaggttactgctgtctttttgtttgtctgtgccctgcccccagaggtggagcctacagaggcaggcaggcctccttgagctgtggtgggctccacccagttcgagcttccaggctgctttgtttacctaagcaagcctgggcaatggcgggcgcctctcccccagccttgctgccgccttgcagtttgatctcagactgctgtgctagcaatccgcgagattccgtgggcgtaggaccctccgagccaggtgtgggatattgtcgcgtggtgcgccgttttttaagccagtctgaaaagcgccatattcgggtgggagtgacccgattttccaggtgcatccgtcacccctttctttgactccgaaagggaactccctgaccccttgcgcttcccaggtgaggcaatgcctcgccctgcttcggctcgcgcacggtgcgcgcacccactggcctgcgcccactgtctggcactccccagtgtgatgaactcggtacctcagatgtaaatgcagaaatcacccgtcttctgcatcgcttacgctgggagctgtagactggagctgttcctattcggccatcttggctcgagagtcaagcactttgttaaagagatagtgtgactctaaagtacaagttggtttcttcaccaattaagagttcttccatttgggggagatggactgtatttttgtgatgctgccatttgttgctcagaaaacttctatttttattagaattgccttgagagccaatttttgagccataaaacgtttcattcactcactcaacaaaaatgtattgaaggcttacttctatcagttctctctagatgccagatatactgcagtgagaaagctacatggttactgagctcacagagcttacagtgtggtgggggagacattaatgaaaacacacacgtgaaatacacaggcctctgaagaaaaattatcataaagataataatttagataggagggaaatgggcatttaggggaggcatctctggtaatgccagagaaagggtgaagaccatgagccaaggccctggattgagccacaacttggcacaactcattaatttataggaatctcttctttttgatctcaaatgctttcactcaactgaataagccattttagcaataatgcttgcctctggattactgccaaaagctaccttgattagcagagagtgaagatttgtgaccactgaggatattcggagtgtgtcactggctctgaagatatttctaaaagattttcagttatattttgagctgtagcaacatcaaggaaataattttgtaacctccctcccaagatgactttgaaggaaacgtatttataaattctgatgtgttttttcagccacattatttaataaccgttcttgatgtaatgagaaaaagactgtgcctcttttcagagaagctcagtctactgctttcttttccttcttgagaaagtgaacactgagacaaaataatctctgcaacaacgaaggaagttctgtttgactcagttgctaattcaatggctgaaagagatcagagacacagtttgatatgtgggaacattagaaactttgaggggtttggggttagataaacattgaccttaccactcactagctccttgatctttgaaaagttactgagcctctttgagcctttgtttgctaatctgcccaatgggattaatactacaaacctcttagggagcactgcagattaatctatatagagcttgaatctagtaggaactgaataaacatgagctcatgcctaccttcctctttccaaacccctcatccttttatctgttaccatagatgtcaaactctatgaaatccagtcatttagcttaaagtacgtatgttgttttcatgctttccttcctgatgttgtttaaagttaatttttaggaaaacattttaatgcattgcataagatggcaatgctagggttagggctaaagaaagacaacatccttgagtttttctacaggtagatttcattttttatcttaatgataaggccagaaagtgccaagagatgttaagtgtccagaaagttggaagttttggtttgggttaggtagaaggtatacaatgaaaacatcttatataaaatatttaataaagtcagtttggttctccacacacacaaaaatgacatactgatgattaaaaagtgaaacatggccaggggcagcagtttcactcctgtaatccaagctacttgggaggctgaagcaggaaggttgcttgaggtcaggtgttcaagaccaacctgagcaacatagtgagacccccccagtctttaaaaaaaaaagtgaagatttaaaaattaaaacattgttacaagtgggaaataccagaggtaacattaatgaaaattaactattctaatttcaaatgaatcgtggaattaataaatgtgttcatatatggtctgcttcagctagaatatatctctcttgtttgcaactctgcggtcatgaagtcaacccttatggcacttatcattgtctactttggtaagtgccacgtaccattgtgtttcttgacatcaaggaccatgtctaatttatcttggagcctaccatacagagtcctggtgctgatggtgaattgcatttgacagtaactaaaaagatggtgggatatggagaggttaagtaacttgcctgttctaattttgggtgttgtttatgggggcagctatgtccttgaacttgctgtaatgctgtcataatgggtaccccaggtgcttatctaagggtgggctgtctgttttcagccccattagaagacaaaaagatgaactcctgagcagagctgacaccatgtgacaattgtgcctcctctgtgtttcacgtatctgattgtgatgtcactgttttgattagcagttattatatttggaaacttagcttagaatggagcactcctagtctgctgtttgttagtgcacatagctatttagaatcttcaactttaagaatccggtttgatgcttatttacaactgaagattcataagcaaatatacgttattgaacatttgtatccgttggctccttagagttgctccatccatttgtgatgcatgttaatagagagtgaaataaaaatacttgcatttaaagagctacatctgttttgtgcatgagtcatctgaagtttggacagctattctgatcaaataaataaatcttcctccagacaggtggcttacttgaatacgtctaacttattttcagttccttctgggaaatcttacatttagctgcagtctctaaactgttttatctgccaaggataagctggcaatgggaagctttaattagaattaatggggcttgccatggagaaatttagaaaatgtctactaccttttagtggcacaaatatggcaaaaatttaggcattgtctaagtcatcactgaacaaaccttattacacgaacatatttttatgagaattcagaatgtctgaacttagagtgtctgaatttagattgtcttaaaagaatgtacgtagttaaaatatttagttggtctactattagggaagataaatttttttcacttccctcctttggcattattttcttcctattccatagcaaattagcaaactaaaatgtaagtcaggtggtggggagtgcttttaaaattaggatttaacagaaagtaagtatacattttgtctgagtgaaatttgtccttcatatctatctgttgcatgtctgtttgtctaaactgaaggtatttgttaaaagcatcaccataatgaatagtaattcagccctttccaggcctagcaaaagcatttgctcatgtaacattaaaacattgaaaagaaagaatgcatgccttttgatgctaatatgaactttaagatttctgaatggaaaagtaaaatttagctatagttttataatacataaaagtgcctgaacacaaaacacttgattaattcaaaatttaagaaatgttggcaatagaaaagaattttgcctgtaagttttctgtgaaaaattatgtaaaaggcttacaggaaaatgtaaggtgtaaacatgtaaggggagcaggagaattatattgcaaaattcacagtgtaaaacttctcaattagtttacaggcaatggtattcagtgatattcatcattgccccatgccatttgtctagaattgtgtaaattgctacataatacgatattttaataatttgaacgtatcttatgattttgtagttttgcatttagagtctcaatgaagtgcttcaaaagtggtagaagatactacagggactaagaaaacttttataaacactgtgatgctttaacaaaaactcagtcatgtacctgtaaatatcagaacccagtaaggggagctagcagctgttgagtgtatgccttgtccaggcagtatgcatgcatcatcttggtttgcgtcatcatcctgttttataaatgaggacaccaaaaacaggcaggatggttagcaagaacatgggttgaggtcagatatggccccaaccctctctgtgctgttcatatgtaagtgggtgactttggataagctgttgaactgggattgcagatgaatacactggtcaagaggaagagttttggtttacgattcttgactaagttctagctgtagtagttatcagttctgggatctgcataaacttcatctgtaaaacaggaatgataacactaactcatatatttgttgtgagaattaaagtatataaagaagttaacatggtttgtggaaaacagcaagtgctgatacattgtcagtgataaagataatgctgctactgctgctgctggtagggttggtagggtagaactcttacagaaactgaggcatgtctaattccagagcacatgcttttcccactgactctggtcctggaaaagatcagacagaatggtatggaaatgtgccttgaatcacaagcagttgtcgtttttgaagtagaaaaactctttccaaaaatatacaaattatggaccactctgcagatggaaattagaaccaaatgcatggaaattagagcctactaagagagaaaaacaagacaacaaatacatccataccttgacctctgatagcagtaagtgctctgaagaaatgcagcctaagtgattagatttaacagacaggtgtgagggaaagatgactctagttgcttaagcacctgggtgaatgggggatttatttcatgaaggggggaatgctgaaggagaagtgagtagccgaggaatcaagagtattgtcttggctagtacaatttgagataccagttgtatatttcaatgcagatgtggaataagaagtcagatgtgtgacagtggagctcagaggacaggttggcatgacagtgttgatttgggagtcatgagattggaaaacatccatgaggaacccctctatggggagaagagaaggaatctgggctctggggcattccaaagtttggatatcaggaagcaaagctgaatccagaaaaagagactgaacagaggcttccaatgatacagaagtaaaaccaaaagaaagtggtttctgaaagccagtgaagggagtgtttcaagaaggagaaagccactgtttccaatgctgcgcttagtttaggtgagatagcagagacttgatcattgaatctgcttagtagaggtagttggagagcttgacaagaacaatttcagtgaatttgtggagaggaaagcctgcttagaatggagttgaggagacagtagaggcaagaaagtggaagtaaaaggtatagagacattgattgattgattgattgagatggagttttgctcttgttgcccgggctggagtgcaatggtgtgatctcggctcactgcagactccacctgccaggttcaagcaattctcctgcctcagcctcctgagtagctgggattacaggcatgcaccaccacgcccagctaattttgtatttttagtagagacggggtttctccatgttggtcaggctggtctcgaactcccgacctcaggtgatccacctgccttggcctcccaaagtgctgggattacaggtgtgagccactatgcccagcctggtgtagagacttttaattagcttttctataaatcagggcaggagaataagatatgaactggagaatgatatgggttttttaaaaggttgatttttcagttttattttactatgaatgatactacatcaatgttctctgctgatgaagaagatctaatagatagggtaactgacgttgggattgagggagagataattataggagcaatgttctccataggcttaaagagtatgatcaacatccaacatagagaggttgatcttttcacattttggatggcagatgatatgggccaagatgcagggagattgcagatttggtgggaagatgaattagttctcttctaattgcttctgtttcctcagtgaaataagaactgaggtcattagcaagtgcagtatgatggatgagtcatgttaattaaccatcatctgcataaactgcattcttgggcagcaggctcttgggagatcatttcgcaatagaattttgctttgtgggctatgttccctgccctactttggccataagtgctgttcctgtgttcctgccatgtgattcttagagataacaattgaccatcagtgaagagcctactttataccttcattttttcactggtaactctgaaagagtatattttatcagatggtagtctaagaagtaaagcagcaaaatcaatttatatatatatatataaatataaattctatatatataatttttatatattatatataatttatatatatatttatataaaaaaaaatatatatatatatatatttttttttttttttctggagacactcttgctccatccccttatctcccaggctggagtgcagtggcgtgatctcagctcactgcaacctccgcctcctgggctcaagcgattcttttgcctcagcctcctgagtagctgggattacaggcgcaaaccaacatgcccatctaatatttgtatttttaatagagacagggttttgccatgttggccaggctggtcttgaactcctgacctcaggtgatctgcccacctcggcctcccaaagtgctgggattataggcatgagccactgttcccagccacatttttattttttcttgtaggcatatatgttgttccaaacccctaacataaactatatggattgttatagagtgtgtcagaaggtaatgggaggaagcaactgcactatgaatttactccctgtcataaagaaattatattatagagcctttcatccacccagagatgttgacatgactcaggctgattctgaaatgatggaaacaggttatggttaataaactcttgtactttttgccagaaaaggtaatatttcaaattcttttctaatgttagaccttaatagaaataaatgcttattaggtgaaaaacatctaaaggaaatatttttaaaaaccaaattatatttttatttagttcagtaatcattcattgagcacttatagtaagctaaactatgggaataaacagttgcataattacgaatgattcaatgactttgatcttgaatttgttgcatacctgcagctgttctacattgtttattgggttgtattttgtcttattcccgaaatgattttaggaaacttatggaagatacattcaaaaatgtaaataaatataaattataaaataggaactaaataaaaataaaaacataataatatgggaagttaagaattagaagagaaaatcaacactaggggaagagctaaaatatatattagtgaccgtaaaggcttaaacacttggtaaagatttgttgcatatttgattctgagcttcttatcagccataccggaaagaaaaatgcagtccgttacatgattcttattgttcacaagggggaaaaaaggtcactcaagggaaaaaatacttgcactggcatctatatagttttttacatgagttttcctatagggcatacccaatgtgaatggtgaaaagtattgatagccaatgtaataatgcaacttacaaagttacttcttgaagcatcaggaccctgatattattttggtgatcaagaaaaagatcagaattagagatgaaaattgtgtgtgcatgtgtatgttttgttttttaaaaccaaaagattgaactttggaagtaaaagagacaggccatggtagaattacctaaggacttggggtaaaatcttggagatggcctgcattaagggtaacagaagagaagaatctcataaaggttgctgaaatgaaacaaagaaatgttagaggaggaacaaaattctgtagtatcacaaaaggcaaaggtaccaatgagtgtattaaaaaagaatcatctaaggatatgaaatgcgaagagaccacttcactgttggtattaccaagtagagtttaattaatgactttttgagagtagtttcaatagaacaagaaagggcaactttcttcacagaattggaaaaaaccactttaaagttcatatggaaccaaaaaagagcctgcattgccaagtcaatcctaagccaaaagaacaaagctggaggcatcacgctacctgacttcaaactatactacaaggctacagtaaccaaaacagcatggtactggtaccaaaacagagatatagatcaacggaacagaacagtgccctcagaaataataccacacatctacaaccatctgatctttgacaaacctgatgaaagcaagaaatggggaaaggattccctgtttaacaaatggtgctgggaaaactggctagccatatgtagaaagctgaaactggatcccttccttacatcttatacaaaaattaattcaagatggattaaagacttacatgttagacctaaaaccataaaaaccctagaagaaaacctaggcaatacctttcaggacataggcatgggcaaggacttcatgtctaaaacaccaaaagcaatggcaacaaaagccaaaattgacaaatgggatctaattaaactaaagagcttctgcacagcaaaagaaactaccatcagagtgaacagcaacctacagaatgggagaaaatttttgcaatctattcatctgacaaagggctaatatccagaatctacaatgaactccaacaaatttacaagaaaaaaacaaacaaccccatcaacaagtgggcaaaggatatgaacagacacttctcaaaagaagacatttatgcagctaaaaaacacatgaagaaatgctcatcatcactggccatcagagaaatgcaaatcaaaaccacagtgagatatcatctcacaccagttagaatggcaatcattaaaaagtcaggaaacaacaggtgctggagaggatgtggagaaataggaacacttttacactgttggtgggaccgtaaactagttcaaccattgtggaagacagtgtggcgattcctcaaggatctagaactagaaataccatttgacccagcaatcccattactgggtatatacccaaaggattataaatcatgctactataaagacacatgcacacctatgtttattgtggcactactcacaatagcaaagacttggaaccaacccaaatgtccatcaatgatagactggattaagaaaatgtggcacatatacaccattgaatactatgcagccataaaaaaggatgagttcatgtcctttgtagggacatggatgaagctggaaaccatcattctcagcaaactatcgcaaggacaaaaaaaccaaacaccacgtgttctcactcatagatgggaattgaacaatgagaacacttggacataagaaggggaacatcacacaccggggcctgttgtggggtgggggaaggagggagggaaagcattaggagatatacctaatgtaaatgacgagttaatgggtgcagcacaccaacatggcacatgtatacatatgtaacaaacctgcacgttgtgcacatgtaccctagaacttaaattataatgtagatatatatatatatatatatatatatatatatatatatatatatataccaaaaaaaaacaacaaaaataaaaaagaaagggcaggcttagagagtaaagtgtcagtaatgggaaagtgtgtatagacctcttctttcaaggaatgtagaagtgacggaattgtaggttggtagacttgggatagagggattgattggcaggcaaggaaggggaataatagtgtacaagatcccagaggaggagggagacctgacatgttcaacatagatggggttcagagaggaaagagtcaccatttttgctgagctacaaggaaaaaacaaacagaaataccgagaatctttgtgttggaagggaggtgatatgtttggctgtgtctctacccaaacctcatcttgaattgtagttcccataatccccatgcatcttgggagggacctgatgggaggtaattgaatcatggaggcagttacctccatgttgttctcgtgatagtcagtgagttttcatgagatctgatggtttaataaggggctctcccgccgcaccaccccacaccacccttcactctgcatatctccttgctgccaccatgttaagaaggacatgtttgctttcccttctgccatgattgtaagtttcctgaggcctcccaaaccatgctgaatggtgaatccattaaacctctttcctttagaaattacccaatctcgggtatgtctttattagcaatatgagaatagactaatacaggagggaagctataggaatttgtatcagatggcttctgaagtggttcaagatttttgaggtaatttgcaaagtgaggtgaaattatgtgtggatagggaatctatttaagtcatgacttcaggtcaaaatacaatgcttagaacatacctttttgaggttatgtagataccattttctgtctttaaatatgtcagttctttgctttcttagaaataatttagcttgccttgctacctttacaccatccaactcccacaggtgtatttctttctcttctccttccctcctttcattaaaaggccaaatggatatatatgacaatgaagtaaatgagctttataccaataggctaagtaatttatgaatagtactttttagaaaagtgctaggaaaatggttcttcactattttcctaaaacatttatagaaacttgatgaataatgaatgggaataatttataatagccacatacttcactcaaatagaacacttgtttatactcctacacagcagttacgtcatggctgtattttacataaggagtcatatatttttaatgtaaatgttgctagaatagtttcattcagtagagttatagaatcttggtgtcttaagagatctcagaggacagggtatccctgagaggcactcagctagacattgcttcacttctgcctaaattgtgcattccagtgatcatgagccatgctaaaatacagcataaataagtcatcaataagttgaatagcaaggctaggattgtgtctacatctttgctaatgaatataatgctagactttttatatatgcataacagatttaatcaatgaaaatatgtagaaacaagttttattttacagttgagttttgcagtacagtgggaagattgcatttttaaaagacaaaataagacttagcattcagaaaaagtagctggatcaaagcaatttctaagtagaaactcaaatttcagtcagtattttaaatagacacatcctgactcccttcacagattgccactgaccatatggtaactgcagacatgcctcaaaataaaacagccatatgtagattttcaaatactgacctcatccctagagagccatatttatctagaagagcatctcaagccatatcaagtagaattatgatttgtgtcatgttcaaagattagaagaatcagcctaatgaaaaacaatcacaagttaaaagcaaaatgccaaggaaaataaggttagatacccacagacatttaaaaagcaaaggcatctggagacgtatctttcgaattctccttgcccagtccttatacacagtaggaaagcacataaaagtagcattaaaatctatcctgtgctatggccatcagaatggatttaggggaatgcttaagggatgatcaataggagtgcttggcatgcgtatttcttctcagactagcagtcactggatgcaaatattttctgtctgctgaatgtgctaatggaataccaatattatttttttctaatttctattgttaaaatttctagagcagaacatgtggaactcacttctatggtttcctgctgttaatcattctctactgaaattctgccagttttccagaacatttagctttgtgggcatgtgtctgtgaattaaaaacatggaagaaggaacagaattgttgcaggaatttggaacaaatctatttatatattcagtggtacctcacttcccttatcaaaatcggggtggagaagggccagaaaaggggattcaggaagtaaaggtctacaagtaataagaagattctgtaatgatgatcattgtaactacaaaacctctctctctcacgctgtatttatgtatttatacatatacatacttctctctctctctacacacacataccccacctctctctctctctatatatatatatacacacacacatctctacatacatatgcatacatattttatatttatatatgtgtgtgtatcatatatatatgtatatatatatgaaaaaaagattttaatgacctccttatggacagtcaagccccgcatcccataggtgtagtattatgctagcagatttctcatgtccaagttttgtttaaatctgagcactcagggatatgccagttgcctaaaattaataatgttaatcattcctaaatgttctttaagagctttagtttttcctttgcattccttttaatgtagcagtatttcattggatttggttcagtgattgtgtttcagacatagtgatatatcataggtttgccttcaaatcaaatacagttatgatcctgaaggaaattacccttataggccaaactctgaaaattgtactctatcctaaaaggtcactgaaatttctgaactaatctttataatacatgaataaacctaaacattgttttttacaaagcaaggcccctcactagtgtatgtcactggatatataagtagacatctgtgaaatttatttttgaagtattattttggtttcttggtacgtaaattggattactttattctaagccaggtttgtaagtagtttttaaaagtcatttgaacccattcagattactcaggctctttcactgtgttatctcattttgtactcttcagttttgctaaatgtaacaagaggagactttaacagaaaaccttaaaatgttttctgcaataaaaagatcagttcttcatagaaatccaatagcattgtaaaattaaaactaatgttccagcataataatgtccataaacttgcttttcaatattaattcatttttggtattgatctcataagggagtgtttagttaccaactgctttaggccatgaaatgttttggggcaaagaaaattgaagggattgttttggtattatgttgctcttaacagatttttcaggaatacatagaactgtgttagttagctgacatcttttctgttatttaagttgtatttaattgggaaatattatatcttgtcatttgtatctgattgttttattggagaggtttttttcctgaaaatttgtaaaataagacaagaagactaaatggcttatctaataatttttttccctatagaaatctagattttgattcatacttaatgtgtagatcagcctttccactaaggttctcaaaggtggctggccttctttactaactgaaagcaggttcagcagcctcttatagctttcatggaaagagtttaattgaccaagatagactgtgtgttcgtcagccttaagaagagagatttgttttatttatatgctatgacataggatatgatgggattgtctttatgagaaaaatagatcctaagatccagcattcaccttgtgacctccaggaccctgtgcaccaaccctcttgcatatggtgaccaaattcatgtatgcatcttccttgtaggctctgtcagttatgttcccgacatggtaaagatagttttaaatctcaagtgtcctagcatagctaaacaaatggaagatatggttatatgtcctcctccttttcccatagcatttacattcttccataaccatttatgcttcttatctattttaggaatggcacctttataagtaagtgaaagatgagagactggaaagtccatactttgaattaactcttctcttccatgaacgtaatgctttacttcctaccacattttggagaacttagcactacccttttttatagaacatctttactctctctttatttaatgactaccactggtattttttaatatgtaaattcaatagtttttctttttccttttttagtggtacaggtaatagaagaatagaaaaagagagttgagggagggacaagaactactttgaaattagagaatacatttacagcctcatatgttcagttcatttttatatatatagttctgggatatttttggaataattatgattttctgagaatcatgctgacagaaaacatcgtctctttcttttaagatgttacatttcaaggtacccccttatgtttgcagtagtcatacttccggaatctgggggacaatttcaatttttttaaaagatactctgccccaacataagatcatgggccattgaattcaggctgagttttattttttgatagctttattcatgattactgttatatataaagccaaatatagcatgaatcatacatggttagcttttcactctaattctcattagtacttatttgttgaatgtctgaatctaaaaagggaatgtgctaatagaatattactcaatatccatataaaacttaaatatctatacaaatacagtttctttaaccaagcaaatgattaatgtttaggagcatagttcatctcaaaatgctctgctctgatagagattcaagaatacttgatttcttgggagcctacatgtgatctaaaatgaaggcaggggaatggaataattctgatttaaatgtagttgtaagaatagtttggcagtacatatcttgattgaacttgatagaactgtcatttattatgggagcctgttgtctaggtcttactcatttatgcctagtgtattgttagtaatctgtgtaggagtgttaaatataaaggaaagaaattataagtatagaatgcatttattctttatgttaatgaatctatttgaaatattttgtggaatcttaaatgtgaagggtaattgtttatttgattacagagaaggaaaacctatacaatttattggctatttttttttttttttttttgagacggagtctcgctctgtcgcccaggctggagtgcagtgccgtgatctcggctcactgcaagctccacctcctggattcacgccattctcctgcctcagcctcccaagtagctgggactacaggcgcccgccaccatgcccggctaatttttttgtatttttagtagagacgggttttcaccgtgttagccaggatggtctcgatctcctgacctcgtgatccgcctgcctcagcctcccaaagtgctgggattacaggcgtgagctattggctatttttaatgtaaaactttgaaattgtattcagctatggagaaattctactagagagcttatggatgaaatcatagcatcagtagttgaattaatgtgggatatatttctcatgcatttccacctttaattatgaaaacacctggagctcagggaaggtaaggaacctgcacaacatcacacagcttctaaatggccaagatagagtcaaacctgagtttccctgatttggagaaattgtactattcaacactgattatggttgtatagtctttagcagatgcaagtcatatatattctttttttccttgcatataatatctattgaaaaaccgggtaggtgagaaaactttattatatcactaagaatgacagcatattgtgaaaatactgtcagaataccatcagtcaagtgtgtctgtcctttcatttaaaagtggctttgtctaatggcaggcagcatggcacaataagtagccatgaggagttcaggcagagatgcataaatgggtgactgtgagtattctaagaaatctactggacatgatttttttgtctctatatgggatctggaaattctgccagagaggcatttgagtgatgccttcaagagtaacccatggctgggcatggtggctcacgcctgtaatcccagcacactgggaggccaaggtgggcgtatcacctgaggttaggagtttgaagccagcctggccaacatggtgaaaccctgtctctactaaaaatacaaaaattagctgggcatggtggtgtgcgcctgtaatcccagctactcaggaggctgaggcaagagaatcacttgaaccgggaggcagaggccatagtgagctgaaatcatgccactgcactccagcctgggtaatccatagggcttttctcaggaatgcgaaggtggtttgatgttacaaagctattattgtgacttactgtgtaacgctcatctccatagagggagaaaaggcatttgataaaattcattgcttttttaattaagtaaacaccccatatttatggggtatatgtgatattttggtacatgtattaaagttcattgttttttctccttgggaggttgaggtgggaggattgcttgagcccaggagttttgaagttacagtgagctgtgattgtgccgcagctttccagcttaggtgacagagtgagactctgtctcataaaaagaaaagaaaggccgagtgtggcggctcacacctgtaatcacagcgctttgggagggtgaggcaggaggattgcttgagcccaggagtttgagaccagcctgggcaacatgaaaccttgcctctaaaaaaaaaatttttttttaattagccagatgtgatggcatgtgcctgtggtctcaactactcgggaggttgaggcgagaggattgctcgagtccagaagtttaaggctgtggtgaaccatgatcataccagtgcactctagtctggggcacagagtgagaccctgtcataaacaaaaaaattattgcttattgataaaaggttagtaaaccaggaataaaagggaacttcctaaatctgtttaaggatacgtatcagaagctttcatcaaggatattactgatgaaactttggaagcattctctttagtccaggcgtggtggctcatgcctgtaatcccagcactttgggaggctgaggcaggtagatcacttgaggtcaggaattcaagaccagcctggcaaacatggtgaaaccccatctctaccaaaattataaaaaataagctgggcgtggtggcgtgcacctgtagttccagctagttgggaggctgaggcaggagaattgcttgaacccaagaggcagaggttgcagtgagccaagatcatgccactgcactccagcctgatgacagagcgagactccgtctcaaagtaaaaaaaaaaaaaagaaaaaaacattctctttaaaatcatgcaagggccaggcacaatggctcacgcctgtaatcccagcattttggaaggccaagacgagtggatcactgaaggtcgggagttcgagaccagcatggccaacgtggtgaaaccccatctctaccaaaatacaaaattttgccagctgtggtggcgagcgcctgtaatctcagccactcgagaggtcgagaaaggagaatcggttgcacctgggagactgaggttgcagtgagccaaaatcacgccactgcactccagcctgggtgacacagtaagactctgtcttgaaaaaaaaaaaaaaaaaaaagaatgagacaggaaaccatttttcaccatttaataaacgttgtactgaaaatactagccaatattaggccgggcgcggtggctcacgcctgtaatcccaacactttggaggttgaggtgggtggattacttgaggtcaggagttcgagaccagcctggccaacatggtgaaaccctgtctctactagaaataaaaaaattagccaggcatggtcatgcgtgcctgtaatcccagctactcaggaggccgaggcaggagaattgctggaacctgaaggcagaggttgcagtgagctgagatcacgctgctgcactgcagcttagacaatagaacgagtcttcatctccaagaaaatactagccaacattataaaggaataaataaagctgtcattgtttgcggaagtctatgtagaaaactcaagagaatgtgcagaaaatcttttagaattaatagagttcaccaaaattggtggatataaaattaacatacaagtgcagcatcaaagaggaaatgtaatgttaaaaaagataccaatgataatagaaaccaaaatgtcaggtactgcggaatcaatattatgaaatatgcatataactttagagaaaagtaactgatattttagcagaccccaataaagatatatttacatataggaaaaaaaagtggccctgtctatagacaatgctaacaatatagctatttaagaaaatcatatggacacggggaggggaacaacacacactggggcctgtctgggggccaggtgaagggagagcatcaggataaatagctaatgcatctgggacttaatgcctaggtgatgggttggttggtagatgcagcaaaccaccatggcatgcatttacctgtgtaacaaacctgcacatactgcatgtgtatcctggaacttaaagtaaaataaaatttttttaaaaagaaaattatttatttagaaaggatacttcctctttttaaataaaagttttctagaacagtaattcttcgtaattttttcctcagcaacataccacactcccatgactgttaagaagtttgaaattcgttcagttgagaattgctgaggaatgcattttatgtctgcttcatttatgtagatacttttgacaaagaaaatattttagaatttagaaagaattcttgatagtaacagaaattggtttttgaaaacagtattttagtggtattaagacctataatcatctcctcttctaagttgataaaaacctttacattagcaacctggaataataatgaccagattaacacagtcattgcataccggccctaatgtaccatgatcagcttacaagcacgcatctatagacaactggcccatcacaacatcttggcaaattgattgccttggaggattttggaatgtattggcataaatgccagactgtgaaagaatgattgaaccacatggggttgaattcatcaatagcagcagtccattctttcaagcagaacatgtgccaagcaccagcttgtaatcacaaacatcatctgctgcatattgaagaggaaaacagcgtgggtgtgctcaggatcttggtggtagtttctaattaatcacaacattgtttagcaacttggagtatactcaaattgcttcatccatgagttctcaatccccatacttgctctggtgtttctctttttttctcttctttccttcttttattccttatattcatcaaggaaatatttactgaatgtcctctatttacatgatcctgaactaagcacaatgggaagtaaaatgataaaatgagcaaagcctgaactacacacccgacataatccagcacagagatcataattcactatggaacagagatcagggacctagtccccaaaacaaattagccaggagtgagagcctggtccagtccttcagaattgcaaggatgggatcccaagcagaaggaacattgtaagagacaaaattgtaacaatatgggacttctttgagtaaaacagattacccaaaaattgctgaagcattgcctattagaggagaagtagtatgaaacaaatcttctcaggtgggctggggcaggagtgtccccttcatgaaacaggccctgatggttctgttatcaatggttttgaacaagtaagtggaggattcagtggggtgctttagccaacaggtggcagcaatgtggaggcgggatggattggattcggtagagactggggatgttgagaccacatattaggcttcttattgaacacatgaatagtatgtgccaggaaccttattatctctaatcctcaaatggatagtactactcttaaatccattttactgaaggggcgatggagacttacagaatctcacagtggctacattgtaggactggtatgttaacactggtctgtgtgaacactttccacagccgtgcactgtcccactgggagatggatgccagccagacaggcagtagaaaggtggggaggcagagaggtacaggtgcagaacagaagaaatctttccaatgttttgtggaaagaagttaggcatacatacattaattctgattaaaacttggcaatgtattagattcaggatatatgaagagagaaggagcactcaaaagccatgaatcttgatttactttgaaattagataacatggggtaaaaaacaagtttggggtgagaaatgaggacttctgttttgtatgtacctgagtggcatacctcttgtgggtccttccttatgccttaatctcataatactgtatatgtacctctgttagagcacttacaccattgtggcatagcttgttttgttttggtggatgaccccatcctggtattatgagctcctcaggggctgggcctcctcacgtttctgtccctagcatggagtaggctcatgggaagcgcttcaggtatgataaggaactaggggattcttggccagagagacaggagaaatcaatggaagtccaaggaggaggaatgcttaaagtgaatgttgtgagaacatgattgggagccagttagagatgagtgaaaggctcccctgatagcacgcaggacctgacatgctgaatttgtcccaaaatgagtgtggctcgtttttgtaattattctcaaacaatgctcaactccctggatgtgggaatggagaactccctggatgtgggaatgaaatgagtggcttgaagtagataaatctggaactgaggctggatagagtggcaggtgggaccatgaaaatgatgaagaaaatgaaatggaggaattgcagtcgtaaggagcacagagtatgtttgttactatagcttggaagtgtttcagttttgttttgtgttacttctactgttcataagttgttgattttttatgctaagaaaaataagcttatttaagtgggcatacaaaatatcttggcatttgtggcatgaacaagatgtcggcccaagttctctctctaaacacttactagtttgtgaccttggaagagttatctaatccttctgtgtttagtttcctcttttctaagatgggggtagcaacacttggtctctctgacttcacaggactctgatgatgataggaaattgttcataaggcaggaagggttattgaagtattagataatccattgagatttgagcaaatgcttaatactcttggtgattgtgtgagaatggccgcctctggttgcattcaggaaaggatcgtggtgttgggggatcttgctgtgcttgattgtagcccaattatagggccctaaattgaggagtggggagaataatatttgaagctgagcagtgattatcttgctcccagtgaggcccctgctttctccacaggggcatctttactttatcagcagtggggaagcctcctacagtttgcatcttgtaatccattagtcacaaagtgttccactttttcctccttaactttaatattaatacaaggtaaaactcataaataaataaaacaaaaagaaagggaagaataagagcaagaaaaaccttgaagaggtgttaagggggcttcatcattggcagttctctttcagcagtctcacagcagacttcattacttcagtttgatcaaacattgttgtttctaataacccccttgtgttcttacttaagggaatatcatgctctttgaatattgaattttttttcttatccagttcaccatgtcagccttcctgacatctaaagtctctagattattggtgaagctttttcttacttttgttgttgatttttagcagctctattgaggaataatttacatacaataaaaagcatgtatttaaagcatataatttgagacgctggcatatgtgaacaccatgaaaccattaccacaaccatgcaagtgaacatattgctgcctccccagaacttcccttggtgcccctttgtaattcctccctccacaggcaaccattgatctgctttctgtcaagttatttggacttagagttttctttgggggaacgtttttaacaaattcagtatttttaatagcttatagggctggctactcaggctatttcttcttgagtgagtttggaagattgtatcttttagggaatttgtctgttgcattgaagatgctgaatttaatggcataaagttgttcatgatactcttattattttaatatctgtcctgagttcacctcatttactcctgatattggtcatttgtgtttctggctttttcctggatagtctgtgcatttgttttctgtggttactataatagattactacaaatttggtagcttaacgcagtagacatttattttctcacagttgtggtggccaggtgtccactcctgtcccacaccccctccagagtccgtagaggacaacctcttccttcctttttccagcttctgggggcacctgtcattccttggcttttggctgcgtaggtccaatctctgcatttgtcttctctgcttttgtctcgaatcttcctcagcctcctcctgataaggatacatgtgattgcatttagggaaaacctggatgatctaggattgtcttccgatcgcaaaatttttaacttaattatacctacaaagtttatttttgacatctaagataatacaggtttcagggattaggatgtgaatatgttttgaggggcccttatttagcctaccatagcttggcatgaagcttatcaattttattggtcttaaaaaaacaattttggttttatggatttttctcaactctcttcttttctacttcatggatttccattttgatctttagtaatacttttagcgtgtgcatactttgggtttcactcgtctgtctttttctggtttcttaaggttgaaggtttcctaagagatttcttgcagtaattttacctgttacactttagctccattccacaaatttttataggctatgtgtttagattctttcagctttatattcttactaattttcatagaaatgtgttatttagtttccaatttgggggatgttttccagttgtctttcagttactgatttctatgttaatttcattatggtcaggatattcttaatatgacttgaatccttttaaatgagttgagactagtttagagctcagaatataatctacctcaggtaaatattctaagacattgaccatacaatttaagaatgcatatcctgctcttatttggtggaatgtggtttaaatgtcacttattaggtcaagtttgttgatagtgttcttggagtcttctatatccttggtgaatttcaggatacttgttctgtcggttactgagagtgatgaaatatgagagtacaattgtaggtttttcaatttcccttttctgttgtgtcagtttttctttcaagtattaatattttgaagctctcagtaagtgcatacacgtttaggattgttatattctcttgatgaattggtcccgttatctttacaaattgtattttcctgcctttgtgcattcttagttattttttattttatgtccacattataaaattttatctcattgagttttgttctcggataccattaagctgcttagaagcagttgagtcttgcttttatgctgttttagatggcattcaagtaatgtttaatctaggactaaacttacaccattattaaggtatatcccttctaaatactcttttgtatgcttcagatttttcactctggttcgtaggaacaggcactatccccagccctgtttgagctcctggaattgatttctctaaccctttccagtagctctttcccctgtcttgggttgtttcctcacacacctacactgatcagtactcaactgaatactcaagggaaattctgaagatctccagattctcctcctccctctctgaatctatcctccctgggtcctctgccatctgaattctagcccccttggcatctctgtattctgagctgcatcttttcaactcaaggaaacaccaatgtctgcctggtttacctgccctgtgctgcagcctggaaacttttttgagatattgagctggggacagttacagggttcgcctcatttgtttcccaaatctcaggtatcactttgcttcattgcctgttatccgctagcatgagaactgttgtttcatgcatttttgcatggctttctagttgattcatgtagaaagggaaagctgatagccattattctgtcttagctggaaatgaaagtcaagagctggaattttatacaaactggcttttagtgcatttttaatcatacttagaaaaccttctgtaggctaggttcacagacaacctatcatccacaaaagtggctgcccttgtgggactctttttcatccctgctgctggagcctctgccacctggacaaccttatgcaagttacttagcaacttggtagtatgaggtgttcagagtgaaggaagagggatgagctcattttgggatcttgaatctactgctttactatgggttatattttaggtcttttatttctaatctagttggttaaaggttttagtttttataatgtgagaatttctgtgtttgaaagataaacatttaaaataaaattaaatgtgaaatgtttgtatgcacaaaacatttttaattacaaaagcaaaagaaatgttttaagtagagcatgacattttaaatgttcacttatgaacattcagccaattaatgtacttgatttttttcttctgcctcatagattctgtgatataaagattaatgatggttttcatttgtaaaggaagttttactgcctaataaagctaggttcataattttaatgaaaggaaattctttaattttgtttatgcataatcagatgtgcagctgctgggaccaaaatttatccattaaaaaatgcagtctaataaaggaactaccatcatttatttttaacaggaaatccaaatcaagagaaaatataaaatccagattttaaaaaactaggaaatatgtgatgtttatgcaatagcttatctcttgtttttatggcaagtcaaactttggtcctaatttgtcataatgttctgtatttctgttctccaaaatcattattacctagcctgaccatcaaatcatgatacagtttaatagtgaaagtagatgcatctttccaaagattataatagacttcttgcattaggaaaaactaatttctcatctgagaaagggcttttgtttgtttttgttttgttgtctttttttaaaaaaaaaatcatgatatacaaggtaaatgttattatttttatttgaaagttttgattaaaggaaaggtagtgccttgcttattttgtgggtcacttgcaggtatctgtatttgcagatgagcctgcctatctttcaggttgctgatccagatatatttcagcattgttacaatcaaactctcaaaattcacctgtttcacacagtctttctgatatattaggctttaatactgctttgctcgaatctaaggcaatttgacatttataataccctcagtctgctttctaaatggatcgtcactacatttagctttgaatgaccatcaacgcttctctaaattaatctattccctctcttgccatttagaaacaaaatcatttgcaataactcaagttttatgattatacttatatccatgtaggaatagaatattctcacccctataatatttcattctaattaatgccctggcttgacgtcccatactaacttttattgctgagacaacatacatattgtattccatttttgtgaatttgaatattagattttcaaaagatcctgaaatagttagacttctttggattttaatttaccggacttggtttagagttcattaacaaaacttggactctaattaagcagttagcattgcagtgatcccaggccatctcttctaacagcgggaataccataggtcctgggagttgactctagctccattaaggacaccatatagaatgcctcttaaagctaaggtgacattgtaactgaaacacttatgaggctggaagggccacatttagtaattatgccctgacaacaggcatcaataaggttagtcaacctacttaaggactcagtggttcagatttacagctttccagaactgatccagagttcagataaagaccaaagtatctctgccattttgaaagttcatttgtattttaaaataatcattgattgcctcttaagggactattcaaaatttagaaatacacacacacacacacgtacacacacatacacacatctatagataataggtattaattgtttttctttattaactttttggtaacttttattaataatctccattgtagctataaccaaggctgacatcatgcccaaattctgtaactttagtaaaataacatgaattttgttctttaattcttcttaatgaatgcttttcttacggttgattaaagcaattttgccagtgacttttaagtagtcccacatggatggattttaaataatacttaattgacaagaaagttgaagaacaaaggaagtggttaatctctagagcttgtagggatttaaggaagactaatttgacagttttagttatataggtcttctagtacccataaattgcttaaacttaaattatctcttgtcgcttttacagttcaaactaaaaacaaaaacaaaaacactatctgtttgcaaaataaaatattgtacccagatttctgtaaaaatagagttgttctgatttaaaatgcccagtcatgttgatttcatgaagatttaggaaaatttgtcctattgggaataattactatgagagctaaaaataatagttgtattttttttttctttctttcttaaaaaagctggacctgtgatctgcagaatgctgagttatcccccaactcgccgagctttaattgtgggttgtggcctacaaatgttccagcagctctcaggcattaacaccatcatgtatgtatttctttctggctttttactgaaaagattgtgaaaggattattttatgtgaaatagtgaaaagtatttcatgtaaatactagactcagtgatttgttctgattaaatgtatgaattctccttttgggagatactgactttacaattttttaattccagtaatttgttactagataaaggtgatttattttgtttgttatatgattggctttatttgattccataaaatttctcttttacgccatccaatacctccttgtattctgagcttaaatgtgtcattttttctaagccatttcttgatgctggttggaaagcaaaatagaaggaaatcacctggcattgccagagattatgggcacacagataactaattcatttctttttggtgcagtctactacagtgcaatgtgataaggacattagtagaagtacgtttattataaccagagtatggtagaggggagattgagtgggaaggagagtgaggaatacagaaaaattccctgttctctaattttaagagtaattcccaaagctgtatgtgtgctgagggtgggaaggactaaatattaagggctctactaggtttccctcattcagtattaaacccatttttgagggcctctgttgcactagacctacagcagtaactaaaatagacctgggtcttgtcctcatggatgtacaggctggtagaggaagcacacattaaataaactcacagttaaatataagatttcaaactatgataagggccatacaggactctctcaattctctacagagtagacttttaagatcctaaatcataaaatacagtttagagaaggttatgtgctttcccagggcacatattgttagattaaaagctgccacatcttagaagtcctccccactccctgcctattgattgaatttttttcattaagaaaatacaaattatgtaaaattaaattttctttggtaaaccatttgtatttgagactcttgattttttttaattacttgagatatgatgagttatttagtgactgtttgagaagagtgaattgattaaaatatttttaaaaaagaaggattaggacccaatgagccagtatattaaatcaagatttgttgagaaactccattttctatacattcacacactttgtggatttgactttaatcataatccctgttgaacttcaactttcgagactacatgttcaatattttgttctctcctgcttctctctgacattaactttcattttttctcacctttaccagctctattaaggcccatctgttggtctagtgccaggcacgtttgattgcttgttctctgaatttggcacatcatgacttgttctgagatgtgtccaccttctgcagtctggtggaagtatagaattgcagctaggctaggaccaagcatcaaataattaaatccattaataatcctatgtgaattcgttagttgaccaacctaatatttgttctggttttgaaaatatgttttgtttgttatgctttttttcctaagcatttaaacttgacaagtataaaagcatagaaagtgaaggatttttcttgtactttttttgttttcacttaaaactggtatcacaaacagagccaactctagtttatgggtagtgactggggccagtgtattcctagtttgaaatgactgtcataatccattagcagtagctagtgtaaattgagctgattgatgctgtcaaattttaataaaacattcatttctccaaagcctcacttttttcctgaagatcaagtgatataaggatcctgatattctctaatatttatgatagatgcactttgcttatcataaactgcacatgatataggtagtgttgtcatagagcttttgtttgcatttgattatcaatcctggaaaacaggaagaataaaataaagtaaatgatggctgaacttagactgtgtctacatgatgtaaaacagctaatcaacttcctgcataaattaatatgttcatgtctagaggttaaaggattagacattaaaataatacaatacctatgctgagtaactgttgtttattcacagtacataatttcagacattcatattataagcccataaaatttagtgtaagtcagtgtcattatgatacactgtaatactgtttactgtctgcataaaaaacaactaatctgggactctcatgtaatgtgttttctcctgctctctctagtctttatttgtgtgtgtatatgtatgtatctttttccattattctcaagattaaggaaatactatcataaactttgtttctgatttaaaataatctattagagtctagtaatttactttttttatttttagtagaaattttaattatgccttttattttgtgttactttgttaattcagaatatcttttctatggatattttattacatataacacatatgtttatgtatataaaattttactctttttttccagcttcttcccttttaagtgggaaataaagcagttaatgcttttctttattttaattcaaccctaataatgtgtagaagttgaaatacgtttttgaaaattctgtcgtttacctcaaaatctgagtgaatggaaatataaggtattttgaattctatttctcaccaaggtgagtttatagaaagattatacggaaagataatattaaacaaatacattaaaagataaatcatcctcacagttgtgttatataatcttactgtgtttagttttttatcttctccctcaaagaatcctttattcctattcccttgacctatttactattctgtcacatttgacaaaatagattttcttcttgaaatacttgattttcttttcctttaccatatttatctatagacagtatatcatatatatagatatatatcttttatttgtatgataacttatgtttctttatatcccaacccatacattctcatcctctaccctaccgaatggaggacttgtaagttcttaaaacttacatatttcagacattacatttcacttttagatgaggcaatttttttttataatatgactctcatcctaataatttcaacatgcaactgaattgattattttcctttattcataggagagaaagagtagagaaaatggagtactaactttcctaatataagggtgttagtatcattgcactgtatctcatagaccaataaaatatttctgcatgtgtcaaaataaagaagaggagtgatagatgaagatgatgatggttaaagtaaattcaagaaattctcggccaggcgcggtggctcatgcctgtaattccagcactttgggaggccgaggtgggcagatcatgaagtcaggagatcgagaccatcctggctaacacagtgaaaccctgtttctactaaaaatacacaaaattagctgggcatagtggcgggcgcctgtagtcccagctactcgggaggctgaggcaggagaatggcgtgaacccgtgaggcagagcttgaagtgagccgagatcatgccattgcactccagcctgggcgactgagcgacactccgtctcaaaaaaaaaaaaaaaaaaaagaaattctcactgtgatctattctaaactctagttataatatcaaagatgttccatgttcaatctaagaaatatttatctgatgactattaataaatagacacttcccacattatcattaccacaacctaaatacatgtgttcatgtttggaggaggaaaggtgtacgtaggtagtgagaaagaaaacactaagttctatgtgggtttgataacatctttcttttttggggaacttgaagtaaactatattttggtatattctgataagcagataatcagtctgtcttggatgaatgaaaggtatcagatttttacctaagaagaccaagtggttaaatgactctcttttaaggttacacagaaaaacagtagtaaagggggaaagaaaatccagagtttaagcttttgagtttgcttcggataaagagaactgtgggggaatcttctctggggcatttggtcttttactttttagccactctccttgcagagtaatattgccagctttatttcctcttcttacttttctgtcttctattaactcagagtaatagaagctgagtcaagttagagagctgagtcaagttagacaggcaagtgaaataagcgggtagaggaagcagcagaaaggccctgggagcttgctggatcccaagcagcccattcctgcctggcaccacagtgatccatcaggagagtggccagaggagcagggggtaaaagtccacagggagaagaaattctgtagctgaacttggtaacaatttgaatggggcaagaagcctcctggccataagggaggacgcaaatggggcgttcatacttcacaggccgggggaaaaactaaagcccttttctttcacaactgggaggcggacagccttgggcaaattttcaagcccatctcgccctccgcctggaaacagacttggggctgttgcgggaacatggtgggagtgagaccggctcttccgtttgcgtgagagttgggtgaggcctgtgactgccagctttcacccacttccctgacaatctgcatgactcagcagagggagccataatcctcctaggtacacaactccaatgacctgggaatctcaccctcaacccccacagcagccacagcaagacccgcccaaggagagtttgagctcagacatgcctagtctcgcccctacttcatggtcctttcctatccatcctggtagtggaagacaaaggacatataatcttgggagttctagggctctgcccactgccagtccctctccacactactacagctgatgctttctggaaagttccacctaatggcaggaagccaaccagcacaaaaatagagcgttaaaccaccaaaattaagaaccctcatggggtccattgcaacctgctccccacaacctccactggaacaggcgctggtatccactgctgagagacccataggcggttcacatcacaggactctgtgtagacaacctgcaataccagcctggagccaggtagactcgctgcgtggctagacccagaagagagacaacaaacactgcagttcagctcataggaagccacatccataggaaaagggggagagtattacatcaagggaacaccctgtgggacaaaagaatctgaacgacagccttcagccctagaccttccctctgactgatcctacccaaataagaaggaaccagaaggccaaccatggctatatgacaaaacaaggctcttcaacacccccccacaaaaaatcacgctaattcaccagcagtggatgcaaaccaagaagaaatccctgatttacctgaaaaataattcaggaggttagttattaagctaatcagggagggaccagagaagagcaaagcccactgcaaggaaatccaaaaaatgatacaagaagtgaagggagaaatattcatgggaatagatagcttaaagaaaaacaataaaaaattcaggaaactttggacacacttttagaaatgcaaaatgctctgggaagtgtcagaaacagaattgaacaagtagaagaaagaaattcagagctcaatgacatggtctttgaattaatccaatccaacaaagacaaagaaaaaaaataagaaaatatgaacaaagcctataagaagtctgggattatgttaaatgaccaaacctaagaataatcggcatagctgagaagagaattctaaaagcctggaaaacatatttgggggaataatcgaggaaaacttccccagccttgctagagacctagacatccaaatacaagaggcacaaagaacacctggaaaattcatcacaaaaagaccttcacctaggcacattatcaggttacccaaagttaagatgaaggaaagaatcttaagagctgtgagacagaaacaccaggtaacctataaaagaaaacctatcagatgaacagcagatttctcagcagaaaccctaccagctagaaaggattgaggacccatcttcagcctcctcaaataaaattatcagccaagaattttgtttccagagaaactaagcatcatatatgaaggaaggatacagtcattttcagacaaacaaatgctgagagaatttgtcattaccaaaccaccactacaagaactgctaaacggagctctaaatcttgaaacaaatcctggaaacacctcaaaacagaaactctttaaagcaaaaatcacacagcacctataaaacaaaaatgcacattaaaaagaaaaaacagaaaacaaaaaccaaagtacccaggcaagaaagagcatgatgaaagcaacagtacctcacatttcaatacaaacattgaatgtaaatgacctaaatgctccacttaaaagatacagaactgcagaatgcataagaactcacagaccaactatctgccgctttcaggagactcacctaacacataaggacccacataaacttaaaggggtagaaaatggcatttcatgcaaatggacaccaaaagcaagcagggggtagctattcttatatcagacaaaacaaactttaaagcaatagcagttcaaagaaacaaagagggacagtatataatggtaaaaggccttgtccaacagtaaaatatcacaatcctaaacatgtgcacctaacactggagctccgaatttataaaacaattactaatagacctaagaaatgagatagacagcaacacaataatagtgggagacttcagtactccactgacagcactagacaggtcatcaagacaaaaagtcaacaaagaaacagtggatttaaactataccttggaacaaatggacttaacagatacatatagaacatttcatccaacaagtgcagaatgcacattctattcagcagcacatggaactgtctccaagatagagcatatgataggccataaaatgagcctcaataagtttaagaaaattaaaattatattaagcactctttcaaatcacagtggaataaaactggaaatcaactccaaaaggaactttcaaaaccatgcaaatacatggaaattaaataacctgctcctgaatgagcgttgggccaaaaatgacatcaacatggaaatttaaaaattcttcgaactgaatgataatgacacaacctatcaaaacctctgggttacagcaaaggtgatgctaagaggaaagttcatagccctaaatgcctacatcaaagtctgtcttgctggtgttacaggtgccactggggtgtgaaaaaaaactcctgcagctagctcagtgtctgcccaaacgtccacccagttttgtacttgaaacctagggtgctgatggtgtaggctcccaagggaatctcctggtctgcggtttgcaaagaccgtgggaaaagcatagtattggggccagaatgcactgtccttcatggcacagtccctcatggcttccctgctagggagccaagtggtctagctcagtggatcccaccccacggagcccagcaagctaagatccactggcttgaaattctcactgccagcacagcagtctgaaatcgacctgggatacttgagcttgctgggcggaggggcgtccaccattactgaggcttgaataggctgtttttccctcacagtgtaaacaaagctgcagggaagttccaactgggcagatcccaccacagctcagcaaagccactgtagccagactgcctctctagattccttctctctgggcagggcctctctgaaagaaaggcagcagccccagtcagggccttatagatcaaactcccgtcttcctggaacagagcccctgggagaaggggtggctgtgggcacagcttcagcagacttaaatattgctgcctgctggctctgaagagagcagctaatctcccagcacagcactcaaactctgctaagagacagactccttcctcaagtgggtccctgatccccatgcctcctgactgggagacacctcccagcaggggtcgacagacacctcatacaggagagctctggctggcatctggcaggtgcccctctgggacgaagcttccagaggaaggaacaggcagcagtctttgctgttccacagtctccgctggtgatacaggcagatggcctggagtggacctccagcaaactccggcagatctgcaggagaggggcctgactgttacaaggaaaactaacaaacagaaaggaatagcatcaacatcaacaaaaaggacatccacagagaaactccagctgaaggtcaccaacatcaaagaccagaggtagataaatccatgaagatgaggaaaaaccagcacaaaaaggctgaaaattccaaaaaccagaaaacctcatcttcaaaggatcacaactcctcaccagcaagggaacaaaactggactgagaatgagtttgatgaattgacagaagtagttttcagaaggtggataataacaaactcctccgagctaaaggagcatgttctcacccgatgcaaggaagctatgaaccttgaaaaaacgttagaggaaataattgctaacgagaataaccagaggaataattttcctctagaaagctctgagaactgataaaataattcagcaaagtttcctggtacaagattaatatacacaaatcagtagctcttctatacaccaacagcaaccaagcagagaatcaaatcaagaactcaaccccttctacaatagctgcaaaaaaatataaaatacttagaaatatacctaacaaaggggttgaaagacctctacagggaaaactacaaaacactactgaaagaagtcacagatgacacaaacaaatggaaacacatcccatgctcatggatgggtagaatcaatattgtgaacatgaccatactgccaaaagcagtctacagatttaatacaatccccatcagactaccaccatcattcttcacagaattagaaaaaaacagttctaaaattcatatggaaccaaaaaagagcccacatagccaaagcaagactaagcaaaaagaacaaatctggaggcatcacactacctgatttcaaactatactgtaaggccatagtcaccaaaacagcatggtactggtataaaaataggcacataaccaatggaacagaatagagaacccagaaataaacccaaatccttaaggccaactgatcttcgacaatgcaaacaaaaacataaagtggagaaaggacatccttttcaacagatggtgttgggatgattggctagccacatgtaggagaatgaaactggatcctcatctctcaccttatgaaaaatcaactcaaaatggattaaggacttaaacccaagacctgaaactataaaaattctagaagataacattggaagaaacccttcaagacactggcttaggcaaggatttcatgaccaagaacacaaaagcaaatgcaataaaaacaaagataaataattgggacctcccacagagtgggagaaaatcttcacaatctatacatctgacaaaggactaatatccagaatccacaatgaactcaaacaaatcagtaagaaaaaaacaatcccatcaaaaagtaggctcaggacatgaatagacaattctcaacaggatatatagaaatggccaacaaacatgaaaaaatgctcaacatcactaatgatcagggaagtgcaaatcaaaaccacaatgcaataccaccttactcctgtaggaatggccatgatcaaaaaatcaaaaaacagtggatgttggcatggatgtggtcaacagggagcacttctacactgctggtgggaatgtaaactagtacagctactatggaaaacagcgtggagattccttaaagaactagaagtagaactaccatttgatccagcaatcccactactaggtatctacccagaggaaaataagtcattattcgaaaaagatacttgcacacgcatgtttatagcagcacaattcacaattgcaaagtcatgggaccaacccaaatgcccatcaatcaacaagtggataaagaaactgattcatatatatatatatatatatatatgatggaatactatgcagctataaaaaggaatgaatcatatatatatgatggaatactatgcagctataaaaaggaattaattaacagcatttgcactgacctagatgagattggagactattattctaagtgatgtaacagcaatggaaaaccaaacatcatatgttctcactgatatgggggagctaagctatgaggacgcaaaggtgtaagaatgatacagtggactttggggacttgagggggaagagtgggatgggggtgagggataagagactacaaatatggtgcagtatatactgcttgggtgatgggtgcaccaaaatctcacaaatcaccactaaagaagttactcatgtagccaaataccacctgtaccccaataatgtatagaaaaacgaataaataaaatattataagtttatatattttaaataaacaacctaaaatggctttttgtgtgctaaaaaaaaatcacagccatctcaagaaccattaacctcatcaggttcttaagttttctggtacctagctaagttctttgatttatatcctgatctagagttcctggacaagctaggctgatggttgaatgagtcattcatacttgttaatcatatttaatttaattttctaagtgcagtatttctggatctgttccattctcatattctatcctcaacaagcacagctggtattaaaaaaaaaaattaccacgcaatcaggaaacatagcacaagcacacatggtcagatggtgataaatgtagagaagaataaaggtggcaggaaataagaaataaaacaataagggtttgtacactttcaggttgtaaatctgaaccaggaatggggttttactctctgaggtcttccacaatgcaggatgaatgtattagagcagcatctctctaaagtgtcttcccctctctgcctccctagtccaaaaagctgttgaaagataaaatgtttactcatcgaagtatttccagattagtgaattgtactcattcgtgttcattggctggaagttagtgaattaatgggaaaatgttaggatttatggctcactcttttgaaaaatgagtgtcatgtgaggggaagaatattaacccaggaatcaggaaaattagattcaaggtctgtctccaccatgggactctgggcatgccagttaattgctttcagtctaattacctataaagtgaagtagatggacttttaatgtgcatttgaatgaggacaaatggagtttcatggagtttcaagtagaatggaagctaaaacgtttgaaatagtaatactttaagcctttcttggatgaaaagttatcagactgtagaaaaatagttttggcctaaaaagaaaattgtactttgttcaacaaaatttttggaatatttattaaatgcttaccacatgctgatcattgtcttagaggcctagcttcttatatgttaagaccatatttttatttcccaatcatgtctttgaagaaagacaatctaggttatggctgataatgcctctttatcccaagattgtgtagcagacttatcacctgatgtgatagactttccttggctcccataatgtaggagtaggctcaagccctatgaactccactggcttctcagctcatgtgcacacggtttataagggaaagggtgtactttctccctctggagtctaaaaccctttttgatggcaggtaggtaactcactatcctagcaaacaaaacaaagcattctcatcagaggaggcttggagcagaatgcctttatagcgagctatcagaatgtttctaatcattttccatttccctgtgtatatattgcatacctgtctctgtttaggttgccccaaaaccaggccctaagacaaggacttgggtgcagatgatattttggggacgatatcaagaggatgagaaaaggagtaagggaagtggaatagagaaggaagaagaggcagtaaagagagcattggtaagcaggctatgtcagtaggcaactggagcacagtcctgctgagtactctccaaggaacagtgtagattgtcctcagaattagtccaggggtatttatccacaatccccattccctcaacttgagtgttgaccctgcggatgttaaatgcacttcctccaggctttcctgagaaatcacttatggtgccagagctgtcatgtagacaagtagagagacaaagaaagttgagctagaaactgtcagattctatagtgagtttccatgatggctgcagggtaattcagagggtgatctagagcatatggggcaaggcatgaaaagcacctctgaaaaatcctgtctccaaatatgtgtaaaaataagttagcacaatatggatgtgaactttcttagtactgttcatggatacagcaaatccatttttagtaaaaaaaaaaaaaaagtcaatgatccctggctaaccatgtggaaaataaccaataaaaattggagattcatgctaacaaatgatgaaaatatattttcttgaatattattatccttttttctttgtatgattcacaaataattttgtcctgttacaggaatctgaaaaatacatcattaatgtatgtatgtatttatgccttcaaccaatatttactgtatcattgctgtacattcaaatccctacctagggattgaaggggacacaaacaaatgatttttgttgtgtttttttttttaaagtttctttaaatggagttattttgtgtgcggaaacatggtacatcaaatattaatacaacctttggtgttagatctggatttgaatccaaacccaacacacctactctctgtgtaaactccacaagctacataataacttctcaggtcctcagtgatttggaaatcaggaattataatacctcccaaatgtgattacatgagaaagcatgtatgattgaggcccatgggagcaactacatctgtgttcactttccttctgctccctgtgtactgcagtttataaagtcccaggcgtttgtggaaagcagaaacatcccaccgttaatccaccttctttaccctctacccgtcgatacaggatttgaggcatcctctggagacacaaaattgctataatacccttcttttatgcatgtctctattttcaaaattcaggaaagaatcatgatggtgttcttctagcttgtacatgttatagtagtgcccttcacttcaatattagatatgttcttttcatcttagatttatgtcaaggagaaaagacctcgatgaccttaggatgataagatctaataaagcctccttagatggtgggggatctgtagctaaatatgcccaatgtggcgtgacttgtagtttacatcaaaagattgtcaaatccttttgtcatgcttcctgaatcagatgtgaatttaaggttctgtggtaattagtggaaattcatctccatggtttgtaaagtatcagcaactaaggtttcaggtgcctcaggacatctttagaaatatgaaaacatatttccttgccttcctttttctgaattatatatttcactgaaaggtaaggagaagaaatggaggtgctgttaatgagttgaaatagcatgaagtccagggatgtgtcccagaaaatagactttctgtgccaataaagcagaaccttgtccccaatatatctgagtttgaaggtaacaccagtctggctgattccgggtagactattgtaacattgtagaagtgcccaggtcttaattcactctttacacacacaggtagcaggcactctgccagggaccagagatacacaatatgacttacaccattttcagggaacttatggtctcttttgcttatctttaaaagcatatgctgtgacctgtcttgaaaggttgcttgaagatgaaataagacagcaaagtgccagccacaaaagatgtgaggaagttctattttcctcttcccagatttacatttattcttctctatgagttcactatccaggctctcatcacttggccatggttcttctgaaaaaattttccctcaccacagcatttcaacttaaatctccttcatggcttttcctactcaatttgaaccgtaatggtggtgctgtccaagtcttggcttgcaactctactcagagacctattccagtcccattaggccaatgaccatctacatgttaaagaagacctaatctgtagttgcaggtcagaactcctctgccatacacactcatatattcaactgctggacatttctacttttgaatattccactctcaccagtctcagtatgcctaaaactgaatccctatcactttctgccaattctgcccctccccttataatcctcttctcaatgatgcatgtggccagttggctgcccgagcctttagcttgagagtgaacacatccaaatccaatcagctgtaatttccttcaattttatatccctaatatctcttgtatccttcctatgatcttcattccattttctgtcaggccttgctttagtcagagctcatattatttgcaacagaatcccacttaaacctaactttaaaaagataagttggtgtacaataaggaaatagggcctaaaggcaggaaatatagctgggcctggcagagggttgaaatcagaaactagagagtcacttgctcagcttctgtgtgcccaaggttttttgctgttatttctgtagggtatatgcacccttcttctttctcttagagaacatcctcttctcttgcttgtatctggtcaatctctaccaccataactttggaggtacttctagttcaagcatccacaatagattggaattgtcacaattcttaattcccaaagagaaaaagatcaaagtgaacctaccctagcctgagcatttgagggcagggggcttgacaacactgtagagggatgcacagaggattttcctgccttaaatctcaacttcctcaattgagccttggttatctctgcctctaaactttctgcaacaaaatcaattatgtctcatcttgacataaatgatttaatgtgtcccacagctttcagcgaagttcaaagtccagggccctttgtggcttttgcccatctttgcactgcttcatgtccaaccactgccctacgcaagggtatataaagaagggtgtgtaaagctacaagtttcataacttctcagggcatcagtgatctggaaatcaggaattataattaggcacaaagatgagatgtataaggtataaaaaggtacatgtacctcctgctacatggaacctcctgtacttctggcaatgattaaagctaatccaagcttcagtgccttcatgtgtgccattctccctagctgaaatagctagcttaccctaaaagacttccaaacttaggtcacatgtcatctccctgaaccaaggggccaatgtaaatgttccccttctggcctcctttagcactctgagtggatatctatgaatagttatttattatattataactgcagatgtgtctatttcctccaaaagaccgtacacatactaaaaatgcccccttgcaatattccccagggagaaccagctagattttagttactactgactgttttgtttttattctgttcatatccagagtcatagcatgatgtataaggggaatgagtcactctctgatagtgtgagtcttccttaactagtctgcagacatgaccttaggaaaataaaagccacaacattcaagctttgagaagaggatctttcaaaaatgttgccaagttagtcctgacctttagaattagaattagtgacaggctataatgacatatctaatgatttataatattggataggttttcataattttatttatttatttatttttcccttcttgaggagaatggggtcttgctatgttgcccaggcaggtcttaaactcctgggctcaagctatcttcccacctctgccttcctaagtgttgggattgcaggcatgagccaccggtcccagccataaatttaatttggatttcaacactgaagatttccataaagtattcttcaagtcatatctctttctcttggttccttctttctgagggcaggtgaaaatctaagttagtcagttctgttcaaatttgtgattatgcttcctgtggctgatagaattgcaggatttcaaatgctattaagccgctccatgcagagacaaatagtctgatgacctgccattcatggcaggaagagaaatgaacagtgtttcttgctagaacttcttcatttatttcgataagatcatttcttactggacagattaaaccttagagaactacatataaggttctcctatttctatttttgaaaaaacactcagtaccagaaaatatagaaaatgtataaagtagatttaactgtgaaatttcaactttagtttccagcatagaattaacagcctcctcctggattcttccaatgatccctctgtaatgtccctaagtctctttcctcagctgcttatccaaaagtgtaatcatttatctaagactgtttgcaaggaccaaatttagtcctcaggcatgccttctttagaaagtgcagtttttacatttgttaaattacacattaaagtccacatttccagagatggcattgcctcttggagatgatgtaggtcctctcccgttccctgcattccctgctgctccacataacctggcctcatctatgcctttgaggttgtgccacctgtcctaaggaatcaacattcgattagcattctacttagaactttcaccatatatgtcctgttctgggctgggttgaaaagaaagctgacaattagagtggctctggttttaggaattgctagttgttatgtcaacagctatggacattcatagaatcttcagtttcattttttatccccaagaccttcatttcacattaaaagaattctttttgaggctgtgtgcacaaggctgctatttgccaccccttacaatccctttttatcaactaacagggagttaggtcatagctaacttaagattcagaatcagacagactatctaacaatattgctagaattaactgaaatatcatagttaatctactctaatgtgactaagtcatagaagcttattttttattattttatctggcattagacagacctggaatcaaatttcttgtttcctgaccacttgtgctaccttgagtaatttatacagacactctaagtctcaactttcttatttgtagatggcatgatacttttcagggttgtgttttttccccattcttacccatctcagtgagtgatactactatccctctagttgctcaggcctcaaatccaggattttggccaggaatctttgattctccttttatctgtactcctcatatctatttcttttgcaagtcttagcactaaagctatggttcctgaacggcctggagccacagggcacccttcacaggagaccacaggatattttaaattttcagacgaaataatgacatagatgtactactactgttaagtagtatgtaccttataaagtggaactgctaggtaatttagacctatgtgtgctatgaaaaaaattactgagacaccaagggcaccatgaagcaagaaagtatgggaacctctgctctattatttagcatgcatccttcctatatttatcttcatttcactgctgccatctgcccaagtcactgttgcctctcatcacttactgcaatagctggccttccaactggtcttcctgcatccatgctcatccttcataagccatgttccacagagcaactagaatgaactttgagaaatgtagataaggtcatagctttccttcacagtttattcttatttatttattgttaggcagggtcttgctctgtcgcccaggctggggtgcagtggtgccatctcagctgactgtaacctctgcctcccaggttcaactgattctcctgcctcagcctcctgaatagctgagattacaggcacatgcccccacgactggctaatttttgtattttttttggtagagacagggttccaccatgttggccaggctggtcttgaactcctgacctcaagtatccacccacctcagcctcccaaagtgctgggattacaggctccattacactttaaatcaacctggcttttcacatggtccacagactgtgcctgcttgtcccccatcttctccatcatcccacccccacctttatcccctggttcattaagacttaactgccccagcttttttctttcatgtttctcaaaatctccagatttgttctcaacttagaggcttttcagttgctttcccttctgctagaaagatcttcctctgtatctcattgtggctgcttccttgtcacttgcgtctgaatttaaacagcacacctcagataggccttgaccttgtttggaacagccacctttttccatcaatatcacatcaatccattttttcccgtcatgtttatcattgtctaaaattctgcttatttatttgtttattaagctccatgggtagagcccccatctgtactgttaacctttgaactgtctccagcacacagtaggcactcaaaaaatactggttgcatgagaaacgcagacaactgcttcatctatttcccttttttgtaaccagatgttgacgttgatgattgtgcttctgttgctccttttttatagtcaagtcttgctgaacttttaaaagatgaggaactaggtgtttaggggtcattttaagcattggatcatttattcatattgctttagtggtcaaaaaaagaagtgtactactattgtactgtactttatttgaagtgcctgattccccccaatccttagtaaactgattaaataactggaaaaaaatatccattttctatttcctactttactggagcaatatatagtaaaatcaaaatcaccctgtatactacttattccattaaaacaccaaactgaaagcagcatggaagaaaatgtgttgcaagagccttaaggtttattttttcaccttttctaggaaatgaataaactagattgccaagttatattgtgcaaggtctgttttcagtttggggagatgaaagaaaagaacagctacaagagtaacaaaataaaggtcttgaatgggcctcaataaaactatgatattaggataatatactattatataaaatgaattaaaattataatactattttagtaattagtataaaatcaaaacaactaaatttggatatttatttacaattttggatatttacattctgaccatttgttttgtgggagggtatttttttctttcattaggctttgcagagtccattcctaacgtactagttggcttaaatttaaaagttaaattggaatttacaagctcagttgaaattgggaatcattttccaatagtgtgtggcactttaagctggtaaacaaaatcctcttttgccttaccatatctgaaatataaaatcaatctgtcattactatcatagaacctcccaagttacaactctaagatttacagtgtattttctcccgaccccagcattcctatagcatcagctccagatgagagtagaataaaggaacacagatactcaggaggcccacgtgtctctgggtgcaggtgcaggtaggtgccagccactgctggcaggcgaatagggctgttggaaagggagtggcaacagcagaggcattggtaagggcagctagttgtggtaatgagagctctggtctcatttagtagcaggcattagtagtagtactcatttaatagcagggcatttgttttgcccttgataagggaagaaagaagtagacgatccttatagtggttctgacagcaactgttagggagggagggggcgcaagattgtttctctgtatcagtggttagtaagctgtatgtttggacatagtattatctctaatatgaatattttagttgacaattcaaatgatttctaaagtcagaaaaactgaaatgactggggcttctcagaatgaatcatacagaaattcagtatttattaacatatttattagaaggccaatttgtgaattaatttggttattaaaattatattgctcacttagtttgcatgtatataatgtgtaaaggaccagataaaaaatgttggtaagctatttattttaattgtagggtatgaatcaaattgcttgactgctttggagattgatctattaaagcacagtgaaatgagtttgcctaatttgctgattttaaggttttttcattaaacaataaatgatgttctgaagtcagaatatttatgtggcagtcacagtcttgttttaagggtattcatgtttttattttgaatttaatttttatcacagtattacatacacaaaagtcaagatactataaatcttactgtgaaaggcagttgtccctggccctccctttcccatctcaaattctgctttccagaggcaattacttgcacttcttttagatttttctttcagtattaacaactgtatttttaagtgaaaaatatgtataatttttgaaattctgcactgacttttcattatggaagatgaaatgcttcttccaacactgctcccccacaatacacacattcacattcacacattcttcctgcccctgatataattatatctcatttttggattaattaatatataccattttcattacgatgatgatggaaatattgttccccactgagcagctctgtgcactgtgattaaatttactctgatgtgtgctgtgagtcttctgtttgctcctctgcagcacttccccctcctccaccttgctgcctacaacccatgatcctggcctgctgaaatggctcatacagttataccaggatttttttctctctctcctatagtagtaagtaggtgccacattctttttcgttttttggtttttttttttttttgagacgaagtctcactctgtcacccaggctggagtgcagttgtgcaatctccacacactgcaacctctgcctcccgggttcaagcgattctcctgcctcagcctcctgagtacctgggattacaggcatgcaccaccatgcctggctaatttttgtatttttagtagagacagggtttcaccctgttggccaggctggtctcgaactcctgacctcaggtgatccgtcctcctcagcatcccaaagtgctgggattacaggcgtgagccaccacacccagcccaagtgccgcattctttaacttgctcagtgttcagtgtacccctcactaattctttctgcatacttttcagtggagctgtaaagcctcttcctttacagttaaacctaatgagaaacacccataatccatcctgtgattctgctcttcttacagaactttctcctgcagcctccagtatcctgcctgcctctcccatctggttgccccctgagggacagctgtagaaatgctctttacccctctctcttgtggctgagttctgtttcctatattacatgtcttttgctttttttttttgagatggactctcactctgtcgcccaggctggagtgcaatggctcgatctcggctcactgcaacctctgcctcccgggttcaagcgattctcctgcctcagcctcctgagtagctgggattacaggttcccaccaccacacctggctaatttttgtagttttagtagagacagggtttcaccatcttggccaggctagtctcgaactcctgacgtcgtgatccacccacctcagcctcccaaagtgctgggattatgggtgttagccactgcgcccagcctcccatgtcttctttttaggctgacttcatctttatcatgattcttactctgtactagtttcctgtgaaaagttcaatgagaagtaaacagttttgagaccatgaaactctttattcagtccccagacttgggttgtttttctccctcagaatttttaatgccataaattttcattttcttgccactccttgctgctggccttcaccatgtctgccatcctcctgtctgcaatcctggacattcattttctctggacaggacacctctgtctcctccccatgtgtggggagggcaaaggatcttggcagtggagttgggggaggcatcttgttgattgttacaaggattgtcaaccagtcctttttataatctactgtctgagatatttggtacctccaattcttaagactttccagagtctgtcatacaaatcatcctgcttcttgctggctttactttgttgtgattaggttttagttctgctgtgttaagccagtcaccacttgtctatcctctttccactgtccaaagcttccagtctgatgttctttatccttgcatacaaactttaattactttatagtcattttagtggagagtgtgaggaaataaagctgctgggtttaactgaacatctttcataagccatttaaaaatcttgagacaagaaacaggcaagtttgtaactgaaatgcttttctgaaataaaaatgttgcttattttttaaccagttacgcatttaatatccttaattttttaagattttaatgttttaactctgtgcagtagagcatctagcattttagctctattttctttattcctcatgttctaaaagaagcactcttgattccaccactcacacaaaaagtgcaatcagagcctgattggagggttggcaggctctcaaattgagtaagtacatttgcatattagaaggaacaggatttactttatagaattctctaatatgagtaagattaagatttttttcacccaatccagtaagcaacaattgggccaaagcataacttatattagtgctgtttgaagttaagatgttttgtttttttcaagagtatgggatgtgtagcgttttttgactattgaagtacaagatattattcaagtaaaacatttttcccttttcaaaataatgttgctataggaaagatttcgatgaagtaatgtaagtaacaactcttaaatatatatcaggactttaatatcggaaatgtaattcgtttcctgcaacatgaatacttcataccaagcttatagttatatagataatttaatttatactttaatgttttgggttccagtttatttgaagttaattcatttaattatttgtgttttgggtacttcatgggcatgtaccatttatcttaaatgctttccttccacaggagctcaataagtgttgatataaaaacaatcatgttgtgtatctctggcgtagtattttgaacattgtaaagcttaataaacttgtcaaattaattaaagcatatcctgtagcttttgtaaatgcctcttaaaataaaaatttctgaatatgaaataaaccagatttagccaagttactatatcattgcataaaaacttcttggttttgaaaagctgttttgacagtaacagtagcaaataaaatattttttctcgtttgatatgttattgtttaaaaaagataaattctaacctaatgtagaccacatataatgaacacgcaatttggagtattaaacattttattaattgtaatagattatgaaatcctgaactacttgtattgttacatatttagtattttatattttaaatgacatttgggggaaaaaaactcaagagtatgctttgactaatatgtttatattctttccaggaaacttcatatgactcaccaattttcagtttagtttttgatctctattctatacctagaaaattttaaattccttaagtattttggtgtcaggaatcaaaggtagaagcaaacttgcagaggttgattctcccaggttctataaaatgtacaaaatgtagtggatcatttcataaaaggaatgggtgtggactcaaaagcaccaggccatttgattatgatacatgaactgtagacatatggctgacaagaatcttatctgtttaaaatacttagtgcaaagtgtattactgttccatttatatatgatcaaactaaatgctttagttctggaggtactataaattatatgatacattgatggattgctttatcaattgtccagcttttctcaatcagatagcatcaggatatttttctctataaatgaaacctctaaaaattttcacatttaaagttagaactagctggatgcaggtggctcacgtccgttttcccaacactttgggaggccgaggcaggagaatcccttgagcccaggagttcaagaccagcctgggcaacaaagggagaccctgtctctacaaaaattaaaaagctcgcctagcatggtggctcatgcctgtaatctcagctactcaggaggctgaggtaggaggatctcttgagcctgggagatcagggcttcattgagctatgattgggccacagcacttcagcctgagtgacagactgagaccctgcctggaaaaaagaaaaataaaaaaggttagaactgtatttggtttgtaagacagtaaagatgattttattacctattgagatgatgacctggaagttgaaataccagtgggcgatacagcacatactaaagagcagcttacaatacgctgtcacatatctcatttatttacaattgatatctgtgcttgcattttgtaaatgtcagagccatataaatatgtctgagtttttaaaattataataaaagtctgggtagcattcttgaaggcacatatgataacatgccttggatctttctgaggctgtaaacctgagatttgtatgtaagatgttcttaaaaatggactaaagagatatttatcactttctaagtcttaatattagtcacccttttataagatattataattatttaaatacaaagggttatttatttatatttttctataattgaggaataattattgtgctttgagggacattttcattctctttgctttaatgttctaaacatgatttaaggttctcttcaacagatttccaataatctttgcttcagtgttatgagtacttaaccaaatataaaagcttaccaaattcgtgcccaaatgagaacatatgcttcatttttattttactatctgtcatattcatgaagatctagataggatatcctaacaattgggttaaggctatttaaaaaattaatttggataacttagacaaagaaggaaaattgtttattttatattaagctctgtattactggggaaagactggtaaatattgagtgggaatgattaattggatttgctgaaaattattttcttttaaagcatcagtatatagacagatatagaggaaaataccaaatgaaaataaagtggcagtgatctcaaaatgggtgagaagtgatgtagagggctagcattactagtagtggctcttttagtagtaaaaactaaaataattgacatgaaaaagatttagccattaaaaaatatagtttctgaaccatagcttcctagcttttaagtatttctttacttaaaggaaaaaaagttaattatttgatatatttttaaagtatgcaggtggaagatgttaatatattattgttatatatgcacaactgaataactgaagtcattgagaagtgttactatgactaccttttttggtaaataatgattttagtggtgaaagataaatggcagaaattgaaagatttaattaaaatacatttagttcatcttactactttctaactagttttaggtagatattaaaaatgtgaataataaggccaggcctgatggctcacacctgtaatcccaacactttgggaggtagaggcaggaggatccctgagcctaggagtttgagactagcctgacgatatggtgaaaccccgtctctacagaaaaaaagtacaaaattagccgggcatgatggtgtaccccatagtcccagctactcaggaagctgaggtgggagcatagatttagctcaggagatcgagtgagcgatccatgatcatgcctttgcactctagcctgggtggcagagtgagactcttcctcaaaaaaaaaaaaaaaaaaaaaaattatctgtatgtataggacacttaacctatttattcatctggtatgttttatgtcatgctccctaatgtgtatgatgatataaataaatgttgaagaaaaattttaaacggatagtctttggcagattttttacaatgtattacatagacaaagaaacttattcttcatacttcttttattttggcggggtggggggtctttttctcaagttagctttctgtcatgcaaaacacaaaaggtcaagcctattgcattttacattgccaaacttttttctctagtattttcaccaaatactgcctctgttttaaataagctagtcttatcactgtcctcaaaaattgaaagaaaaaaaatgaagaataattgaaaacagtgattcaagcaaatacttctatactaacgatacaatgatcctaataattgcagaattatttatagtagataaatagtagatacttagtatctatgttgtgtcagaaaaaggtgaagtctattttagataagctagtcttatcactgtcctcaaaaattgaaagaaaaaaaatgaaggaagaagaattgaaaacagtgattgaagcaaatacttctatactaatgatacaatgatcctaataattgcagaatcatttacagcagataaatagtagatacttagtatctatgttgtgtcagaaaaaggtgaagtcctcctagcttgctaaatgactaattcagcttcccacatatcttcctgacattaaaaaaagacaacaacctgtgtatctcttcagcttaaatttagtaaaggtattcattttagctagcaactttagtcattttgttttcaagactgttttgggctttctggaaggccaaaagtataggatattttataaaaacatcattcatattttaagagtgtacattattaacattcaaaagataaatgaaagaaaattattttaacataacattttttattttatttcgttttaactgtttatcttgataagctgtattcaatacaagtaattttggagttttaagtataaaagccttcaagaaacatagaactattattttagtgaaaagaatgaaaatcagtagcatgtttgttttaattcttttttccatatttgtataatattcatatgcttcatagttttataaacatatgcagatgtgcatattttaccacataatgtgctccgagggaggcagaataggtgttgaggtgcgatgaggtttggtaagcttttgttactagtcagttctccattttggctttcttttctgaaaaattttttatcgtgttaaaatatatgtgtgtgtgtgtgtgtgtgtgtgtgtgcgcgtgcgcatatatatatatatatatacatataatcacataacatttgtgattttaccattcttgagcgtacaattcagtgtcattcagtatatttacaatgttgtgcaatcatcaccactctccatttctggaactttttcattgccccaaacagaaactctgtacacattaaacaatatctccccatttcccctttacctagcctttggtgacttgtagtctgttttctgatttatgaatttgcctattctagatactttatgtaagtggaatcatacaatatttgtcctttttgtctggtttatttgagttagcataatatttacaaggatcatccttattgtagcatgtatcagaactttgttccttttcataggtgaatagtattacattgcatggattaccacattttgtttattcattcatttgttggacacttgtgttgtttccacttttatttactgtaaataattctgcaatgatcattaggatacaagtatttgcttgaatcactgttttcaattcttcttccttcatttttttcttccaatttttgaggacagtgataagactagcttatctaaaatagacttcacctttttctgacacaacatagatactaagtatctgctatttatctactgtaaataattctgcaattattaggatcattgtatcattagtatagaagtatttgcttgaatcactgttttcaattattcttcattttttctttcaatttttgaggacagtgataagactagcttatttaaaatagaggcagtatttggtgaaaatactagagaaaaaagtttggcaatgtaaaatgcaataggcttgaccctttgtgttttgcaagacaagcttttgcaagttttgcaaagttttgcaagctagttttgtaagactagcttatctaaaatagaggcagtatttagtgaaaatactagagaaaaaagtttggcaatgtaaaatgcaataggcttgaccctttgtgttttgcaagacagaaagctaacttaaggaaaaacccccatacacacacaaaaagtcattgtattgtataagtaaaaagtctaggaatatcttgattccccagggcttaaatgatgtcatcaggactttgtttctccccaacctcttttcccatttttcagctgtttatccttcatgtcacttcagaaagaaccccttaaaaagatagataatagttagaggacagagtcttagttcttaaactggtgccttattgatctgacttgggacacagaccaacatgaaatactaatctcttttttgttttaggcagatgtggatctcctgattggttaggcttgggccatatgctcaccctaggagacaaggtgcagggtgggggttatcttctggaaccacagggacaagagtagaaaacaatagatgttacatcagaaaagattatattggacaatgaaaaattctcctgtcaaaatcaatggaataaaaagattctctttagtatggttttctgagattctttgtgcgtttcattttttcagtggatacagagaataatggttttttgggtttttttaagtgtttgtacacctctagcagtgtaggctctacgaacactaagacatacataatataaatcgcataaatttgaaacatttgagaaatgtctgtcaccctacaaatgtaggtacatcacataagcactagagctgaaactaattgttaatgtaccttgcataccttgatgcttctgggttgatcttttaatttattagcacttttgttggatttatatgcaatatttatttccatatttacattaagtgggtttaccatactgaaaagttgatttcaacattaggttgactattattcaaattagtcatgttggcacattacattctaaactataatgtagtaatttaattttcctttgccctagaaatgtttaaaatacacatccaagtattactggcatatctgatatactcagttagggttacttgaacttaagttttcgcttaaatgctgcctcatggctaaatcagaattgtgagttgccaacttaaaatagaacataaaaatatggtatgacttataccttgcactgacaccttttggaggacgttttgttcttcaccaatcatggactgtctaaacagtgatatctatggcttgaaaacagtttactcacatacaggcagttagaggtgctggacgctcccatgacgtttccatttaagcatggccgggccaccctgctatcctcttaaacacactgaaggtacctgaacagggtaaaatgtgacagccagggcaggagagagctccctttctttgtcactggattctttgaattaaggggaactgactgctttagaaagactcgccaacctagtattggtaactgaagatcatcattttctagcaacagaaggaagaccatgcatgcgcttcaaagccaacaaatctcccaaagcaaacaccagggatcatgcacacaatgtaattcttaccctcagaaattgcccccttgcagctctatatagataatcctagtgctagataacgcaattagaaaccctatgtataaaaccataatcaatcaattatattttcaattttgtttgtacattttagaattacccccagtattctcttgggcttgtggttttctgtatttgaactactctttgtctgtttgccaaattttttacacacagcgctgatgtgcatagtgctgaagttgtggaggtctgcttattagttacactgtctaatgagggcaggaatggggttcctttgatgatgtgtcgctagcttttggcataggtcctggcatttagcaggcattctgtggctagctaaggtctagtcaggtgtgtgtgggtatgtgcatgcatcggaatgctatgcacagatggacgtatttaatcctcacaatacctttatgtggttgatatgatttctctgctggttttatagatacagaagctggaacttggtaaagtgcagtattttgcctgagatcttagagctagtgattgatataattgggattcagcatcggacttcaccccagatcttgtaactactccgctacagagtctctataaatgttcactgaccagatgctttgctacatgaaggaaagaaccaggatatgctctactatactattcggtttccatctttgcacccagttctgatcaggatagagagtgaaaagtacaatggtacctctgctgcagttctctctgccaccagccaacccttcagtctgaatttgctctgttccatattataagccaataattaacctgagtaactcagttttttccagcatttggttgggcatctacgttgttcagaacaatgtgctaggttttcttggagataattaatatttggaaattcgcagtctcttattacatacacacatatatttagggtatggctgattctgtaagtatagaaaaaaggttaaaaaatacatgcacacatacacatatacatacatactctgaatattggaaaagcttaattttaattgtggtggggtggaagcatcttagaatgtgtcttgaatgatgaggcatgtaagaaggtaaattcccttggtgagcacaggccaggcaggattacttctacccaggatgtttgctaataatttacagctggactcctaagtaacagagctgattaaaatattactcagagataataagtgtatcaaggtgtgccaagagttgtttacaaaaaaaaatcatttaagaatttactataatagctttggggaatgtgaaagaatgcggaggtaagcactgtcagcctattcctagctacctaatcatccagtcacaaaatatctggacttggatgaggaattatctttaaataaataaaatcttattaaaacaatgataaccttctttaatatacaactattagaaaagatgaaattataggtattttatgaatgttataaaatattgtcagtaccccttggggtgggtttggggggtgtttccatccaagccctttgaaccttttatacactggtctaaaacatcattatattaactatacagtattctcagaacatgtttactataactatacctcaaaacccatgggatgacagattttttaaattactatgttagatattatagagaaatcttaaatgtatgagtaaccttttctgaaaaacaaaagtgggatgaaatatattggtaaaagtatccacttatcttgattattttcattttacaacatacctctgtgtacctttgtgttttattttgcaatctataaagaacttgtccataatcacacagttatcttttcaatattgagatactgtgttttttaaaaatcagtagaggtattttacttaagcattggccaagaagaatgtttaccacatatacagtttatattctttcatgctacaatatttataatcggccgagcacagtggctcacaccaggaatcccagcattttgggagaccgaggcccaggagttcaagtgtatacatatatgtatgcaggtgtggtggcacacaagcgtgtagtcccagtgacttgggagactgaggtgggaggatcacttgagcccagtagacggaggtggcagggagctatgattgaaccactgcactccatccagcctggacaacagagcaagaccttgtctcttaaaaaaaaaatgtatagatatatgtatacacacacgtgtgtgtgtgtgtgtgtgcgcgtgtataacctgaaatgatctagaaactggaaacttcaagtctggttataacaaaaaggtttttaaccctttttttttttttttgagacagagtctcactctgtcaccaggctggagtgcagtggcatgatctcctgcctcagcctcccaagtagctggaactataggcgtgcgccaccacgcccagctaattttgtatttaaccctttcttaaactgtgaatacatgtgcactcaccatcctattttgtatacatagaaagcatggtaaaaatattgaatatttcttttacacaagtgatttgctgtatgttgagcagctctctgggaggtcagattatttacccacaggaagtggattgagtaggaataagtttacttcacagatatactaactactctttttcaccctataacatgttttgttttcttctcaacctatcaagcagatcttttcatgcttttccatggaagagccagtaatggtagtgaagaatcacaaatttccctggatctcttgcctgaagcagttcttcataaagactcttgtttcgtaccgaaaaaaaaaaaaaaaggaaacttctgttctgttatacattcatgcttattttagttcaccaccccccaaaaaaaatttagttacatcaaagctccagtaagatgtgccatattaactcttggggtttatacttgctaggaaaaggttgtaaccctctgggtgtgaataccaacaattacagactgtgtgaacatccctatgccctggatatgtggatgtcataatttgggaagaatgccttataaggttggtcagtattatctagatgtacaaggatagcaaccatgtttcttaatcctaatgactttgcacatagtaggtactcagtgagtgtttaaattaattgtttgtatgcacatttcctcattgtcaatcaagttttgttttgtttcatttttgttaattaccttttttttaaatctttggaataattgagaaacgggaagctgagattagggaagaaggaaaataataaactgaataatagaaataaactgagtaacagagaataagaagagaaaaggagaagaggaagaggttatattcatgagggttgttcagagaaacagaaccaataagattgacatgtgggaaatggctcacacaattatagagactgagaagtcccactgtctgccatctgaaagcaggaaacccaggagtcagcagtgtaattcactgagtccgaaaacctgcaaacaaggccacggatgtaaatcccagtcccagggcaggaggagataagatgttcagctccagcaatgaggcaggaaaaaaagaggggcaaaattttgcttcattcaccttttgttctgttaaggccctcagtgtattgatgatgcccaccatggagggcaatcaaccttactgagcccacaaattcagatgctaacttcacccagaaacaccctgacagacacacacagaaacaatgtttaatatgggtacactttgtcccatccaagtcagcacatcacactgaactacctacagagactcctttgcttttcagccacactggcttttgtcttggttctaaataccctctttcctaccgcatgcttttgcacatgccatttcttctgaataaatgttgttcctttccctgtttcctgagctaacttgtaagaacactatttcatcatctcttcctcagggaagactcttctgaacaccccattagttcatgtgctcaaagctccaaatgcttctctgcagtccttatcaaatttgaattttagatttgtttgcacatatttgattgatgggtgtctcctgcctttggagaaaagggaccgtgtttggttttgctgccagcatagtgaatgatatatagcaggtgttcaataaatttgtcaattgaatttgtgacttgtttaataggggctggtataattacaggagagcattctcatagtctcaggagatcacctaaggtagagaaggactgaagctctgttttccccaccgtatatgtttgggaagatggtgaaattgttagtacctgtgcacacccagtgagaagaacaaattgtcttatgtttatactttatttaaatgataatccttccacaagacaatgactaccgacttggaaggcaagagatactaagtttactaattacttaaacacaaggacttctaaattttgtagaagtcaggttattactgtgcttttgataaatgtttttaatatataatgatgttgcgagccaaagcctactcagctgcctggtgagctatacaactctgtgttcccagggaatatttatcaaaaatgagattaattttaaaagtgtttttctcgtaacacgaaaaagaaaataattaaccttcactgtttatattatttaccttagaatgccagtgtatgtggtattgggatacatgtctatataattaaactagcagctaaggcttccatattcagaattaaggttttagcagtagaaggaaattagttttgactcttcacttttactttccttagcagtgaacagggagatctacatgttttttatgtttttaaagggaagcaatactggttttaatttctcagaaaatttcctcctgacaactgagagcaaaggaaaaattcaatacattttagcacctgattatgttcagtctttttctaattatgtcctgttctgcttggagtgtatctgtgacatcatggaacttaaaaaccatactgtaatttaaacatctaaaattattaataatattgcccctttataatcaccttagcaatttgggaacattctgaagatgctggttattaaaatttttaatctgcttttcaactcctaaggctagttcttttgaatattctcaatggtggcagatatttgtcctattagaatgattaaattcttggaaataggagtaaaaggcatttggaggtattctttgtcttttgaataaatgtaagtggtcgagccttcttgatttctttaagttttttgtagaaattatgctgtaaatcagagatttgtcgtgatgatgtcaggcattgagctctttatgtgacataaagactccttagtttccaaatttttttatgatgcctatgattaatgtttggacttgtgaaatttggcactactcagttatttttaaatcagcgatggcctcagtcatcactttgatgaaccagcttggtcttgatatttttaaccctaaacttttgtgctttctttctatgttaactaaaaaaaaaaatcctgtgtcatcactggctatttttaagtttccagtgaacaatgacaataaatgtcaagtcttttactcattgaaaatcgatgggctaatttttcaaaacaagattcctttccaaagggttctatatacttctaactcctcagccatgaattgtcttgtgactgaatcagatatctgatcttgccccataaggattttacctcctgctgagggtgtttctatggctgttttatgcaccatcattattgtctacccagttaaaccgtgctcttgacattgcttcgtttaatcttttcctgccactgttaactcacttgtcaatatgattaacattactgaaaatttgatattagctatgtaattatgaaaatttgatattagcaatgtaattacagtgttacaatgtaatgtatttaatatatatcttcttctaaatgcttattttcataaattttgttttataatatcatcctagaaatcttgtcccactgacttttctccttactattaggttgctatatgcacttttaattcttttaactgctgcattttatccatatgctttggtcatttctctgttggttttcctgaccttttcttgataaattgaaaatgtgtcttatgtattatatttataaatcttttgtagtcttttgttcctgaaactaagtctataacctgttaactttgtgatgacctttgttgatgtagtcaacaattttcccattataattcgtgcattttagatctttaataaattctgcttttcactgaagtcgtaaagatacttttgtacatttccttctattagtttatagttttatcttatatattcaggtattaaatttttccgatgtttttctgacttaggtagagaatcaagttctacacagcgagtccgtttttccatcactccttaataaatagtctatcattttccactggtttgatataccaaatgtatcatatcatgagtatgtatatatattaggttggtgcaaaagtaattgcagtttttgccattacttttagtggcaaaaaccacagttacctttgcaccaacctaatatatgggtttgattataacttgtagctttattcttctgcaccctttaacaggttaggcttttaattttctctccagtactctgagttccctctccttgtgtatgatacaatccggaaatttgctatggcacttgcagagctcacctcatttttacgttctttcagagttctctgtccttattgtccaaagtctgaaaacctttgtctcatgttttactgggttttctgattgtttaaggtaagagggtaaatttcatacctgttattccaccactgttgtaagcagacattcattttttaatttctcagtagaatccttagcttgcttattttcattctttcattagacgtgaaaaaatctatttaaatctctatatcatgccctactgcttttagatgcagctcacacagcctcggacatgcagaactctcactgtcattcagctcttcagtgttttgtcatttttcttgctagttcttgcttgttccactttatttagctgtgagttcatttaactatttttttcctgacatgcttttagattcctttttattactaatttaaaattgtattgaattttacttagaggttgcataggttgattctttggagacttttttgagacgtcctttgtggtctaatacataaaatattcatatattcttgaaaggaatgagtaagatttattggataaagtttttactgtatatacatatattttagattgttactggtgtcattcacattcttttcatattggcttagttttttctacttgatacgtttctaaaagatgtattacaatttctaatgaaagattatatgtttctccccacatttctgtcagttagtagttacatatcacatgtatgtatacttactagtattatatcttattaatatattattcttatgaacaaattatgtatcttttctcctgaaattgcttactgtactatttaaattgctacttaatatttcatttggttaatacttatgtattttttgtccatctcttccatcaacctttctttgtcttttgtggacaatttaatgctagattttttttttttgtaaatcaaatctaaatcagtcttttgatgactaaatttgaaaaatatatgcttattgtatttattattgtatggaggcttatttctcccatcttattttagtttttattcatcgtactttattgtttattttttcgatcttttctatgttctgtcatgttgacaactcagattttaaactttttgtttttaagttacaaggtctattgttctcttatctctaacttaagattcattgcatttgtttttttcttccaatgtgtaaaagttaatctgtcttcccctgcaataagaaacctcagtagtctttcaactcactcctctactatgatctctttttctttcatgttggcatcatctggagttttcattctatatgttttttgcttactcaggtaacaataaatttactaaggtatttactctccattggttaccttatctcttggctttctctggaatgcacttctcttcttgttggaacacatctttcaagatatctttcaaagaggactcatcattatgtgatatactttataagacaaagaagccactagtacttcttcctacgccataaatctgtggtcacatataaaactattctgtttctttactcatttgttcaacggctatgttgtatgtaggccacgtacttgtcctagacctgagaaaagaaagtcaacaaaaatctttgcctactaacgtttacacaagacacagcagggaggggcagaggatactcgaggccagatcagcagttcctggcaatggccccacactatggcagggctccagagctgccaggatattgccatgtagtttctggatggcactgaacaggttctgctgctttctcattataataactgggcaagtgatatttttactaggcaactcagagaaaaacaggccaactagagagctcttcccaatccatccctaatctgtggctactgaatcttcctcgattataacttttctatccatattaggatattaggataacttcttcctgcttccccaaggtttcttggctgtagttgtagtgtttgttttatttgctaagtttggttctgaaaactgccaagatcccatattgtttgtagtatctctgggatttggctgggaaagtaatccgactacccatggtagttttccttcttgtccagaattgatagtcctcacagaatatattattattattatttactattattatgggatgtgaatgccaatggcagtcaatgctgagagagttttcacagatgattatcaagcacatccttaattttaaagagaacatctaggaagctcaattatatatgtggtctgttagcctataaatgatcagaacctttggaaaattatatctattgaattcctaggaaggttgatcattgtggggaaaaaggaactgagtggaggagctgaggatcagggtggtcctgggccatttctacctggttccaaatctggttcagcacctacttccagccctcatgggagtcagaagagactgctgtgtggtaagtgtcagaatcagccctgaatttctgaagaagcaagctcagggagctctcataatgattactacataaacaaaccatactgtccatctgaaagcatcctggcaatgtgtcttgctcaccttctttgattctaattcctttcctaccctgtctgttctctcctaatttttagacatacccccaccgtctttggctcattgaatttccagctaaaggaacctaattttatatttcctattagtttggtggtcagtaatttctttgatactcagaaacttctcagagcctatgtctgggaagggcaccaacactgcaaaagatagtggaaacagactttgtcctgatgcattcagaaaaataaggggaaaaatgtgaatttggggtactgtacttacattgaaagcaatgtcagttgcaggctgaaacaaaagccaaggaagggtaaagcctgtattaaatccccttttatgattccccgacactttttttcttttgttctctaacttgtattaaatctgtttatcatagagatagacaacaggatgagattacagtatcctaaaacaacaaaataagatacatgactgtgacaaaaacaatcgttacatttagtgaccaaacaacaaaatagttgaacttaaaatagtcttaagtgaaaaagacattggtggtattccaaagccagctcacttaagcaaagcgtgggtattaatttttaaaaactcattttttttaagataaatatagtcgtgttcttgccaaggccaacattttcatgttcactctgttaaatgctgtgtctagcaggaacacatattagagtgcaaagtaacttaagctcttgagagattgatgagataacatttctgacctaatttttgtttgtttgttttgttttgagaggaagtttcactcttgttgcccaggctagaatgcagtggcacgatcttggctcactgcaacctacacctcccaggttccagcgattctcttgcctcagcctcctgaatagctgggattacaagcacctgccactacacctggctaatttttggtatttttagtagagacggggtttcaccatattggtcaggctggtcttgaactcctgacttcgtggtccacctgcctcaccctcccaaagtgctgggatcacaggcatgagctaccacacctggcctacatttctgactaaaatttaaaattttagccatgttatcctccctttgcctaaccaattaattaaaccacacatatagtcatacatagcccctctggttgtagtagggaatgcttttcctatcagaaagtcttagtgaatcataacttcttgaaattagaacctgagtcctgcagctgtccactttttctgtgggttcccaaggctgttgatttcctctgccataacagatggaatgcaagagaacagaagagaatatccatctaacaggaggcaagcccattagtattccaaatgtattcatatattaaagccaggcaatggttacatctgaaaaaaattccttagacttatcaaagcttcacctataacacataggcagcttgacaatggttatatcctcaaaaaaaaccttgacttttctccaagtattaactttaccacataggtggttagagcatcaatgcatagtttatcatctgtaagtatagaagaaaagaccttttgcttcagagaaatggttaagttataaagatacagatatatttattaaaatacagccattattaaagatggacatgcatgtcataataaatagtagcactttctagggttgctagggtgtttgtgcttcatttgattattcaagatggaaatgtgtttgtacatgacacagtagatagtcctgcacgaggaagcaggggacagggttctagttcttcttctaagggctgttgagagagtcaaataacactaatgtatctaaggacccttcttaaaaaggtaaaaattgtagtacttttttaaaaaagatatctatgatttatttattactttcacctgggaacacggaactaggagttgaatgggaacatttatggattacctgtgtatccagggaggcacactctatgttatttactctcttaaaaaaaaaaaaaaacaaactgtaagaagagtaatgaaaagaaaacggataactcattgagttcccacactgcaaattacctactgtttctcgtttaattctcagtaaaatcctatatgtctcactagcaccatttaaacaacttagattaaataaattattctgtgcagaacacttagtgggggctgaaattaaaaatcagatccccttgactaccatgacttcacagcttaggctgtttcacattcaccttatttcagaatcttcatttctacataaagacttgcatttattcataaagccaacattgtgttttgataactctggacatgtttataacaggtctgtatgtatttaatgagtgttctgaaatactatggcaataaattaaagatgaacatattcttctgaaatattcatggtaggcaaaacaaagagcaccaaatccagaaaaattgaatggcgatttttttttccaccttattgacaaatgcaagctgttcatattttgttatttggtgaatttgctagtcccattgtaaatgtcatcctcctcaccctgtaaaactgattcagagaagaaagcctatttaagatagaatttagaaataagaaatgacttataaaagaattatatgattaggaagtattgtacatttagacctcacaacagtgtataatagaaaaattgtagtgtaattatttaatttttatttggaaattgaatgcaaaatattcattttttcaactgttattaatctctatcctggaggtttccaaacatgaaaaatacatatatgtcactgtattccttgtgagcacaacttgcctctgctcccatgaaattatacccttttaaatataatcaagtaaaaaaaaactctttctttatgcttattaattttttaaatcctgatatagcccatctctgatatgtctgtattcttcacgtatcaataactgttcaggccatattaccagctaagtgcccgttctgaattgccccatagagttgccttccatcttcctcatgcttttcatacaaggtctgttttcctggtcctcccaaataccaaaccctgctttttaccttacctctatgctcaagacctgacagtaattgtggtgtaaggaagagtgtgggtctggatataagggtgagagtgaaaacccagcttaccaccatcaaactcttaacaccaggatcctggtacttttgcatccctagtttcttccttatgactttcatctcacctctgcccctcctcatcctcctcagccacatcctggctttcttcccctcccctccccgccttgcctttcttctcctttctctccttctctactaacacaatctattgcttcagctccaggtatttctttttcctcgggttctgaggaacaaaatgcagccacacagtttcctctgtactcataacaccagagcaagctcctaactctgtagttgtctggggggttttattattaaaaacattaggaaataatggaataattaacaggaagaaaacagtctctgtactcataaccccagagcaagctcctaactctttgtagttgtttggggggttttattattaaaaacattaggaaataatggaataattaacaggaagataatagtctcatttcaaggattaaagttgttacctgagatggctctttgtgtatccagagatacaccattagactctacatcactatcatgcagctttttctgtctcctcattgtcagaataaattaagagaaaaagtgaaatctaggaagaaaggggcccgctctctccgatcctggtaatagataagtctatgtggttcttctggccagggaattgtggttcatgaattttgcatccctgagaagttcctatgtggctcccaccatagctgcaatagactgaaacttttggaggcgtagttgtaaaggtggaaagtgccgggaaaaagaatgggtgggttgggagcattgattctaaggctccattctctttccagtacccaggggaggcaagaacgctcagaatgaagcagagaaagtggagaatcaggcaggttcattccagtggcgtgtaagataatttaatccaagacatgtgtccaatccacatactttccagacatttacagcttcctgtttcacaggtcagagggctttctgcaggaggatggttggtgagatgcacctcattctatttccaaagtaatgggtaggtgaattgtaatctatgggtagaggaattgtaatcttaacactcaaaattagatcatcgtttaacatacttttccattaaaacatcactctacattatgggcagattctatattagtagtatatatcaggtacattatggttttgatagagttttgtaggaatcctagggcactgaggtccatttttctgtagaaaactcttcttgagtgctacacaaaaagatttttggagtcttataaattatggattggcttgtaaactcaaaaaatattttctctttcttcattgagaaaattaggaaaatcagcatgaacaatttaaatttgctcactacatctatgaataatacatatatgttctctttcatcattttgcatgtgggtggattatcatggaagtgaaaatatttgaaagactaaatacaaatctctacttgtaagagctaataagtggctttcttatttagaagatttgtgtgttattttgaaatacaaagaaaattacaaaggattactaaaatgtagtaactacaactaattaagcatgaatatgatagcatgtaaatacagtcaaacttctacttatataaattgatttatgggttaatttgcattgtatcttctaataaataactcactatatacactggaaaaaatctaagagacaaaaattggagcaactgatttttctatttataaaaagaatcaaataaaaatatattttgcttcctaatggaccttgcaaaacaaagtttttttactttatcttccctcataattgttttgcctgttttcatacttcaagggatattgggcaaaaatgttactgtcaccatctccactttatcaacgttcaatttaaaataatcgtagaagacctatgaatcccccacatttaagtagctctcactttaataagaattttagtaattgatttaatatttacatggcctgaataatgcaactgagattttctgcctccaccccatcctcatccttttggttgcctggaaacatacaaccaagtatagacccagcaggacagaaaactaggtttaactttcacagaaactgatgaaataaaatggtttctttcaagttaaaactgtttctttcaagttgaaactgtttttttcaagtttcatatttcagtggacaagtgtgttaaatgctgtaactttcccctggataacactggggaaagttatctagtgactttcatatctattgtgtgtaggtatgcatgtgtacatataaatgtgcatatcaaggcaatccccataaacagcaggaggactgacaatgactgacttctgatgaaatttagtttacaagcttgtctagttattcacacagtgatttggtaataattcaggtagtaatttgcccatagcctcaatttctttcctaataaatgatagttggaattactgacttcaagaattgaaaattgggattattaaacctataggaagctgtgctaagatgaactcagttgaaaacaaagttcaaagttctgtatctgcaagaattagattttgtccaacataggtgaattttattacaaacaagtttgtctatcgtgataaagttgtcatgtttttagcatttatggtgttttacagattatgagagtcctcttaatcagctgttatatttcaatagggaaacaaaattaggaatatactttttataccaaatatagtgtaacctgacagaaatttttagtcacagctaaagaggtgttaaaattttcaaaggacatctcatctgtgagagacagtagaataagttatccatagaagtgtagtttttttttttttctgggcattttaataaaggcctagtaccttttgaaggcctgtttcaatttgtggcagacttttttctttaggttaaaaagatatacatgattgcttcctgagatttctctagctgtgtgattctgtagcatgttttaaaatattaatgtttatagacataagatgtcttaaaggatagcatcctatattaaaatcagcagcatttgcaagactaataatgaggaaaattcactcatacacatttactgtactttgattcaaaatgccttatttacttaaaggtagtattcttagaccatatttgtaaatgagaaagagaaaaatgccacaaaatgaagcaactcttctagaaacttaattaaaatcatgatgatacattcagcctggagtttagttttattttcagctagtcatctgcagccatgcttcccacagaggaaggttgccaggcccacagcgcactgtgcagcttggatgagcagtattacaggctgtttatgagcagattacatctgggatctgtggagagcagccagagcagcaagacagagatgatgaatgcagggtgtgttctaggtagattttctagccaccaaaatgctcatcacttttctttagtacagtgttcagagtattataaaaacaaagcatttttcttagttgttcacagtaggaccagcaagttactctggtttttaaattctgattttaaaattgttcatatgaacagaagtctcattctgtgggcatatttgtgcattcttcaagttaatttggtggcttgtcactaaagcagtaaactagttttagctctagcaactgaagcagccattctacagttgagattgggatagtttgcctgcacgtctgtatcaaaaagtggcatgccttatgtgtgtgtgcatgtaccatgttcaagggagcagctacacaatgacgaggcaatgcagaagacctgttcatccaggggcagggcacatttccatcttgggatataggtattcattcaacaaatatgcactaaagaagtagcatgcacttagaagtccagatattaaaataaatagaacattttctagttcccctgtggcttgtagtctagtttacttggttgcagcaaagcagggcatataaggacaggctggaacctgaaatgagctctgtcttccatgagaagaaggcacgtgataggacattaaactcatctgcaacatctgtgtggatatccagtccagtaaacaagagctttctccatggaaggtggcaagtggcagttggcatatgaaagagagagtgtcctaagttaaggtcttgaagtataccataagaaaggcaatatgcagaaaacagttaacatggcaggcctgggactactgtccttagaaagacctgctcacaaggtttgcttttgcctggagtttgagaactgaataatcaacagtttcctacactgatataaaacttttcctaaatggcaagagtggttcactgtgtctaaactacaatgtggtttctgctgaacatctgccttccatttggctacatgctgggcagaaggtgcttctacgactagcccccagtaaaaaccctgggcactgaatctttaatgaacttccctggtaaacaacatttcttgccacaaattattgctaaagaaagaagtgcatcctgtgtaacccaatggtagaaacccttggaagcttgggcttggcttcctcaacttcaccacctgaacctgtgacctttgctctgtgttcttttcctgtgtataatcagtaagactgagggtggtcttgggcacctccgacacagacagaatctagattgcaagctgttaggtagctgcaggaaatctgataaatagcagtatcctgtctgttgttctttagtccaaatatgagactccaagggatatcagtccagtttgataggctgcttcatcacgtccccagtaaatataagaggccactcaatcttccttcttttcctacccattagttttgagtgatagaaaacttaagctaaatgggaattatttgattctcataactgaacaatctaggaatagagcttgcttcagttggatgcacagctcaaatgatgtctccatttctggggcctgctgcttctttgctggttatatatatccttgttatcagaagatgcctgtagaagccctaggctcacattttccctccaagagggaaaagccagagttgaaaactagaactcatgagtttggtttttgccacgtacctacctctgtaccacatacggagggaccccagaatcttgtcatgagcttccctcactcttcccaaaaacacagggcctagaatggcatttttcagaagttgagtaaagagatactggggggccagaatcacagcagatgtttactactcccattacccctatcaagtaagaatcactagtttacctgataaattttatgaatatgtcttcaatgtttgtacaccttttggaaaaatgcttcctgaaatagctaatctgtcagatatagcattttgattaaagtaccccatacatagattagtgcccatttctgaaatcctctttttgtattccagtgaagtcctgtatctaaattcataggatagatgtaatattcaggttcataatgctattcagattttctgtatgattaggcctatgcctatcagaccaatttagatttcagccttgttttcctatctagactcactaattggactcattattacgatgttcctatggccttttaattctgagtcatactcatattactcatctcctgagcacagtaatttaactttccatcaccttgaagaaaggagattagctttttatgaacaaacatttcctggaacgtagtcaacagtttgtgtgcaactcaacagggaataagatgcaactcaataaggaataaggtaatgacttcttaagagaatttatttcctggttgcttatttctttgagtttgaatgtgagactgctatgccactcacctcattcatagtagataactaaaactatataaactatgtaaatataaaattatttaaatcccattatatctttttttaatcttagtgtctaaaggtaaatgaaggtgacgcatttgggatattttagttataaggcagtgcaaaaagaaaaagttagcctttaccactgaaatgttcaaactactttagacacatctttttctagatttcacttttgtgaggacaagataatttcttctcatttgtgattttatttttagtacacctggtagtgcttaaaaacatgagatcttccatggtgtatatcagagatatgccactgtttaatttattacaagaagtatgaactgagtattgaaataacattgcacactgatagggagagaagacacatttcaagtttaaaaatagttctcttcatgtgtatgtacatatcttttcactcttcttttttttaatttttattttattattattatactttaatttttagggtacatttgcacaatgtgcaggttagttacatatgtatacatgtgccatgctggtgtgctgcacccattaattcgtcatttagcattaggtatatctcctaatgctatccctccccccaccccaccccacaacagtccccagagtgtgatgttctcattcctgtgtccatgtgttctcattgttcaattcccacctatgagtgagaacatgcggtgtttggttttttgtccttgcgatactttgctgagaatgatggtttccaatttcatccatgtccctacaaaggacatgaactcatccttttttctggctgcatagtattccatggtgtatatgtgccacattttcttaatccagtctatcattgatggacattttggttggttccaagtctttgctattgggaataatgccgcaataaacatacgtgtgcatgtgtctttatagcagcatgatttatagtcctttgggtatatacccagtaatgggatggctgggtcaaatggtatttctagttctagatccctgaggaatcgccacactgacttccacaatggttgaactagtttacagtcccaccaacagtgtcaaagtgttcctatttctccacatcctctccagcacctgttgtttcctgactttttaatgattgccattctaactggtgtgagatggtatctcattgtggttttgatttgcatttctctgatggccagtgatgatgagcattttttcatgtgttttttggctgcataaatgtcttcttttgagaagtgtctgttcatgtcctttgcccactttttgatggggttgtttgtttttttcttgtaaatttgtttgagttcattgtagattctggatattagccctttgtcagatgagtaggttgcgaaaattttctcccatgttgtaggttgtctgttcactctgatggtagtttcttttgctgtgcagaagctctttagtttaattagatcccatttgtcaattttggcttttgttgccattacttttggtgttttagacatgaggtccttgcccatgcctatgtcctgaatggtattgcctaggttttcttctagggtttttatggtttcaggtctaacgtttaagtctttaatccatcttgaattaatttctttgtataaggtgtaaggaagggatccagtttcagctttctacatatggctagccagttttccccacaccatttattaaatagggaatcctttccccattgcttgtttttctcaggtttgtcaaagatcagatggttgtagatatgcagtgttatttctgagggctctgttcagttccattgatctatatctctgttttggtaccggtaccatgctgttttggttactgttgccttgtggtatagtttgaagtcaggtagcgtgatgcctccagctttgttcttttggcttaggattgacttggcgatgcgggatcttttttggttgcatatgaactttaaagtagttttttccaattctgtgaagaaagtcattggtagcctgatggggatggcattgaatctataaattaccttgggcagtatggccattttcacaatattgattcttcctacccatgagcatggaatgttcttccatttgtttgtatcctcttttatttcattgagcagtggtttgtggttctccttgaagaggtccttcacgtcccttgtaagttggattcctaggtattttattctctttgaagcaattgtgaataggagttcactcatgatttggctctctgtttgtctgttattggtgtataagaatgcttgtgatttttgcacattgattttgtatcctgagactttgctgaagttgcttatcagcttaaggagattttgggctgagacgatggggttttctagatatacgatcatgtcatctgcaaacagggacaatttgacttcctcttttcctaatataatcccctttatttctttctgcctaatcgccctggccagaacttccaacactatgttgaataggagtggtgagagagggcatccctgtcttgtgccagttttcaaagggaatgcttccagtttttgcccattcagtatgatattggctgtggggttgtcatagatagctcttattattttgagatacgtcccatcaatacctaatttactgagagtttttagcctgaagggttgttgaatttggtcaaaggccttttctgcctctattgagataatcatgtggtttttgtctttggttctgtttatatgctggattacatttattgatttgcatataatgaaccagccttgcatcccagggatgaagcccacttgatcatggtggataagctttttgatgtgctgctggattcggtttgccagtatttttttcagcaccaccccacacctattccaaaattgaccacatagttggaaggaaagctctcctcagcaaatgtaaaagaacagaaattataacaaactgtctctcagaccacagtgcaatcaaactagagctcaggattaagaaactcactcaaaactgctcaactacatggaaactgaacaacctgctcctgaatgactactgggtacataaataaatgaaggcagaaataaagatgttctttgaaaccaacgagaacaaagacacaacataccagaatctctgggacacattcaaagcagtgtgtagagggaaatttatagcactaaaagcccacaagagaaagcaggaaagatccaaaattgacaccctaacatcacaattgaaagaactagaaaagcaagagcaaacacattcaaaagctagcagagggcaagaaataactaaaatcagagcagaactgaaggaaatagagacacaaaaaaccctttaaaaagttaatgaatccaggagctggttttttgaaaggatcagcaaaattgatagaccgctagcaagactaataaagaagaaaagagaggagaatcaaatagatgcaataaaaatgataaaggggatatcaccaccaatcccacagaaatacaaactaccatcagagaatactgcaaacacctctacgcaaataaactagaaaatctagaagaaatggataaattcctcgacacatacaccctcccaagactaaaccaggaagaagttcaatctctgaatagaccaataacaggctctgaaattgtggcaataatcaatagcttaccaaccaaaaagagtccaggaccagatggattcacagccgaattctaccagaggtacaaggaggaactggtaccattccttctgaaactattccaatcaatagaaaaagagggaatcctccctaactcattttatgaggccagcatcatcctgataccaaagccaggcagagacacaacgaaaaaagagaattttagatcactcttcttttccttctctcctttcctttttcttccattttccattttatatacaagggtgaagaacatgctaaatatcctatttaaacatccaaaatgtgtgaagttaccccatttgcacatttaatttgttcatgctgtgagagaataattgagagagatgtaagtagtgtgggtgactctggttccattccatgaacacatgccccagattgagcagtcaaatgggagattgcaatctgcagttttctcataaggtctcaatgccttgtatgtctctcatagtgtgagtatcaggctaacttgagtctgattcttcaatttgaagacacagatgttacaataaaaatgtccctaaagacaagccagctattttgcctggtgtttagctgaaggaatagtaatctgttcaatgatagaggggggaaaagcgtggctactatagaactactgagtggcagaatatggtatgtcattctccaaatggacacacaaacactggttattttactttacaggtaaatcaaggattttctagcatgagatttgtagaacctaaacattcccattgtatcatattcatcaccatccatgcttcaccctaatgttttgggcatgtgggtgtataaggcttgtcttatattttcgaaagagtttcttcttttcattggttcttttctgtgcagtaatttgataataggtatctatagtcttaaaaagagacattaaacccatcatatttacttctagaaatttatcctaagggaatacttctacaaatggaaagctgtacatgtatgttcaccagaaggctttaaataagaacaaaaattatattcccaacaacggattgtttgctaaagcctcctcaatataatgatgtactattcagtcattaaaaataattgttatgattaataataactgataacatctcttaagtgtttattatgtgccaagcatataataaacttacatgtattattgtagaagaattcaaaattcttatatttcatagatctacataaaaatgtcttatatattgtatttttatgtattcagtttaaatatgcacatatacattttgtgatttatgaaaatattatagaaaaaagtcttcaaacaaatgtaagtaatgattaaaagtaaatgaaggaaaatgattttttaaaatattttttgttttctaagtttctctacagtgaagatattactccattaggccaattaattgcaaatttaaatgaaaattcactgaaattaaataaaataaaaaattcaccttctcagtatgctagccatatttctagtgctcaagagctgcatgtggttggttcctgccatattggacattggacagagcagataaaaaacatttccatccccacacagggatcgattacacagtggtgcctaacctttgaattagaagttgtagtccaataacaattccctgtagaaacattgaaacatctgcatcctacttatagcagtggaatagctgcatcttttttctgcatgcttggggtaggcagttgggaattgttatgacagctgtctgttaaagaaggggtagtgagatttcaaaatatggagctctgcttgagcttatctttcagatagtctgtgcaggcttgcaacagcataaccacgttcttttaaactgtttgacctaatgtgttttaacatgtgctagtcatgtaggtttcaactcaaaatcctcttttttcatggatggaaagattgagtcctagaaaaattaaccagaaggcagaataaatctcttattctagaagtttcttaattcacaggaacaatgataaagaaagaactatcaactagaaataaccatcaactagtttgttctcaggaaaataagcattgaactaagggttagaacttgttggtctcttcctcagtgttttttcttttactaaacccctcacctccctggttaaaagttagagaagtgaagccatattattacatttctacttcattctctgggaagttcaaattccactaaatgggaaaaggacacgtgttttcactatacatgtaacttgattctagctataaaaattgtacatattttgtcacactattgacagaatgattagtttctcacttaaatatatgcaacttttataaccttttgattatgtgaaaaatataatagaaactgcaagatgttttattagggtatactataaaatacttgaagtcttaaattgcagataacgagggatattaatatttaaacttcattgagcagtgttgttttcttccagaagttatatgtaatttacatataaacacatatacatacatatatgtatacatatatacacacatacatacatatatgtatacatgtatacacacatacatacatacatgtatacatgtatacacacatgtacatacatatatgtgtacatatatacacatatacatatatgtatacatatatacacacatatacatatatgtatacatatatacacatatacatacatatatgtatacatatatacacatatacatacatatatgtatacatatatacacatatacatacatatatgtatacatatatacacatatacatacatatatgtatacatatatacacacatatacatacatgtatacatatatacacacatatacatacatgtatacatatatacacatatgcatatatgtatacgtatatacatgtatacatacacatatatacatatatacatattcatatatgtatacacgtgtatacatatataggtacacgtgtatacatatatgtatgcattcatatatgtatacacgtgtatacatatatgtacacgtgtatacatatatgtatgcatatatacatgcgtatataaacatatgcatgtatgtatacatatacacatgtatatatacacatatatgaatgtatgtatacatatacacatgtatatatacacatatacgcatgtatatatacacatatacacatatatgcatacatatacatatgtgtgtgcatatacacgcatatacatatgtgtgtgcatatacacgcatatacatatgtgtgtgcatatacacgcatatacatgtgtgtacgtatacacgcatatacatgtgtgtacgtatacacgcatatacatgtgtgtacgtatacacgcatatacatgtgtgtacgtatacacgcatatacatatgtgtgtacgtatacacgcatatacatatgtgtgtacgtatacacgcatatacatatgtgtgtacgtatacacgcatatacatatgtgtgtacgtatatatgtgtatatacgtatatacacatatatatacacatatacatatacacgtgtgtgtgtgtgtgtatatatatatatatatatatatatatatatatatataattttttttttttttttttttttttgagacagagtctcgctctgtcgcccaggctggagtgcagtggcacgatctcggctcactgcaagctccacctcccaggttcaggccattctcctgcctcagcctgccaagtagctgggactacaggtgcctgccaccaagcccggctaattttttgtatttttagtagagacgggatttccccgtattagccaggatggtctcaatctcctgtcctcatgatccgcccgcctcggcctttttttaaatgacttattcagtttagttacatcctgaggtacatttaggagtaacagacccactacttgttactcagggttctggctgggcacagtgatatgcacctgtagtcccaggtacttgggaggctgaggtgggacaatcactggggccaagaagttcaagaccagcctggacaacatagtgagaccccatctcaaaaacaaaaagttccactgccgttggttatgattctatctcttcccttgcaggatgatttggtcatggtccatgatgcttcttaagcacagatgagggttctcctagccagttttccttgtagcattaattaaagacaattcttgtaagcatccgatggtttcatatccatttcttctttttttcttttctcccttttttctttgactttttgctttctttccctctctttatctttcttgcatctccctgctttattccctaatctttacatctgttatattcttgtgctgccagccaaagccggtatttaccaatgaacctagccttttggattgactttgaacttaatgattgatcatatctgctttagctgttggccctgacctaaaaaagatatacattagcccaaatagatcagtttaattttattttcccttgtaatcatttcagtgttagaaattttagtctgtcttgtattttagtctgggtttaaccacttcagtatgcaagctaaatcaattcagcaggaggacaaattatttcagacttgaaggctaattttatccctgtttgttattctctttatattgagtaagtccttttattaaaggtattaggggttcacttatctgaatgttcattatgggtgaaataataagtttaagaaaaatattgttgtgatattctacttttaatcatcatattcacaaatgttctactaatcagattcaatatgtggataaccagtgctcagtgaattagaattaagcaacataaagccaaataaaactttaactcaaaagctaagatagtcatgttacttactaaggacaacttgaagacacttgaaagtttgcagagtccattttcaatttagttcattgagctgttactttttgcaaagccctagtgacgtggcactataggagaatgctggtatggccatgtttactaaatgtttgcaaaaacatttattaaaatgtattgaacattaatgtactaactgcctatcaaatgtactacacatttaaaggtatattgtctagctttttgacatattgtacatctcaccattttttcagcatctgtgttacttcctactaacacgttaattgtgaaagttaatttattgttcaataaaaataatggatttactttttcaatttcatatggattgtgaattcaaaaattgaaagcttacattttcacttattaacagaatctgaggatattattttgtgggcttaaagtaaattgcagaaaatgtatttcttttcaatttagttaatgaataacttgaaaatgaagaaactaagaccaggacacacacactccagaaaaagcacataatctttattgcataaaagatcagtttttctagttagaatttaacttttatcttacttttaaattaaccatggattttactcttattagaaaagagcggtaggcctggcgtggtggctccatgcctgtaattccagcactttgggagaccaaggcgggcagatcacctgaggtcaggagtttgagaccagcctggccaacatggtgaaacctcgtctctactaagaatacaaaaattagctgggtgtggtggcacgcacctgtagtcccagccagtcgggaggctgaggcaggagaattgcttgaacctgggaggcggaggttgcagccagctgagattgcaccactgtgctccagcctgggcgacagagtgagactccatctcaaaagaaaagaaaagagctataaaactataaaggaatgttttgttttctataaaatagacatagataaaattattgaaaaatcccaagtattcatttagaatgttgctaagcatttttctagaaaattggccaatctaatttaaatgactgaatatgttgttgctttcttatttttgataactctcattgggttttttcatttaatacttgtggattagttttctcaataggaaatatgcaaatactaaattatcatggtttccttcttaataatgtgaaaatatcttaattgaatttagagtagcttaaagcaaattgtaacatcaaaaaattttttaaattttatttctgattatatggtttgataaattaatataaacatcaggatttgctttttttctttgctaacatgacagtgttaaagctctacaattttgctttattgagaaaaagatggaaaatataatatgactttggttgtttttccttatttacttttcatcttctgtcaatatcctcattctaggagaaattttttttacctgtgttgcagagggcttttctgtcactactttggaacaaatttgatattgtttatttttaaagaaaattgactagtactgtattaattgtccaggctactatttatatttattaattgctattttctgtagttgtgtggcagattcataagaatctgtttgaagaaataagtttattgtttaatgcacccaatttattggtcaaaaccaagaaagcagtgaaattaaaaattaagattacagtagtttaaaaaaaaatcttttgactaaagttcggttaagcgtcagtagttgcacagatcaagtcacaatgataaaatcataagcagtctatcactcatccagtgagatctgttgtagtaccatgccaacagtaggtcctgtggccgggccagacagttccaagaatctccctggggagaaataaagaaacacacacacacacaagtcagctcagctgttcctgtgacccaaacaagctgaaagggtgaggaaaggtggccttgccagcttgctgcaagacaggcagattaatgagatagacaagggtaagaggcagccttattaattacagaaatatagctatggctgcttctctgctcaagctctttttattacttacaatgtaagtagcatgctatgtggagcagaagtgggaatgtaaactgcagtagaatgaatgctttttggtaatttgcaaacttttaaggccagaaattacctaatagatcttctcttctttataggagagtagaattaatgtatgaattaatagacttgattaaacctagtaaaaaaatcgttcagataaccatatttcccaaaataggattattctcctcctatggtatcaataatttttttagaaaaaccatagacaactaataataatgatcaaaccactttaaaaaattgttatttcacagtaaagatagatgttctcagctgaatgcctggaaaagactgtagataaatgttgagcctgtttagattttagcagcaatgtgatttaggggactgagccctgatctgagcctattcctgtcactaacctaaggcatgttcataacttctctgagccaccaggtttctaatatgtaaaattgcaatagtaatacataccttaaggattgtcagcagtaataggctgcagaaaatgatactcattatttccaagttcctgccttaatcttcactgtcgaactcaggaagcaatgcatttcacgactcctagaatttatttactaaagaaacaatagagttgagtaaatatattacagattttcatatgctttcttaagataaatcacaagcctccaatcttttttggcttaaagtattcatgatatttactgaggagacaagaatgtaagataatgttttctcctctgtgaaaggataggaataggcaatgaggagtgaaacagtgcgggtccctcctccagttgctgagagttcagtggaggagtcaggaaagtaaagaagcagttatcacacagtgcagagatgctatagaatggtagtcacagggcagaggcagagctcagcagaaggttggaaataatgatggagagactggggcagagctggtgaaggtttcccagaggacaagcatcctagatgcatcctcaaaattaaatgttaaaaaaaaaaaggtatatttgaaactttgagagattcttagtgatttaggtgtccagaatttttctattgccacttgctgtttttaaactatatataagattcattgtttaaatatgaaagagtatgaagaaataaaattattcataatcttaccccagagatgacatttcactttgcatcatgtatgtatactttgacttaacagaattaaaattatgtaatatgtaccactttgtaaggtttttacttaatatcagagtagttctattttctcatattattttaaaacatttttcatagctgtatagaatttattgtatgggtcagccataatttgtttaatcagtcccataacatagggtctcagtatatgtattggttttctacagctgctgcaaattacctcaaatttaattgatatgtaataactgtacatatttatggagtacaacgtgatgtttcaatacatatatacagttatgtatcaattaaaaataaaagaaaaccttaaaaatgaaaaaaatcccacaaattatcttacagtctagtatgtcagaaatctgacagaggtcagatagatttacttctgcctccgtcttctactattaagactctcatgcttatattaggcccacctgaacaatccagaataatctccctgtctcaaggtcaattgatgagcaacatttaattctatctgcaaccttactttccctttgccaggtaaagtaacatatcacatatttagggaagtaggacaccgatagctttgaggatagatattctgctgccacaatgtattttttttcagttttataaataatactgtttaataataatgatgctctaatgaacttccttttacataaatctttagtcatatctctatttctttaaggtaaacaaatggccaggttttctctgtaaggagaataatattctttttatttcttcattacatataactcaatattttatattaatatatacctagtaattgcttgatttaggacttaaagagtaatatagactggtattacttaaaattggtgactggcttattttacagattatcgggtttctacccaatgtagtaattttcttgctacttctggcaagtatagacttaagactactatgtagaagtgtaaaatattattggccagagattagttgaaagtagaagctgatgaagatacaaagaattatatttattttcagtaaaaatgattatagagagttttgtaaatattggataataaaaacaacaaatgagatttggcctttaaaaggttgtttatggccaggcctggtggctcacacctgtaatcccaacactttgggaggccaaggcgggcagatcacgaggtcaagaaatcaagaccatcctggccaacatggtgaaaccccgtctctctaaaaatacaaaaattagccgggcgtggtggtgggcacctgtagtcccagctactcaggagactgaggcaggagaatggcttgaacccaggaggcagaggttgtggtgtgccaagatggtgctactgcagtctagcctagtgacagagtgagacttggtctcaaaaaaaaaaaaaaaaaaaaaaggttgtttaccactgaagcgtaaagtcggcctctactcactttctctgtataatagtatatgactaccttgcaaatattcatatagtttacagcagttgtaaaatatagggtaatttgttagagtataaggctatatttatactaatatatcttaaagtttctcattgcaagattctgccaatactttaaatatatagatatataaatcctgaaagaataaagtaataattaaaaatacattttaaaaactatcaacaaatgttatattgataacaaatttggggttttaactgatggtgatatataaatagaaaataagtaaattgtcagatatatatgatctgcagaaagatctaataagcctaataaactttaaaatgaaataatatgatatgagccaacatttggtttgcttttgcaaaaataagagcaattcttttatctagtttatgtttgtaaatatatctaaaaccacatcacagtcaacatttaagttatattgctcaatttggagtttttattttaattattgaatcccgacttgtatttttataaagtaaacactttgaactgttcacaagaaaaatggtttactattatatatttatttgaaatctgaaataattttagttatttttattgaaatataaacagatcatagctatgtgggtcaaatcatagtagtatgtgtcacaatatagagttaagttgcatcagttattaatataatattataaaattttggttacttgtgagaatttcagatagaggaaaacactatattcaaaagattgtctgtgttgacaaacttctttgatgttatgccattgtaaacatcacattattagcaaacaatgttcacaaaaagtgaaattagtactgtgctctcttgcaattctgtcctgtcaggtaaagaataaacattcaaaagtaggataggtttttgtcctgtcactaattacaggtaccctgctaagttgcatgttaagtaaaaacttagaatgggctggacacagtggctcaagcctgtaatcccaacactttgggaggccgaggacggtggattacctgaggtcagcagttcgagttcagcctgaccaatatggtgaaaccttgtctctgctaaaaatacaaaaattagctgggtgtggtgccatgcacctgtagtcccagctgctcgggaagctgagacaggagaattgcttgaacctgggaagcggaggttgcagtgagctgagatcacaccactgcactccagcctgggtgacagagtgagactccttctcaaaataaataaataaataaatataaataaaaacttagaatggttatatccataagcattttctcccatgaactgggcaggcagcagaatgtgggcatttgaagcagcctgcccagatggcactgttacttctccagaagcacatggatcctccatggcttattgctaagtcagtgcaatcaatctgtcagttgatatctgccagatcagtctaatagagtttccaagcattccatcaacacaaggctgagagtggggtggtgatgtgggatacgaagcaggggcaaactgactctggaggttcctgaaattagaaggaaaaggattattgatcactggtctgttcaaaccatctctctcccactcctgccttattgaatcagtaagaaggagaaccatgagacagacctcattcaatgacaagaataaacatatactacatcagtgatactgtcacttctattccttccttgccaaggagaaagaaaatctggaatttttttaaaggatttggacaaattataaaatggtcttcacaacagaatgataggctatttcctcatggaattagaataactaacctaagcgatggtcactggaatagaagaagctgtaagaagaaggacgtctaccctctggtgcttaaaaaaactcctgctcaaaatctaataatttcttgccccaccatcaccgtgatacacacaaggagtgagggcctctacttcccttttttatccccttttttctatccctgttgtgaaaagtcccttttttacattccactgtaagcctgctctgggtgtattttcattgattctagagccctcagtggagaagagagtttattggctttgaggctgtaggactggctgtgctccttatcccccttaaggggcagggtacttttgggatataacttgtaacagactggctgcccatccatctgcccatctctggaggtgtctaactaaatatttgtatgacttttgtattttatgaatttcactactagtgacaacttatttagcagcaaaagtgctaaactagacaaaagactttatcaaaaatgaaaatacttttttttgcaaaaaaatttaaagtgttaaatatgaataagggtttacattttgttctgtgtgtagcgtgcataaactgagtaagaatttccataacagtctctttttttactctaaatctgcatgagaatggactgtagagctattctgttgagttaattataccctaaaatgtttagtattgcctcttatcaatcaagtttgcattttcataaggtatttttgatgactgaatgatttaacatacgcaaaacacatctggacactacttggcatttagttaagtgctcaaaaatattacttcttttcctcttttatcaggaaattatttctgccctcagttccaactctgcaagtgagtctcttagattcatagaaaatactcaatgaccattagccgttattctttttgtttctctattctgtattttcttatgaagtagctttaaattttcataataaagaacaggaaatgaaaagggcatttctaaaaccaattctacacacttaaagaaaagtagagagttaagacaatatagtcaattcaaacacaccaaaacatttaactcagaaatatctccctaattctttctatttttcagaattagccagatggttcaatacttctcggtgggatctgagaattaaaatgaatgtcatgtagtaccccctaaataaatgtatgctgactgatagataattgcatttcttcttcagatcacacttcatatatacatatagattttttttgctgtcagctgtgaaaggtcctaccggtctgctaataattgagcaagcatgttttagtgctgcatgtatgcattgaaatgaaccaagtgtaattataggcctctccctttgaacatcaaagggcacagcgctgtcaatatgcccgcatcaagccagcagcctaatttactatttaataatacatttgtgtgtcagacctctctttgcccagggctgttacagttcaactagttcctctgctgttaaaaaattgatcatctttctttcctgatatttggaaaaggaacaataaaatttatctctgtcaattgaaaggtctgttcactttaaccttgacctgtttatttcagaagtgtaagagggcttaaacacatgaagaagcagtaaagtaaaagaaaccttaaaattagtgatttaggaaatagctgaaagtagaagatggtttctatacaaaacatttgctctggagtgatatctatacaaactgggtcacaaaacctgacttttttaaagtgttgttgaaccaaatacgttagaatctcttgaaatgaatcagaatcctgggtaggaggaggctggagctggacaaagaggaaagacaactgggaattttgcattgggaacgatcttcagatgattctaattcaaactaaagtttgagaaccatgttgctctaaatgttttagcagctagtacaaaagggaagacatgttttattccatgattcacgaggtagaagagaattaattcctcagaggaggacaagaattcctatgtactaaggccagagataatttttctctgggtgcttcggtggtaatataatattcattaatatttatcttttcagagaaagttttttgtaataattggaactcatagttattggttttgatgtctagaacaggtaagccatgccatagaagtgcttcatccacattgtagaagcggggatcaaggaaaaaatataccaaatatgcaatatttggtacagagattctctctgtacttcttacatgttagatgactgaataaagcccattactttagcaccttgtttgcagtgttgttttctgtttcacctactctctgtttttctacaagcccactcttttcatcgggagatgaaagcattcatttgagagagtagggaatttcaagtgaggttagtctgtgttttcctcaatctttgggtactggcagtcctgttggccttcctagctcctgttcctccagtgatccttcttccccactcagttcttttgcctcatgagctgcagtgcacagagctccttttccatttcatcatcagccccctgcctgaaaggcaactcttaaatgtagtcacaattcatatcactgtcatctagaaagtcaaaatcaagaaattccttcctggctataatacctgtctctgccactatggtttttctagtcaggcacctgaatagatgtttatcatcctaattatgactaacagtctttgtggttctttccagttctccccatgtatgatccttggctgattttaaatgctttctctagctaaaccctgtgataacttgcatcttgaattccttgcccctttgtattgttttcaatcttgggacatgagaaacagtactgtggctaattggcatcactgattaactatttggactgtaaggtggagctcatcgctgccttcatgttccagcagctctttacctttactgctgtcatagaactcagcccaccagtgtgtccttgttatatgtatggcggtcaccctcagtgttatgggctcccaccctccctgaacagtccccagatattgcctttgtatcttctgctacatctggcacatagtacgtcctgaataagtgtatcttaattgcatcttattgagacatttggccatgatgtacttattttctatgaaaatgtctaaatatttgtttaattgaatagttaggcttgtaatttattactgtgacttatttgtagtgttttaggcaaccagaggtaaaggacatagattaatttaagaaaatacgaagtttggcgaaggaaaaaattaaagggtcttttattttctgaagacatgtgtaagttccttgtgattataatttcacgtctgtttaacttaaaatagtgttagatttagtttggctgggtccagtggctcatgcctgtaatctcagaaatttgggaggttgaggcagaagggtggcttgaggccaggagtttgagaccagcctgagcaacatagtgagaccccatctctacatacatacatacactaaaaatacagatttagtttacagaattggaggcttatggtgcctgaatacaatgtatgacattttccaatctacaaaatgttaacacttcaaacaaaacttttaaataatacatgcttattataggaaattggaaatgtgtaaagaagaaaaggcatcaaaatctcaccaccaggagatagtctgtctaaacgttttgatggatttgccttatttttctgtgattatttttaatagatgagattctacgtgaatatacttccgtgttttgctgttttcacttcatcctgcatgttcctgacctcttttcccagtttgtgattccgtagagattcagagttataaataatgtgcataaaactacatatatttgcataatcacatttttgtgaccaagctctaaaatgttgcttttatatagaatgaaagttcttgcaaagttttacttacaagtgaacctttaaggccattacagcttaaaataaaacagtcttaataccgttttgagagtcagtgccaagagcagtgtttttcaggaagtaaatgccatgacctgcccttttttcacactcaggctcttaagcctcctgagaaaaattttaaataaactgtcacctttttccgtcctgtttggtttaatgaggtgttagatggacacaacttggaactttggagacaatcaatgatggaagaaaagactagtttgtatcattgtttggatcaaaagctcccaagtcatatgtagtcattttctgatgtactcttctccagccatgagggcacctgggaacacaaactggcagtgaggtagaaaggagtgcagctgaatcaggagagtgatggtggtgaggcgtattcagaaaaactaagacacactctacctttcctttacatcctactccagggacttttttaaaaaaaatttctttaatcctttggattgtttgaatgctttcttatgagcgttacttattataattattaaagagattaaaatttaatgatatatacttaacactgaattatatactttaaaagtgtaaagttttatggtatgtgaattatatctgagtaaaaataaataagggaaaaaagaggtggaaagccatatgaacccattcattcatgtaaataaacactaagcgcctaaaaaatattcataaacctgctttggtagttgcaagagtgaaacacacatagactattcttttgggagtttatagaaatatgatagaaatagaaatatgatgtatatctaagtaattctagtaccagaaacaaagtggtgtgtgttactaaaagaggtatagataaatttctggggaaaagtagaaggaaagagtaataattctagcagcaaatgtagaaggaatttagaagacaggtgtttgagtgctgattgagatttgtgaatcaatgtagactggtcgggtatgtgggtagatttggtggtgatgaggcaggggagcacccatctgattgctcacgctttcttggtgaattataggcaagacttcacctgaggctgcatagactgggatagtggaaagaagggaaatgctatgaaagcatcctttggagagttggaaagtgtgcatcttcggaaatttcaagtgaggataatttgtttttctcgagaccctttcagctgctagatgtaaatgcagagtagaagaataactggatataggtagagttggaatttatgacataagtataacaaaggattaacaggctaggggatttgagaatgatgaacgtgatggtagcaatggtttggggaagtaattttcaaagcaggatcagcatcacctgaaaatttgttggaaaggcaaattcttggtcctagacctactgaatcagaaattctggggacagggcctaatagtcttgtgtttttgaacaagtcttccaggagatcctgtagcacaccaatatctgagaccctctggtttgggaaatatagagtactcacatagtaagtattattgtgggtaaggggcaggaatgagtgatgatggataataaaaaagaagcagtgtctggaataaagtctacatgagagtgacatattatgtcagtggggaattcaagtaagtgagccttgagagtaggctgtgctggccagagaggaagatacttaaaggattttggtggtagagcagttaaaagagactcagatgttgtgtggatggtccatgttgatgccactgtcaccgagaatcatgatacaggggtaagaatggagaagaaacttgtgaggccagtactgaaatctttattgaatgaacagtgaccaaaaagtagacagacaactaagtgagaattagaggatagtacagtcatttcttgcccctcttttcatcctctcccactcctcaggcccagaggtatctaaaatatgagagaaaacagcctagcctctggatccaaggtgtaagaaggttatgcctcacgtctagacttagttcacagggcacagaaaaagagtatgggacggctgagatgagaggaagattgagtcaaattagtgaatgttaccaggttagtgtggaggtaaatggccaggtataaataggtgatctgaaaatcttagactccttcttgttgctgaaataagcagataattgagacatgatgaggcgaggtgaaaagtgttgtctgacaagattagaatcagcacttttttagtaaactgaaaaagacagtcgtgaggaaatgatgcatacataccttaaacattttatttctagttgtacaataattcatcatatccactgtttgagtttccagattgttttttttttaacataaaccacactcatattgtcatctatgaattccaggctttcaagtaaaccagaactgaaagacacatatgaagaaacccaagggcaaaatctttctagacttttacttctctcttatccctaattttttatggttgtgttacccacacaacttttaaaataactcaacctttattggctttttccaaagcatgaagttttgtttttaatgcaacaactctcttttagtattttatgttttgttgctttatgtaacatttgattgaattatataattacaatgacaggcataaacaggtttgggaacaatcacatgtaacctgttatacatacaattcaacaaatgggaaatgtgagcctatgtgaagtcccatatgttcaatgtccagtgggcatgtattttatagaacgaattaataggtcaatgtggcaaattggtgaattagagttcagatgagagagcttacttcattgttctccatgatgcttaaaggaaagtcagtgatgtggctgagcgaggtgagacaagtaattggtctttcctgaggccgccagaggtatgaagccagagtgagggaactcacttctgaggcagagggtaggtcacattggcaacattggcatatgtagaaatcccttataagttccattggcacattttcttctttgttcttccaaaaagactaataaagttatttaaattatgaaaattattttctaatatattaaatgtgattaataagtaaactttctgcaggtttctatgatttttgtatcattgcttgatttaatggtagtatgatacaattgactagtatgttagctcaaatccctcgtatgaaatatgtgcaattgtgatttctacttttctaacttttaattttggctttatgtcttgcatgttataatgtacaaagaggatttctcagtgtaccaaatacatgaaaatatgtttgaaaatttcattaattttttaaaaatagttcttaagatgtttgtatcttgagtaaaacatttttctattaaagctattgatgtattttccatgtgatgatgattaggccattcttgcattgctacaaataaatacttaagactgagtaatttacaaagaaaagagatttacttggcttatggttctacaaactttacaggaagcatggtgctggcatctgcccagcttctggggaggccttgggaatcttacaatcatggaagaaggcaaagggggagcagtcacgtcacatggcaaaagcaagagcaagcgcgagagagagagagtgcagggtgaggtgccacacagttttaaatgactgtgtcttgtatgaactcactatcattaagacaggaccaaaccatgaaggatccaccccatgacccaaacacacccaccaggcctcacatccagccttgggattacaattcaacatgagatttgcatggggacaaatatccaaactacatcattccacctctggccccttccaaatctcatgtccttctcacgttgcaaaatacaatcttgccttcccaatggtccctcaaagtcttaactcattccagcttaactcaaaagttcaagatctcatctgagacaaggaaaatcccttccacttttgagcctgtaaaataaaaatcaagttagttacttccaagatacactgggggtataggcattgggtaaacaaatattctcattccaaaagggagaaatcagccaaaagaaaggaagaaagggggtacaggccccatgcaagtttgaaacccagcagggctgtaattaaatattaaagcttcaaaataatctcctctgactgcatgttccacatccagggaacactgatgcaagggctgggctcccaaggccttgggcacctttacccttgtggctttgcagggttcagtccccagggctgatcccatgagttgaagttgaatgcctatggcttttccagacgcagggtgcaagctgccagtagatctaccattctggggtctagaggatggtggcccatttctcacagctccactaggcaataggggactctgtctgagggctcaaccccacatttccccttggtacttccctagtaggggttctctgtgagggctctgcccctgcagcaggcttctgccagggcacccaggctttctcacgcatcctccaaaatcttggcagaggctgccaagcattcttcacttttgcattctgcatatctataggcttaacaccatgtagaagacagcaaggcttatgccttgcaccttctggagctgtggcctgagctatacctaggcaggcccctttgagtcacagctggagctggagaggccagtatgtggggagcagtgtctcaaggctgcacagggcagtaggctctgggctggcctacaaaaccattctatactcctaggcctctgggcctgtgatgggaagacctgttgtgaagttctctgaaattccttcaagactttttcccatagtcttggctattagcacctggcttccttttagttatgcaaatttctctagcaaatggttgctccacagcatgcttgaattcctctcccaaaaaagcttttttctttttctgccacatggccaggctgcaaattttccaaatttttatgctctgcctaccttataaatataagcagcaactttaagtaattccttttctccctcatctgaggataagctgttagaagcagacaggcgacttcttgaatgctttgttgcttagaagtttcttctactagatactgtagtaatcaatctcaagctcaagctttcacagacccctgacacatgaacagacagcagccaagttctttgctaaggcataatacacatgacctttgctacagttcccaataagttcctcatttctacctgagacctcagcagtctagacttcaccgtccatatcactatcagcattttggtcacaaccatttagtcggtctcttaaaagttccaaatttttcttgatcttcctgtcttctgagccctccaaattcttccaacctctgcccattacacagtgccaacgtcacttccacattttcaggtatttttatagcaatgcttcacccctggtatcaactttctgtattaggctgttcttgcattgctataaataaatacctgagagttggtaatttatgaagaaaagaggtataattggtttactcctatgtaggcttttgaggaagagtggtgctggcatctgcttagcttcttgggaggccttaggaagcctgcaattatggcagaaggcaaaggagaagcagacacatcacatggcaaaagcaggagcaagcagtaggagagtgggtcaggggaggtacctcacacttttagatgaccaaatctcatgatttagcaccaaaccttgagggatccacctccatgatccaaacgtctcccaccatgccctacctcagcactggggactacatttcaacataagatttgggcagggatgaatatccaaattatatcagatggaaaatatgatgtattttttgagaagaaattcaaactactgcataaaggtttagaagattgtaaatatagtggtaacccatcacttaaatggttggctgatattatttctgtaaacattggaattcacatgtttttaaatgtaagttcagtgtatctttccacaagtccatgacctgacttttaaaaattaggtttgtggattattctgatctaaatatgtcatcttctgccctatgaaagagaatatagttattgcctaaatttttctggaactaacatttaagtggatgcccttgtgatagttattgatacggtttggctgtgtccccacccaaatcacctcttgaattgtagctcctgtaatacccacatttcatgggaaggactcaatgggaggtaattgaatcatggagggggggttccaattctgttcttgtgataaggagtaagtcttttgagatctgatggttttgtaaagggtagttcccctgcatattctttcttgcctgccaccgtgtaagacatacctttgctctcctttgccttccaccatgattgtgaggcctccctagccatgtggaactctgagtccattcaacctctttttatttataaattacccagtcttagatgtgtctttatagcagcataagagcagactaatagagttatccttgtttttgagtatacaaacagtctcccaataggaaaatataattatttttagttaaaagaacctcttttaatgtaatggcattctaaattctctgtagtcaatgtactttggcatatggtaccaaaaaatatatatatttatagcactaggaactaaaagagctaaagaacataacttagataatggaaatctttaaggtcttacagtcaataaactactccatactttctcatgtaacttgtcctatatcacaatatgaatatggcctataagactgttgagtaagtcagcagttaatttgtcctacttagactggctcttgtcaggaagagtatgttccatatcccttttatttatgaaattaacgtctttatagtcccatgccagaaaaaaattgtctgtattatgagctgatacattttattttgtcaaacagttaaaattttctaaaatatttactattttgccttggctgccaggaattttagagctaactcatagtgtctatgtcactaaggttttcatataattatcttcatgttctacctctctattatcagtctttaatttttaatttagtaagtctatcaggtgttttttaatataattattcttaatttcttctcaaaaatttacggtagataaattcaataaaccagcagacaattattttactgttaattctataatgcaagtaatagtgaaaaagatagctttttcagaaattcctaggaaatgctttgttcaaataggaacttagtagatgtattttgttaagcatatgaagtattcatgtttagtcttttattgctagttaaaagtcagcattaggatagactgtcatttccaaagcctatatgtttctgttttgtgtgagtcagatttaaaattcaggactggaagctgagtgtcacataatctctaagatagcaatgcacgtagatttccggccttggctgttcttaaatgtctacagagagttgcaaacctttcaacttcactctggggaagagatggtatgtgtgagatgaccaaagttggcccagggaatctttgaagaagatgatagtttgtctgatagatattataaaatgactttgaaaggagaaggtatgcctgctttgagtctaaaaaggaaagaaagcctttttcagttgttcatattgttcttttatgcataagagggttcccttatgcctttgtgcaacttttgaatgaatacagtcccttgaaaatgcaaactactgcataaaggtttagaagattgtaaactcagtggtaggtagcccattacttaaatggttggctgacatcattatttatgaaaacattggaatgtactttgtaattgtaagttaaatgtatctccccataagaccatgacctgacttttaaaattaagtttgtgaatagttctgacctaaatatatcatgtcctgccctgtgaaagagaatgtagttatgcctgatttttctagaactgattaccttttaaatagatgtccttgtctttcattccttccttctcattataactgttggcttttgcttattttactgcttattagtacgtttactgtgatagccagaataatggtccccccaaggacatacaaacatcctagttcccagagcctgtgaatatgttgcattacatggcaaaaggaaattaaggtgcagactgaattaaatgtgctaatcagtttaccttaattagggagattattctggattttctgagtggagccaatatagtcacaagggaggcaaagcaaaggtcatagtgaagtagcatgagagggacttgacaaatcattgttggctttgaagactgaggaagggggccaccagccagggaattaggagacctctaaaagctgcaaaagacaaggaaatgatttttccctggagcttccaggaagggacagagctctactgacacctgtgatttttgacccccaagtgagacacttgtcagattcgtgacctacagagctgtgagataataaatgtgttttgttttaaagtcactaaccttgtggtaatttgtcatggcagcaacacaaactaatatatttaccagggttagagaaaggaagatgaaaatcaaggcagtctgtacaggacaaaatttagtgtgggctgaagtcgcagctcttgctcagagggagatacaaggctgtcagtgaatttcagctcctccccttactgttttccattaatccagataatctgcaattgcctgttgccagtataatgatttgaaataggcttcagaacaatatacctttagttcagtcagcctccagttcacccacttggctctcaccagagtaatgtcttcatagaacagatttaatcctgttatttctctttaaacttcgctttgtgatttcccattgcctacaatacaaagtccaaacatagagcattacattcaagtcccctccataacagaagcttctgctatagccttacatcatacttctcatttgtatgcattctttttttttttttttttttgagatggagttttgcttttgttgcccaggctggagtgcaatggtgtgatcttggctcactgcaatcttcgcctcccaggttcaagcaattctcctgccttagcctcctgagtagctaggattacaggtgcccgctaccatgcccagctaattttttgtatttttaatagagatggggtttcaccatgttggccaggctggttttgaactcctgtcctcaggtgatccacccgccttggcctcccaaagtgctgggattacaggtgtgagccaccgtgcccggcccctcatttgtatgcattctgtgttcaatcaaggtgaagtacttatgtctgtgaacccagcataccattttgcactttagtccttcagatgtgtcatttcagtgacctccagtgccctcccagatcgtcagacctgctggcaaacctctatgacaaggcacaaccctaacattaattccctggaaaatcaagaaatattctacagcaaataaattatttgctctgtcctttgtgcctcactgttgcttttatgtgtcgtgatattaaaatattgtctttccatttcattcttttaaattaaactatgagcttcttgagggcagcaacaggatttaataacatatctgtgggatcttagtaattcacatagcttatacactaggtacttaataaataaatattcagtgtacaagtgattatgttacctaacctggacagaagacacggaggtgctattagaatgcaggtttctgaatcccaggtcagtttttggttacattctgactctataacttaagtacctaaaatactttgtatagctatggaactttttttcattttaaataaaatttagacaacttattctgttttatactactctcctttctatcccttcatttaacacttgtgatttcattgttttattttattgaaaatgaaagcatcaaaatagcttctgttttaattttcccctgcctctatatggaagaattattttgcacaatataactattcttattcttaaattattgtgaagattctgaaacttagtagcatgacacatgtcaaattcttttggctttaaatatttgaattttctttcaatatttctgttttctgcctttttagatttggtatttatgttaatttcttagtgattacatgtaaggtttgacattgccatacaggtctttatgaaaatgtatatggtagaacttggaaactataaaacactgcacaaatggaatgaattgttttcataattgttatcatcactttacactctgactgcaaaacattcgcagttttcatgatgatgggagtaattccactgggaatttctctttttgcaacagctgtcagaattcagtcttaaaatggttggcagctttttagtgtgatcagtaaaacacatccttcatgctacatagttaatttataggtttggtttattaatttaaaaaaggaaaacactttttttcaagatgaatgagtccatgttggtattaaaattttagataagaaccatcatcattagtttaaaaaatagtagacagaagccattgatgaatcaatgagacttaaacgtattcaaaacagatttgatttttgaaatattatgaaggtattgataaatattcacaaactgtagatttttaactatggaaatattcagcctgatttaacatattgcttggatgaccactgtctgatgtgagtaaagctaacttgttttagaatggcttgaaaagctgggcaaagccatggttcagaatgtgtatttaagatttgaattctatcacatttcatcagtgactcaccagcagtattttgttttctttgttttcaggttaactttaaaataatcagctggtttagctattaatgtttccaccagaaaagaaatgtcttgtgataaacttgtcatccttaaatgtgccagacatatcttccattgtgcatcaacaaactggcattatggtcttttaaaagccagtctccagtgagttcacttagcacgaaatgagtctacagagcttaatcatgctagagacttagctcaccagagtaccctttttcgggaaacataaatgattctcatgggtcccatgtcagtttctcatctttttacacaatgctagatacattctgacactgtcttactcattgtgtcttttttgaggcgttccttcacttgtcccagatttttaccactatattacattctcttatggcagtcttttaaggacattaattcacagtgaatgatgacttctgattcattccatggacttgcagcttaatataacataaccttattatgtggccaattaaagtgatacagttttagtgaaactaccagctgccactgtccctagttgtgggatgtgcatcactttggaagctttcaaccttatctacttgctcaggtgccttttcttgattatacaaactccaaaataaatttatttgaacatagtctttatattgtgatcttttcaacagcttgcatgaattcccacgttaatttgatgttattactgtagttctccttatatttttttcaaattgaatacatctttttctatcaaaataaccctgtttctttgggtaactatcaatagcaattgttttattcattgctttgcaggtactacagtgcaaccattctgcagatgtctggtgttgaagatgatagacttgcaatatggctggcttcagttacagccttcacaaatttcattttcacacttgtgggagtctggcttgttgagaaggtgggccgcagaaagcttacctttggtagtttagcaggtaggtggctggataaagaattcaattataaactttatttcctaataacttcaagtttaaccttcaaaaatacaatacttacaccacttctaatattggtttctcagccaaacaacaaaaaaattagagttcttctagaccaaaaaagaaaaaaaaaagagcttttaacaactgttacgctacgtgactagaaactagaatgagtagaaacaaactgcaagaataatttggatctactgagggtaacatttttctgttacttgagttccactcaaaggtacaaaagtgaaaaaaaataattgttttttttttctatccttttttgaaaaactaaaaactttggattcagaaactcactttttaacatatatttttaaatttgacatacaatggaattaaatttggagcattttttcaaagctctttcagcagtggaatattagaaccatgtaatttcttcacaaagcagggacaaactcttttgtgtttgaaacaggcctaaattccagggtaaattctggttggttaaatgtattttctatgatagcaaaataaagcaaaaccttttttttaattcccaagtatcttttgtgtttaaattctgcccattttatttattatttcactgtacacaaggactgtttcattgatagaatgagacccacatatttaacattgattttacatggctgcatggtataattttctaatttttttcaaatatgcaagtacattcctatgtatcaattagctatactctaataactcctttataagtttatttggagtgagaatgcatttttccattaaaagatagtttccagggcagcattaactaaattctattttaaccaaattgtatcgaaaacattgatctaatagaactgtttcagtcactcatcccatatttgatgagaaaatacattctaagttccaaacccagttatcagaaatacataccctctcctgaccctcattccagaatgaagagtagaacgctttcacctcctgttcttgcctaagcagtgggagcccttgaatccaataatgtgtgctgaactgcagtatcagtgctggagggaaaggtgagagattgtctgattaaggggcaaacatgattgccaacagccaggatatatactgaactaagacagtaggtaaatgaataaaagtgagggacaagtaaaggtttcaaaaccatgtttataaacctgttgaagaaaccagaggtatatagcctggagaacagactaaaggcagaagcctaccaggtattttattttagcagatagtagatgttatgaggacacagatttttacttaatataagaaaaatatccccaataatcagagctatccagcaatgaaatggactgaatcattaggatagtaaactctcaacgaaaggatagattactatcaggcagtgatgtgttaaaaataaatttccacagtgggctggaaattggatttgctgacccttgattttcagatgaatgctaagaagagataatagctgcttttaaatatttttaatggatgacacccttctttttaaatagaactccagtatattgctacctcaagaagtctattttttaaatagaacttaattgcttcttcaatttgggatttggcctttgagatctggggaaaactgactaaacattatttctagcaacctgtgttcgttccttcatttggtattccagtaaaacactttcttatcagttctgtaggatttttgagcccttattgatacagagctccagactgtttggatttgaatagtgtgactttgggcaaggttctattttctcatttgtgaatggggattaattatcatccctacttcacagagatgtaatgaggatttaacacatttacagatgtataggatttcaaatactacctgacacagagagtaaagggctctgagcattttagctgtcacagcattattgttaccaaagagtgagcctttgttgcttgaacaaacttagtgcaaaagcagcctccatcgtcataatctaggaatcttcctgaactcttctggcctatgtcatgtttccctctcagtgtaggtcttctgcccaaggatttccagagccatccctgactgttaaggggaagtattaagacaattcctcgggaaacaccaggggatttcagggtctgcttctcatgagcaacctataggcacttttctttcctgccttgttctctttgcagctgaaacccaccaaggcctcagttctgcccactacaaacactgtacagtgattccttagcttgagagacacagtctatttgatttccttattatgtggccaattcaagtgatacagtggatataacaatggtttgagaggtggaagtcctggtttcttgtcacaagcctcacaggtctcctcttttacctgtacacatagtaaatggtgccattcatgtggttctgctgtttcagtgattaaataggtcctactagaagataatgaccaatggacctttacaccttcagaataagaagtaccattcaacaaccttgttaacacattagtattactccagtgtgaccctcactcacaattgatttttctttcacattcctatactgattctgtgttagttgtatttttatttcagtgtgtttttgttttattcatttatatgtagatatatacttgacattttaatagtactaacatacggttctatgttaaatttcttaaattggctatagcctcgaatttttaacctttgattcagtatcgttccctattttgtgttcttactatgatttattttattatattggactaaaaatagtgaaaaatgttatatcaagatgattttttgttagatattcattcttttaaaatgattacaaataaaaaatatgtaagcctggacaaaggaactctttatacaaagaagtacaaaatatgtagtccatgaataatcttaaatgtaggacatttttggtgtttgactttttgtattttcaaagcttgttcagagaactggacttttctggtaaatattacaaatttaatgacaaattcttgattctttaatattggaagatttggatctatgtagctttattggtaatgaatcagaaagccagaaagattgtgtttttcccccctcatgtattttggtagtgtaatatttctgaaaacttcactcacagacggtcttcatcacagttgccaaggatacttattttaaaacatggattattgggccttaacccagatctactaaactagaatttctgaaaatgagacttgaaatatgtgcactttagacacattccctaggtgatacttatgcacacaaagtgtgagaactactgctctggtagagtcatgggaagggaaattattttgtttttttgagtatttactaataagccaaacactgtacctggtactgattattacaatagatatttttaataatgctatttattcagcacttttcacttcctgtggagaatatttttatttgccaaattatatcaaaattccaaaatctaatactgtatttggttaagagagactcttctcttgaaacataaagaacatgccaaaactacacagtacaccagataaaattctttcatccaaagccttcttgtattagactcaaatccaggttgtaataatgaataacttgacaataaccagattgattttaaatactaacaagggactgataaaacatctgtaactaactaaatataagtaaaaaggtaattcaagttgttttatgctttaatagtgtatatgagtagatgataggactaagtgattacttaaaaatttattttataaataaagtcgtttaagataccatttccttcttgtaaggagcttatcatgtcataggggttttagccctgtcttggcatcataaccacttgtggaaagctttaaaactcagatattttgtactgatcttctggagactctgattcagaggttggggtacatccaggcatttgcttccaacaggaagccaggattgagaaacatcactatatataataacaaaagagtataatgctggcttttaaaatattttcctccaaaatgggccaaaataaaataaatttggcttaagaagagttaacttttacctatttaggaattttctatatacagaatagtttatttctcataatttttaggttggttggaccttaagagatagatgtagagtcatattatccatattgcagagctctcatttaggatagttgtaccatactaacctcatgactgtaattggatggacttaacagttttttttttgtttttgtttttgtttttttcaaaaatagccaacattgcgaaaatgtatagtatggtggcccatccattcaaccaatatttatttgaatctttatatgccaggcactagaattggaccttactggatatgtgctaggcataccatcttagagtttatcattttcatggagacaggttatttaatgagtgttatgaaagaagagactcatctttccttcacatcttaatatatcaaagtttcctgatttaaaaaatcttacctgttgcatggcaataagatatggatgtaatttgggaaaatagggactcagattttttgatggacagactaacagtaaatctcatggttcgttttgttttgttttaggagagaggtatgatcttcataacagacctattatatctcttttctgttttccaatttggggcttgatagtcttttgagaaaagtaatggctcaaactattcctagttctggtttgaattttaagccaacagtagttaaacaaactgtgattttagttttatcgcattattggcctggttttgcaaaatagacttctgacctttctttaatcctccccatccttcaactttgttctgttattttgaaggcttgctgtggctgctgctgctgctgcttgtaataataatcatagcataataactaacatgttatagcattaaaacatctttcggccgggcgctgtggctcacgcctgtaatcccagcactttgggaggccgaggctggcggatcacgaggtcaggagatcgagaccatcctggctaacacggtgaaaccccgtctctactaaaaatacaaaaaattagccgggcgaggtggcgggcgcctgtagtcccagctactccagaggctgaggcaggagaatggcgtgaaccccggggggcggagcctgcagtgagccgagatcgcgccactgcactccaaccagggcgacagcgagactccgtctcaaaaaaaaaaaatctttcaaatacattatgacatttaaaattcactgtaagcccgtaaggtgagtattttcactaagccctattttacaaaagacaacattgaattatggaaaggttgtgtcctttatccaagatcacagagtcaggaaacagcaaagctagctaaaaactacagtcatctgatcccaaggtcacctctgtacccataatgcctggcttcacacacctactatgtcttaaacaaaaacatctcaactattatataaccgtgttgtacttccacgatgcttctcaatgttctttttaaaatctattttgaatatttttgttcataatttaaattccctccaagcttaactaataaaaccttaactactactaaactgccctcctaaattccatgttttaaacttattttgtctcattcaaataagttgtacaaactaacacagccatattctcttttttaacttttaatttcaggggtacatgtgcaggctcgttatataagttaacacatatctcagaggtctggtgtacagattattttgtcacccagataataagcacactactcaataagtagttttttcatcttctcctttctcccaccctctacccccaagtaatccctggtgtctgttgttcccttcattgtatccgtgtgtttttatcatgcagctccaacttttaaatgagaacatgcagcattaggttttctatttctgtgttagtttgctaaagatcatggcctccagctccatccatgttgctgcaaaggacatgatctcattcttttttacagctgcatagtattccatcatattttctttctccattcttcccatgacccttttcgtttaccctcacaatgtctgtggctcaaacaatagtcagaaacttgaaaaatgtcttatttgccattaggatgtctataagggacacaaaaattattcttttaagtgatatacttaatcaccattcctatatgttaacaccaaaacaaatatttcactttcaaataccaacaggaaagaaaaaagaatatatgtgatatattatttctggtactttaaagtcttcaaaaaatgctactccattttaataaaacatgctctttcaactgctttagaaataactcatttgttaaactaaaaaggtttaccaatttaagtcttacatgattgaatgtcattagaagaattttcttggcaccaaaaggaacacttgatggaaatctattgtctttcgtgcttcttgatatgttaggcactcaataatgttgtcacattaattgattttgagattttcagcaatactaggtgtgcgtggtttcttttaaaaaatcattaccaatttactgtttggctagcaaatgtatttgctttgaatttcactctcatcatgtctcacaatgaacgtgctagtgaatagttctgataatttgtttatacattgggagtactttttaaaaatccagtgaagatagagcacggtatttttttttcaggagtttttgtttgtttctttgttttttggtttgtttttaccaaacccagtctgccttaaaacaatattgtcaactcttctctaatataaaactttttttttttaaggtaccaccgtagcactcattattcttgccttgggatttgtgctatcagcccaagtttccccacgcatcacttttaagccaatagctccgtcaggtcagaacgccacttgcacaagatacaggtgagattccattatgttcttcttcctttacatgactctggtaacttttttgcttgcttttaacttttttaaagttgtagagatgagtaggagcttgctgggcatccaggcttatgtaagaagggaagaaaatgggaaaggtggtagagaggggcccctaggaagaggaatagcttgtgcagatgtgtgagtgtaaggaattaaggagagagtgggttgttagacacaatcttggtgatgtttctctggaaattaaaattagggattgatactgaatctaagcaggaattcagaaaagctattttagatcatatacaattcagtcacctctgtgttccaagcaaagtaaataactttaatcagtaatcaaacttttacaagatgcacatgccctctgaatattctgacaatttggactgatttgcatggctatcctcttattcatttaaacagaaggaaagttttccctcagtactgaggctctttcagaggatcaggaagtaaaaagtgatggtgaaagaaaacaaaatgttctaatggctagctgcaggcctaagagctcattaaatctaacagtgtacacactatgtgataaatagatcgaaaagtagataaatggatagatggactgagaacacataaatgaaactttgagtgattggacacatcgattaatatatttggcagcagagcttcaaagttttaaactggactttagccaccataaagtctagcaatccctttaaaacatatagatagaataagacctagccttaacaaaaatgtatattcctttagcttgaaatagatggacgcaagtctcaaatcaatgagtaaatgatttattaactcatacaaccctatatgaaattaaaacattataccctaaactccacttggtattcatttagagcatccagttgagcgtgaatttatggtggctgttcattacaacagtgaggaagatatattggttccaaattgtgatctatgtgcctttggaaaataggcatcatagcacgacttttattttactgataagtttgtttattattggctcactgactttcatagtctttttattgttctaagaagacttaagggtgtcttcatagtagaagttaaccatagcatctttatttggacatctgcctcaattgctagaaatgcatattctacttttctttttcttgatggatattttacttatatgtttttaacacagttactttgaaaaagtattttaaaaattactgtcatttgagaatcatagaatattctccagatctaatgtctgatgtagatgtattgttcagaaatactgttaggtcaactaaagtcagaaaatcacctaaaaattattagaaaaagttctttgaacttctgatataggaaaggaatgactgtaagtttttagtgatttacataatgaaatagttttcctgacattgactttaaagtttaaataaaaatatttattgcccaagtatatctcactgcacagcagtttatgatcatcagtctgttaatccttatgatgtaaggtattatcatctaactcatattttaatattcaattttaatgaggtaagagaagtgatacagcctacctttattcttattacaaaaataagcagccatttgtgaagatagaaccaaattttaggtgtccttcgggagtcagtggatatgaaaaacaattatttattgtatgagtaacatattaggctttgtgggaatttgacagtatgtatttatagtctaagtgattttgtaaaatatggctgcagtccgcttactgggtttttatggttaaaaccatctataatcctctgctctaccagctgagcagtaattgactgtattagttattttaaaataactaaaagagtagaattggaatgttcctaacacaaacaagtgacaattgcttgaggtgatgaatatccccattaccctgatttgatcattacacattgtatacttgtattaaaatatgacatgtaccccataaatatggtccactattatgcatacacaataattaagaataaaaaccatctatatacatttcccctttccttaagacaaacaggaaaagaatcacataataccttaagatgagtgaagttcactttgtaaatgtagatagtatgctttccccatggagtgatccgtataggaaaatttagcaaatgaaacagattttaaaggagaagtagtttaatatcttagtaacatcatattctattctattagtgggagcacaaattgttcttcattttagaaagtgatatggttctgcctaataaaagttaagtgcctatgtccattgactcagcacgtccacttgtagaaatctatagaccacagtgatgagtatgcagttcattcttactagagaagatttaagaaagtaaatggttaaagaacaatgattcttcttgattttaattcaataaatattggttgcataccaggccaaaaatattgtaggttagagctccctaatgacttgagattcaagagatcgacaaccctaaataattttcaatgaggacatctcctttttagaatattttaagtttttgattgataatgtattttccaaggcctgattcaattctctggactgaatgtattaaagaatgtctttcagaacaatgagaacatagggacacaaggaagggaactaactacacacactggcgcctgttagggggcagtggtgggggaagggagagcttttggataaatagctaatgcatgcggggcttaatacctaggtgatgggttgataggtgcagcaaaccaccatggcacatgtttacctatgtaacagacctgcacgtcctgcacatgtatcctggaacttaaaattaaatttaaaaaaaaacaccttttagatctgcttttaatagataaaagtgtgcacaaagataaagacagatgcaagttgctatagaaaatgtttggccacctgtataaaagctgtcatagggtcccagctgcagctagaagaaataacgctagcatgagtatcatctgaatcatatatctttatgagagttcacacacatatttctttttttcacacccataattccaatatgaccttcagttccacactctcaaattactaatgttctattcctttcatttccaattcaaaatattttctcataagagctagccaagatttgaggaatcaaacctttcctatgtacgcttccctcaaatacttgacgtattattatttatggtgtgatctcagtatatgtaaatcactatcataaaacatttaaaagtagacagatatttcctaaagcatacagttgtagaatttcaaggtagccttgccctagggtttttatcttattcacttattatttcttcatgcatctaaatatattatggatcacctaccataggattatagtaaggataaattaacatatggaaaatgccttaaacagtgcttggcacataataagcactcaataaacattacagtcattgttagaattaataaagcctgtaatagaagatgaagttgggatgatggcactcagagaagattaccttgagaatgggatgtttgtactgagctcttaaaagaagagtggagtatgtcacacagaaagaatggcaggtacaaagatcctgcaaggcagtaaggaacgtggcaagtgcaaggaactgaaagaagatgactatggggtcagagaagattcagataagactattaagacagatcagagccaaatcatgtagagcctcagaggtttttgatcttcagtctaagaacgtaaatccatggaagaattttaagcaggggtgtgccttgaccacattttgaattctaaactgtctctgggtgggtgtgggtgccaccaagagcatgtgttcatgtagggagactggttttttacagttgtctatgagagagatgacagttgcctggattatggtggtgacattggagataagcaggtagacagattctcagtgtattaggagagaaaaatcaataggaaatttaaaataaataattaactgtggccataggaggaaggagtctttggttggttctcaatttctgcatgagaaaaaaggtggactaaatcataaaaataagatgcagcaattggaagatgtaagaccatgcgtgcaattttggacatgtggaatctcaggtgtccatgaaccaacatcagctgggatattgaataggtatttgggaaaactggcccgtagttggaggagagttctagaatgaagaattattatccatgcatgataattaagtccatagacatgggcaacatcttgttcacaactaagatctttatcaagactctagctacctttgcaattcataatctatttgtaaaccactagtagtttactaatcaattgggcagtatctctccattcttcaggcttttaatcccagcatagaatcataagctattcatgctggaaggccttaaatgtaacctaattcaagcctttcatcttacacctacacttacatcttacttagtttccttactgaggtccaaataagtcacactcctctcctagggcacacagactaaccacctattctttaggcttctcttgtccccatacagaccttccttttttagctaacacagttctttaggagttattgttaatatgaaaccaacgacacaacagcttctttttctattcctttcaaaccttgctcttcttgctttggaccaaggacatggtttttctgttaagatgacttgtacaattaggtaattcaaggaatttaatgatgcctagcatattacctctttgatacagatcttgctatattttagactctgcttgagtagaaattgacaaaagggactatgcctctagttcattatactttttctttttaatacttctcaattaaggccagacgcaatggctcaggcgtgtaatcccagcactttgggaggccaagtcaggcggatcaccaaggtcagcagtttgagaccagcccggccaacatggtgaaaccccagctctactaaaaatacaaaaaaaaattagccaggtgcggttgtgggtgcctgtaatcccagctactcgggaagctgaggcaggagaatcacttgaacccaggaggtagaggttgcagtgagctgagatggtgccactgcactccagcctgggtgacaagagggagactctgtcttaaaaagcaaacaaacaaaaacttctcaattaagagtcttaaccagggtcatctgcagaggtacttaaagtcacctgttttccctttccagcggtcagcctcaccaggacagtggcatgttgttttgaaatgctccccaggtgatgccagtacatcttccattaagaaccactgccataatgctatcacttttttttttttttttttcagaaaaaaaaaaaaaactgccagctttctttctttttctttttttttggtttttgttttgttttgttttttgcttcttgaacattgttaaaccaagcataagaatatgatcaatgtggttctttttctgtatagtgatagtttcacattttcctcttcagatgaagttccccaaaatccaaattgacaaactgtggcttcatctgtagatggtggtgacactggttttgtgaaacagtatgcccctcataaattagtcccttcaaagttcatttccaataaaaattcattttgtattcactacactgccttttcttctccttttgccagccttgtgttatttaacaaacgcatcattaacatgagcactgtaagactgtcagattcgatcataaaacttttatgcaaccttagaaatgtgtaaaaacggtcgggcacggtgcgtcacacctgtaatcccagcactttgggaggccaaagcgggtggatcatgaggtcaggagttcgagaccagtctggccaacatagtgaaattccatctctaccaaaaatacaaaaaattagccaagtgtggtggcaggctcctataatcccagctactcgggaggctgaggcaggagaatcgcttgaacctgggaggcggaggttgcagtgagccgagatcgtgccattgcactccagcccaggcaatagtgcaagactccatctcaaacaaacaaacaaaaagaaatgtgtaaaaaccctattagcccctcttttttccccagtatttgacatcctggtaatagtgtgtttagcatcagtaattcatagcatcttgacagtgaatataatattatgctgtgaattgaaacaactttccatttgtgttaaacatttttttttcttactaatttcctataaaatgaatctgtttcaatttttttggcatggtggcacaagctaatataccatgaggttactattaataatgctacagtagaaaacaatgttgtatgtgttactaatatctacagacccattggagataaagataaatgtacataagtcaattaaaaaggaaaatgaaagttggaacaaaaagtccacataaatctcatcctgtgaccttattgccaaataactgcacatatcttttgctaacacttaaataaatacccagtgtgctgaatttgacacctggagaggattctgtccacctgtcatggaaggatacaagagcttcttggaggaagtttgccatttatgggacatattctttgagttcgccataactttttaattttgatgcctaggcttttagccacagacttacaaatcccccacttggcaagacttgctacccaaaccttggttttttgttttgttttgttttcctatagtcaaaaaatgcttcttgggaagccagaaagacaagaaggaggactcaagattaggtttgcaaagatgaaggaaaagcatttcagggagagggaatatcagggaatgtgtacaggtcctaagcagggagtatggcttcttcaaagaattgaccaacaagactgggtcataacgagcaagcaagagaatggcaccaaaataaactggatagcaggccaatgacagaacatctcaggaccttatacaccaggagaattttggacattatcttagaatactgagaagccttcaaagggtaataggatgagaatgacattatcagatttgtgtttttaaaagatcagtctggctgcagagtggaaaattgattacagacagacaaatggtgatgaagggagaaaggttaaaagaacttagtagcctaggcaagaaataacgcaaccttgatggtgacagtggatatagagaaacgagatattttggaggggaatggcaaggctgggtgattagctggataatagatgaaaataaatgctttagaaactggaaaatacttagggcaagaggaatataggatccgaaacctcactgtggtctacttagcaacataattttaggcatgtaaatctggagaccctttcctttgctctcaagttaaatacaacagtcacataatgagcacagtacttagtattttctgtaatttatatccttatttgaaaggtaattttcattccttcttgaacttaaaagacttctgagaaaggtgtttctgaggttgtccatttaggtctgaaataacagaacaagataaagggggaaaaacatgtatctctgataatccatgggacttatattcttattctagaactcttcattgcagtgaacacatgaaaccaacttggagttttattcctgtttcaagtaaatccacttaaaatagcatctgcataaacaaatgaaataaactatccaggactgtgacagcaattgactggaatcagcgtctggtgtattttcttataataaagaccaagaaaaccttacagaaaatataaatatgaaacaaggcccctaaaaaacttaactattctttaattaagtttgtatgaaacgaaaacaattcagctattaacacttaaaacactctggtatgttaagttggagtatttcccatcatgttgtaaaagcacgttacataaccttgctacgtgttccttgtctgaatagtaggaaaatacctattgctatggaccaaatgtggtttatttaaaaacaaagcataggggctgggcgcagtggctcatgcctgtaatcccagcactttgggaggccgaggtgggcaaatcacgaggtcaagagatcgagaccatcctggccaacacggtgaaaccccatctctactaaaaatacaaaaattagctgggcatggtggcatgcgcctgtagtcccagctactagggaggctgaggcaggagaaacgcttgagcccgggaggcagaggttacagtgagccgagatcacgccactgcacaccagcctggcgacagagtgagactccgtctcaaaaaataaaataaaataaataaaataaagcatagcaaagaggttaaaagaacctcttcagtgaaagtaacttggaaaactatgattttgattggctgggtgtttgggtggatggatggatggatgaatggatggatggatggatggatgcatggatagatggatgaagggttgctattgataagagaaggtagatggtgctgactaaaggaagtttttttagtataattttcatcctggaacttaggtatatgtggcaaaatttggcaacaccttgttgctatccaagagttggtgatttaggaagcatccaagcctttgtttcttcaaagtttacttctactcatggctacagcatgattagcaataccttctatgggcatgctagtagacccagcagttcaagcctgcaggtctctgggcataaaacaggtcacatagtgtttaggccatccctcagtgactcttttagattgttgtgtggtgctaataagatagtgttttcctaatattagtaagtaaataaataccaaaaaatataggtcacatgtctcttcaactgtaacatccagattgtatattgattaaattagaagactagaacaatgaaataatgtatcctgaacaacctggttttagtagctgaaagtctgcaattgtgtaagttctatacagcttaggaaatcgaagaatatagtactttagaaaaaacatttatgcacatttgtagttaattattttaataaacatttttgaaagttgcagtaggctggggtattgagatttaaaaacaaacaaacaacaacaaaaaaaacagccttcctcctcatggagctcacagctatgagggagaaaaatgcagatacgtaattgcaaaacagtgtaatgaaggctgatagatgtatcagagcatgacctggcataattcatttccccagggccatgacagaaggcttcctacatgagagtccttaaaattctcattattttggatccttttatagtgttctttaactgcataaaataaattttataaaagtacaaagcaactcaattatattgaaatacaggtgccagaatacttttaaaaataaacttgttatataaaagtacaaggcaaatcaattatattgaaatacagttgccagaatactttaaaaaataaagttattaaatagtaatgtatgtacttctttattaacacattaagtaacaaatatagccgcaagtctaataccatagtttcaacaccatagtgaatgtaaatggtatttggagatttctgcaactaccttaatgggatatgaaaatatgtgacttctgttgttgccagtagtttactgcctaccttcctaactgaaggaaatgctaaatttcagtaaaaggttaatgaaatagagatgtaattttcttttcatccaagtttacaggccccatattaaggacccgtcacagaggagggagcttgatctgatttttcaatggtgagttggagtttctcagaccaatgaaaatggagaagccacccaggcatgacagcgaactgtgcaaaagcggaaaacagatttgcccttcaagaaaattataaagcttgatactgctggagaaagggccaccaggcacaggatgatgcagaaggagaggaaaggccttggatactaggtcaaggcttgagtgaggaagggaagccagtcaacagcatcaagcaaggagggtaccatgatcaaagctgagctttacaaagagttttctgtgtgagttttgggatatagattggagggagaagagtctggcagccccagagagagattgtgagagtctgagattatctcatgatggtaagcatgaagacaaagctatttttggaaatattacaaataaatgttaaaggcaaagtatgagggaaaaggcgtttgggcaggcagttcaattttatgaatactcagtgccgattatgtggccccagccaatatacctagcaggatggagggggcataattctaagcaggctttttattttaaaataataatagtttctgttaactaagctcttacaatattcaagtattattcatattctttttgaatattacctattacccttaaactttcctgaggaagatactgttattattattattattatccaattttacagataagaaaactaaggatcagacggattatatcatttgcctaaagtgatgtaactggtatgttgcagagccattttgttctgtccacctgcctcccttagtcaagctaatggcctttatttttttttttgcttatgtcaatactatccaaagcctgtgaatattgtaggaaatgctaagtatcagttacccaagaagcaaagagaagagttttaagcccctcatattgaagggctaggtatttaaacactaggattttattttaacaaaatactgccctgaaaatcaagtaccaaatgatgaaaatcactaaaacaagagtttttaatgaaattttaccctcactacacatgccatttaattgaactaacataaaactctttcagaggtatttagtggccaaagttccttatgtaacataaatgaaattctgggttgctgcacagattcctaaacagatatagattatgggattattttctttaaatttacttctgatcacttcaccttctcagcaacccagatactggcaaagtggaagatagcttgatgaaacaccaggctgtagcagtctgactaaagcttttacagatttctaggaaaattacttaacaaaaaaaaaaagaaagaaagaaaaggaaggaaggaaggaagaaaggaaggaaaaagagaaagaaagaaagaaaagaaaagaaaggagaaaaaaatgttgcccagcttagaagtgagaggactaggtttccaaatccctgctttaagaccttgtcacaattaggagcaattccctttttttctcccaggcttatttttgattttttttttaaagagtgttagaattttggggaccctgagaaatctgtcataaagatagtatatcataaccactgttatctttccaaagtattgccaaacagcacttagatcacccacagtggttcagccttctgctagtaagatgagatgcctttattttccacaaaggatatcaagccctgaaccccacccagagagcaaagaagacacagaggtagttgcttgcaagtcaacaccattctttgtgagcgtaactaggcaatggctttgttactggtggaggatcttgaatatgagttgtccaggttcttggcgttttgagcaaagaattggacaaaacatacaaacaaagcaatgaaggaatgaaacaacaaaagcacagatttactgaaacaaaagtaaactccacagaatgggagcagactcaagcaagcgactcaagagcattggttacagaattttctgggtttaaatactctctagaggtttcccattggctatttagtttacaccctatgtgaatgaaggagtggcccacaaccagtctaattcgtctcggaaggctaccaatcagaggctgatgttacaaagttataccgctatgcaaatgaagacgaggtcacaaccaatctgattggtttcaggagaggaccaatcagaggtactttccatttttcatctgcaatgcagaaagggtggaggttacaaagggagtagcctctgatccttttgttccttgagcgtggaaagttggggttttccttttgatttagttctagaagtcagcatgaatcagccttaggttccctgcctccagaccctattcttcttcttcacctagatattctaaccttttgttaccttccaagaaaaaatgattggtactagcaatgggcagccacaggtttgttatcttctgtgagtcatgatcaatgaacaagtcctctttattctctaagcaatgctaaaacactaagcaaaccagtaatttcttgacagatttgtcacaggaattttgtaagcactttacatttgttacactgtagaaagtacatgtggattttagtcttacaactgattacagtcataatttgtgtggcagtgtttagacaactttaggcccataaagggaaatctgaccagcatttctcagaacaataccagagacgggtccatctttatttctcccttatggactcagtttgaaaacacggattcatgtgactggatgtctgatcaagatgctgttatttaccatgctagttattttatacaaacctcataacaagcagtattagataattagaaatcactttatgcatcttaaccttacccagcctcacacacacctgtgttttagtcctttctaaaccacaaatcccctgcaactgaaaatgattccataacattttccaacattgcattgttctgtgatgatagggtataaaagatatataagacattgttcccatcctcagagaagtttcagtttgtacaaaagaaatacacacaattgcctattatttatattttagcacaagggaaaataatctcatttttaaaaattcttgacacagggaaatagatggaaaataaattttgaaaacttatttttaaaccatgtaggagtacttaatttgcagtgatcaatgactcaaagctcagcatgtcttaaatattccatattgctaagcagctgataatacaaatccatccttcattccgctgcttttctcttgatgtatctagcataattggtgttttcctatgtgtgtatctgaattgcatatttcacagttactgtagaaacctattactccttggcatttagcatggatgataatgttgctccttcagtaattttagcctagaccaaacatttttgaaatggtgttgtacattagggccatcttgcttatagattaataaaatcactaacctttacactaaaaaaagtgcactgctcatttttaataattatcaatatataaagttattgtcagttaagagtcagaatgcattttttaattctcattcttccttttgtttttcttcagcctaatatgatttttatgtcataaatccattctcattagtcttcacaaacagaaaagttatttcataagaagaactgagtagcgtttttctaatttgtccattttggaaacaaatgaaatatttattttaactgattagtgtttctataaacatttaactttggctggacacggtgactcatgcctgtaatctcagcactttgtgaggccaaggcaggtggatcatctgaggtcgggagttcgagaccagcctggccaacatagtgaaaccccatctctactaaagatacaaaaattagctggatgtggtggcgcacacctgtaatcccagctactcaggaggctgaggcaagagaattgcttgaacccaggaggtagaggttgcagtgagctgaaatcgcaccactgcactgcagcctaggcaacaaagcaagactccatctcaaaaaaaaaaaaaaattaactttgtggggcctaaatattcagctcttcctgatatttcatttttatcattgtaaaatggatacattattatggcgatagatatcttcacaaaaattccgtgtgatataataaacatttgaaattgaatatagttattcacttcctaaaacaacaaatcttggcctgtgtaatcaaatttggcaagaatatattatcatccttattcatatatgttttacaattatgtgttgtgctatagctaaacacataagtaaatatcaataaatgaatgtgtaaatttttggcaattaccgtatactaatgttggcacagatacaattattgttaactttattttcatgttcatataacttaagtgtgtatgttttggcttgctatatatgactagagtaaaattcagaaacctaagcatcctaagttagtattattgcttgttatagctggaatttcagtgtatactaaagtgatcttcttttcttatgcaaactaacaatgagtgccatggctcagttcaactgcagagcaattacaagaggagttaatgctatactttctttatatttatctttttaatatccggaggctgccttattttacttaatacctagattgttgaaaaatatatcaatacaatagaaaaactcataatttttaaaactcactcatctaattatgcattaaagtactaactccttttcggttccagtagctacttatggacaaatccactgactcctttattattgtggaaggcttcccaaggctgaggagaaaggagttggttggagtcaagcaggccaaagcagggaacatgacattgcagaaagagggatagcatgtgtgcagaagaaagagagagcttaactacaatttgagttgccttttcaagaaaaatgaggaaagacacagaatccatagattttaaaccataggattaaagtaaaattatatacactaataacaaaaacagaagaagaaacaatattaccctgaaagagtattttaaaaaacaacaacagagctttgaaatctcaccagaaaaaaaagaagggagtagccatataatgcaaaaagtaaggtaggatttttatgaccttgaaatattaaagccttaaaagacagagacaacaaattgaacaaatactagaaaaggctaagaaatctacacataaatgaaactcaaataaacatgaatctatgagattccaagagagacaaacttggtaattatcctgtcagagagaaattggagcaacagaaattgtagcactaaacaaagaagcttaactgctcagttactctataaggaagagtcacaaaggaacaatttaccacctcagtcagagaagcactgagttaagatagaggcagtcatgagcacctcaataaacagcctcacaaagcaaaacaaccttgacaagctagaaaagtcatcatccttgacattactgagcttctgtctcacaaataagaggcaggggtcagccattcttcagtgggtgagattaatgggatgaagcattaactctgagacttttaggtcacctttcatgctgtccaagtaacttggaggaaccagtgtgctcgctaaatgctgcattcaccaatgcacattgagtcactgggagaatcagcattaccaatttgcaatcatatatatacagatactgttagggactctttcccacttgtttttctttttttgaatttttttttaaatctttattttaggttttgtggtacatgtgaaggtttgttatatagacaaacatgtcacaggggcttgttgtacatattattacatctcccaggtattaagctcagtacccaatagttatcttttttgttcctctccctcctcccaccctccctgctcaagtagaccccagtgtctgttgtttccttctttgtgttcataagttcttatcatttagctcccacttataagtgagaccatgtggtatttggttttctgttcctgtgttagtttgctaaggatgatagcctccagctccatccatgttcctgcaaaagatgtgatctcgtccttttttatggatgcataatattccctggtgtatatgtaccacattttctttatccagtctttcattgaagggcatttatgttgagtccatgtctttgctattgtggatagtggtacaatgaacattcccatgcatgtgtctttatggtagaatgctttacattcctctgcatatatacctagaaatgggagctgggtcaaatggtagttctgcttttagctctttgaggaattgccatactgctttccacaatgggtgaattagtttacactcctaccaacagtatattagcattcccttttctccacaacctcaccagcatctgttattttttaactttttaataatagccattctgactggtgtgagatggtttctcattgtggttttgatttgcatttctctaatgattagtgatatggaatttttttcatatgctccttggctgcacgtatgtcatcttttgagaggtgtctgttcatgtcctttgtccactttttaatggggttgtttttcttttgtaaatttgctaagttccttataaatgctggatattagacctttgtcagatgcatagtttgtaaatgttttttcacattctgtaggttgtctgtttactctgttgatagtttcttttgctgtgtgcaagcttttaggtttaattagatcccacttgtcaatttttgtttttgttgcaattggttttggtatctttgtcatgaaatctttacctgttcttaggtccaggatggtattgcctaggttgtcttccagggttttcagagctttgactttcccacttttcattctttcatttggcacacattactgaatgctaaccatgcaccaggtactgcatttgtgccaggtgttaaggaaacaaagcatgagatatagcctctcatcagaagtaggaaatatcttaggtttttatttacattttgaacccgtacacaagtatatatttagagagatgttggagacttgggtagacttgctttttcagaatatattcaaaaataagccaaaatattttttaagcatttgaaaaaaatacttgtaccacttggaatcatggtaggctgtatattacagaagaacccaaaataacagtggcttaagcaaggaagaagtctttctctctctctgtcatgtgaaataaactcaagggtaaggagttggggaccaatgtgctacatctagtatcatcaggcatccaggctcctatccttttactgtacccatacaaatgtctttcataagttcaccacatgggccagggtggctgcaggagttctaccagcatagcattcctgtgaagcaagccagaaggaaaggcagaaagagcagctcttcccagctgaatcagctccctttgaagtcttcctgaaatcccatgcaatacttctcattggacagaattaatcccttggccatatctagttgtaatgtgaactgggaaatgtattcttttgtctagcagtcgggaggagggaggtggagccacaatgtgcccagttaggaatcacatttctcttaaaaaggaggagggaagaatgaatgtagggataggccactagcaatctttgctacaacagtacagctaggggatatgttaattttatgagacatttatgagtggttctgcttgacagcaggaagtacaaatcaatggaccaaatagggattcacctactttcacgatttagttctctctgtgctcattagaagtctaaagtcaactttgcaggtgacaagaaatgtggttgtcttaaatatttaactctagctttgcaaagtaaaaggaatcattaatatctctttcatttgtcctgtttccttggcctttgaaaccagtgaaacagctaccttttgttgtgtttgttcaaaatgagtgatctgaacaaatgagtgatttccttatcttttcaaaaagaatggtcacagtatctgccatttattatatagttaacattgtgtggatcactttactaagagctttgcatggattctcttttatccttcagaaagactgagatagatgctattattttccccattttaccagtgacactgaggcttaaacaaattaagtgaggctgggcattgtggctcatgcctataatcccagcattttaggaggccgaggccagtggatcttttgagcctaggagttcaagagcagcctgggcaacgtggcaaaatcccatttctccaaaaatacaaaaaattagccacacatgttggtatgtgcctgtagactcagctactcaggaggctgaggcaggaggaacacttgagcctggaaggcagaagttgaagtaacctgagattgcaccactgcacccaccctgggtgacagagtgagatgctgtctaaaaataaaaatgaagaagttaagtgaattttagaagatcatatggtttagcggacagcagaaccatgctttaactgagaaagatctttctctagaattcagcccttaaccactaccctcttcattttgaaatttaccaattaaaatgtgatgctcctattgtccaagggagggtgtaatgtaccctttgggagtggacagtaattccttatggtcaaaggtgaataatacctataaaatacctatgttgatatactttaaagtattcaccaccttggtttttctagagcagaacaatgatcttatctatatggttctgaatgtgagcatagttgaatattctaagatgaattgttgattttattttgttttgtttgggcaattgtttttaaggcctctgttacacaggtagatgaacatgagaaaaatcattgaagacaagaagcaaatacagatgagcacttacaaagtaataccctttaggcaaattggagtatatctgtacaatcatatgagaaaatgaagtccattttgaaagctgttcttttctaagcctcctcctttagttagtgagatgaattatccatgtgaacctgaattttccttgaagaaaaggaccactgtgtgctaacattggtattttgacccaccccaacaccacttccctaattcctattggtttcattcaccttgatttaattttatgaaattttgtcagtacagtagggtctagttgtgagagcaaatgattacacagagttgctggcatcagaggacatgatgctatctagggggatgccttcaagctatctcatttcgtctgtgtcacacaacacaacttccaaccaaatgtcattctggggctccaggggctgattgtttctttcacccttcagtaaaaactcactttgtcctccacattcacacatatagtttttcatgaaaatcagaaaaccttctaaccaactatgcaagaactgagaaggaaagcactgtaagttaaaatgtgtttcttcctttgattatgttgtccctgtttgaaacacttataatatgataagcctaatgccaagtgttatagtgtttgacaaaaaatgtaaaacagatttggttaccaaggttctttcttggtgcataggaagatacttgggtaacagatacagaatcattaattactgaagcaaaatagcacaaatgggtcccaaaaagagagtcaattttaagaagtatttcctcagatgcagaaaaaatatagagtgctcactttaaaataacctaacctatattttatatcaacataaagaaaatatattaaaggcaacgtgactgcccatcacaaagaatgcagatactagatattcaaatttcaagttgtgataccccaaacagtaaaaagtaattagttttggataaaagttcttatttctaaatttataacttataaattatttttaactttatcaagtggtcactttaatttttctttttattttaaaagtcatgaatttccattagtccatattaaaaactgcatagtctcttaaattcaattgatctaaaaatgagtatttctaaagcgtattctgttggagacagaatccttgtaatatttcaagcaaaaattaactacttaagaaactaagtaaatttttctttctttaggtatttctttatctttattttaatttgtcagatgagggaagaatataatttccaaaatccatgaaaagctcagactgagttgagtagagaccccacttgcttctttcagtccacttgaagtagcattgaaagctgagtgtatgactataaatccagttgtgtttaaatgagtttgatcttcatggatactaaatacaaaacactttagtcacagatacctcactttcttgattaattatttatattttatatgttatgaatgctttcttttctaaaaagaacactgagttgcttttgaacttttattttcgaactctgaaaagtttatactaaaaattagggaatatttatgggtatgctactaggtatggaaggatatttatgagcctcttagtataagaactttatcgttacattttaaaatagtacaattctaattaaagaatatgtacctcagtgcagtgcttacattaaactttgactccatagctgttactatgaccctaaactgtgaagttaaaggactgtctatctaccctatgccttgaaatttttaaaagttctcaataagtagaaaagctagtgttaggagtactatttagaaatcagcacctgttatcaggtaacacaactagttaactatattggaaggaggcatgtgtgttgcacagctttttagggacacatcaatgtttatacaaatatgaagagagaaagtaaggcttatgtaaaggagttttcagacagtaatgatgagccccaagcaaaactgtgttcttaccttatttttatttatcctttttggtaaagctctatgacctacgtgtggagtgtgtcaccaatataatgatcagtttgtaatgctttggggggaaaaaagcatactgataacttaagacatgtgccagtaatcatatactatagctcagaaccaggatgatatagaaataagttgagctggtatagcagccaggataggataggcattactaatattaaaaaacaataacaaaatctttgtggtttaaagcaacaaacaactctgcttatatctcagatatccaaagtaatagagcctccaccattctgggatgccacctctcacttcaaggcttcaagatttatcacagaggtgaagcatagagctggagagttgagcactagcaataaatgctttggcctacaactattatttcatactctcattgtatggccacatctagtcacttggctacccctaacttcatataaggaattgtattataattctctatctaccttgaaatggagggcaagtagatattggtgaacattatttatatctttcacaatgtatttgctgatttatttggggccaagattccctattattctttctgcaaaaggccatataaaattttcattctgctggctggatcactactgtaagaagtattaatgacagataggcttgtcttagaaaacatcttctcctttggtgatgcccattaaaaatgataaaattcttcaattaacaatttctagcactgatttggaaaacctgactcattctgtaccagtatcattggtcaaagatcaagtacgaaaaagtgtgcacaaacgagtctgtcagtttttcagaaagttaatataaatatcatatgtatagttatatgacccagcaattccacccttgggcatatacccaagagaactgaaagcacgtatctactcaaaatcttctacacaaatgttcatagcaacagttttttttataaaacagcgaaaaaacgtagaaataacccaaataccccatcagctgacaaatagatacatgaagtgtgatatatcctacagtggaatattgtataactgtaaaaaacatgaactactgacaaatgctataatatggctgaaccacaaaaacatgctgggtgaaagaggccagaaacaacagagcacattgtataattacattgatataaaatgtccagaatagcaaatccatagagacaaagagtagattcgtggttgccagggggtgatgaaaagtgggaattgggaagtaaaggatttattcttgagcaatgaaaatgttccggaattggatagtggtgatgcttgtagaactctgaattattgaaatttactaaactgcaagctttaacattgttaaaatggtaaattttatatgaattttatctcagtaaaaaatttttaaaaatatgtgctatagtgagtgatcaccacttttccacgtagaactttctgcctccattttactggggagtgtaaccattgcctcctactgtatcttcacaagacaatacaagtttccaaatctatcagagtgtcacatgttagtcactatgctgatcagttttctcaatggcataactttacatttcaacaaactaaaggctgagtagaaaaaatatctgatttgaagtcagagaacctttattagagacatgagcaagtctcttagctttccaagctttgttttcttcatctgtgaaacaggaatgctcctgcatacttcaccaggataccggaaaagaccagatggtacaatatatgttaaagtactttctgtatttctaatctggtcttctacttttagttttagcttattttctttatattgttcagcctgctttcctttaaataaacttcctgtaaaaatctgaacattggaagtcaacatccttaggttggaaccccagctctgccacatttcagttatgtgaccttgcttaggtagttgaacctctgtaaatctgaggtttttctgtaaaaagggaaataaaaagcctccctcatgatgccaatgtaagaattaaatgagaacatgtaattatttagtatagcctctttgcatggtaaactgtctgtgatattagcacaataaggctcatgataaaattcaccctcaaaaatcttcatagctacaaatactagtcgacttacttggtctgtttgcaaacctaagaatttcagtctcttaagtattccttctaatttttctattctgtctcttcaataatgaataatgtatattgtcaccagagaagattagttactgtttttttctctgaaaaaagcatgttgcacactaattagattatatttgtatgtgttgattatatacaaattatatgcaaatctgattttactctgaaaagtatcaagactgaaaaagttatttatacatgtatgtatatatattatgcacacatttatttacctatatacacatatgtatatgtatatagatatacatttatatacatgttatcttacacatgcaaaattacaattgaggtttttaactatgttgatcaaacattcattcagtgtaacagaaaaacacttaacccccactggagttgacagatttggcaaatacagctctctttttcttccttctccattagagagttcattggtgcattttgttcagatgaaatgcaagaaccaacccaataattcattaaaaggattagacaatcagttgctagaaattccggcctaaaataccaatatatgttaaatcgcaaaagcaaagaaaaaccattctggctactaggctaaattgctgcctttaacagtgctagagccaaatgctcaatctgggcaggagcctggttgcttttaaacagtagacctcactactataaaattttttgcatctaactcaggagtcagttgaatcttagcctcaacgtgtaaggggaagaggtgagaaatatgactcttttacagagttccagatggtcatgtatggatttggtctgagagccgtgaattgtaaggaacaattcatggtgtgattcaagcttcaatcttgttatcttcatggactgaaatggagaacgaggtgtctgatggaactacagagaaagggaactaccaaatcttctatcaatataagtgacattcattcatctcattacttactcaacaggtatttattgagcacttatgtatcaggcaacatggaaatctctaggaataaaagctgtacagggtcttgagaaggtcacaatgcagtaagggaaagcaaacacagcatgaagctgttaagaaatcatggaatgcatgataataatatgagcgttttgtgatactctgacagtatagtgatgcctctgattctgctggggtcaggaagttgcatagaggaacatgagtcttgaagcaaaggaagtataggaaagataaggtggaaagtaacatccagagaaaacaatatgaggaaaagcatgagagcatgtcatattctaaatcctgcagtctctttggactggctagcacccacggcacctatggagaaatggcaagtagagacaggcaagatgggcaggggctaaatgatgccataaaaggagtatgattttcatcctataggcaatgggaagctctttaggatttaaaaagcagagaaatctgatcaggttagatttgaggcagtgtagagagtggagtggacagagtctagaagcaggcccctttagaagactattggaagagcccagctgagagatggctgggataagaatggagagtacaaggctgggcgtggtggctggccaacatggtgaaaccccaactctactaataatacaaaaattagccaggcatggttgcacgtgcctgtaatcccagctactcaggaagctgaggcaggaaaatcgcttaaacccaggaggcggaggttgcagtgagccaagatcacaccattgcactccagcctgggtgacagagtgagactctgtctcaaaaacaaaacaaaacaaaaaaaaagaatggagagtacaggaactatacatgcttgagacatagaattgatagaactggtagctatttaaatatgaatgttctgcaatcatgctcaggtttttagattgggagacacaaaaggaacaataggtttggcaagaaagccaaagattgagctttaggttgttgagtttgagacacttggaaaacatccagataactgggcaattggaagtgtagttctggcacttagagaagagaaacaaaggaaagaaagaggtcatgggggctcagtgtattggttatagcaatggtcatgtaaagttgatatttcccagcaaagcaatgaaagtagatggcccagaacagaagcaaaggagaaagaaaagatgaagatgccactatctgagaggtgggagaaacaaagggaatagtgtcaagcagcacaagggatgagaacattgtaggaaagagggaaaatttttagaaaatcttatcaccaaatgataatagtatgttggaaaagtgctccgagttacccatgagacaaccaccagcaatctctgggagagcagctttaatagagtggagaggataatttgcttcatgaaattagtaccagtaggcccctagccttttaaacttgtttccaactatttactcacgtgtctaagatttttttttattctcatgagtttcctacttacatggttaaacagggagaggaaatcaaccgacatctatgctctggcagggaaagaaggcaggtgttccagagttgttttcagtactgatataggaatctgtccttcacgaggctccaagcaaggcatggagtcgctgtcccgactggtagtggcggtgttctctggtaaaccagattccaagtcacctgctgaagctggtgagagcagtgaggaaggggatagtagagtatggaagtttgggaatagctgttaggggaaagagagtgacattattgcacaaaataggtgtcaattcatgcataaagaaggagtgagtgagcacaattacctgcagaaaatgaaattggacctgtggccatggatcattcctacatctgtgtttgccaccattgattttctgaaatttagggcattctagagacaggcattttaagatcaaacactgttcttagtgctccatctcattgagtttaatgagacatacttaaaaacaaatggaccgttttgcagagggctgagttcacacccagcttcacagagtagaaactaaaaatgttctaaattaactcaaatcaatttttaaaagattttctgagctgagagcacatttggccaagaccctgggtgccacgtgaaacatataaacgattgattgaatgaaaataggccatcctttctcttccttagacactaagcagccttttgtcctgctcttttttactttaattggaagcatttttaggttttagagccagttttgttctaaatatatgaatacttacttttcccctttctgaaaagtcagagattttctccctttcttttttttttttttaatttatttttttttattatactttaagttttagggtacatgtgcacattgtgcaggttagttacatatgtatacatgtgccatgctggtgcgctgcacccactaactcgtcatctagcattaggtatatctcccaatgctatccctcccccctccccccaccccaccacagtccccagagtgtgatattccccttcctgtgtccatgtgatctcattgttcagttcccacctacgagtgagaatatgcggtgtttggttttttgatcttgcgacagtttactgagaatgatgatttccaatttcatccatgtccctacaaaggacatgaactcatccttttttatggctgcgtagtattccatggtgtatatgtgccacattttcttaatccagtctatgattgttggacatttgggttggttccaagtctttgctattgtgaataatgccacaataaatatatgtgtgcatgtgtctttatagcagcatgatttatagtcatttgggtatatacccagtaatgggatggctgggtcaaatggtatttctagttctagatccctgaggaatcgccacactgacttccacaatggttgaactagtttacagtcccaccaacagtgtaaaagtgtttctatttctccacatcctctccagcacctgttgtttcctgactttttaatgattgccattctaactggtgtgagatggtatctcagagtggttttgatttgcatttctctgatggccagtgatgatgagcattttttcatgtgttttttggttgtataaatgtcttcttttgagaagtgtctgttcatgtccttcgcccactttttgatggggttgtttgtttttttcttgtaaatttgttggagttcattgtagattctggatattagccctttgtcagatgagtaggttgtgaaaattttctcccattttgtaggttgcctgttcactctgatggtagtttcttttgctgtgcagaagctctttagtttaattagatcccatttgtcaattttgtcttttgttgccattgcttttggtgttttggacatgaagtccttgcccatgcctatgtcctgaatggtaatgcctaggttttcttctagggtttttatggttttaggtctaacgtttaagtctttaatccatcttgaattgatttttgtataaggtgtaaggaagggatccagtttcagcttcctacatatggctagccagttttcccagcaccatttattaaatagggaatcctttccccattgcttgtttttctcagctttctcaaagatcagatagttgtaggtatgtggcattatttctgagggctctgttctgttccattgatctatatctctgttttggtaccagtaccatgctgttttggttactgtagccttgtagtatagtttgaagtcaggtagtgtgatgcctccagctttgttcttttggcttaggattgacttggcgatgcgggctcttttttggttccatatgaactttaaagtagttttttccaattctgtgaagaaagtcattggtagcttgatggggatggcattgaatctgtaaattaccttgggcagtatggccattttcacgatattgattcttcctacccatgagcatggaatgttcttccatttgtttgtatcctcttttatttccttgagcagtggtttgtagttctccttgaagaggtgcttcacatcccttgtaagttggattcctaggtattttattctctttgaagcaattgtgaatgggagttcactcatgatttggctctctgtttgtctgttgttggtgtataagaatgcttgtgatttttgtacattgattttgtatcctgagactttgctgaagttgcttatcagcttaaggagattttgggctgagacaatggggttttctagatatacaatcatatcgtctgcaaacagggacaatttgacttcctcttttcctaattgaataccctttatttccttctcctgcctaattgccctggccagaacttccaacactatgttgaataggagtggtgagagagggcatccctgtcttatgccgattttctccctttctgaaaagaaaggctagagattgaaaagttaaatatttcttctctgcagctagtaagaaaagaaccatttggttctaactgtacttgcctggactctaatttcctctatttgagtttctaatatatctgcattcagttcccccagcactcacatcccacagtagaggagcatcattggctattgtctaatttccccaagggaaaggtgtctacaattgagaaaaatagtctgaattccaggcacacttatttactacaaactctctaaatattgtaatgtccttttactatgaaattttgcaggctgtgatttcaaagagagctctttctttctctggcttttctgtgtgggcctcaacgaaactggcccttgctgctgttgttgctttctgaaagtgagttatcaaaattactaaccaattccattttgggtgttaatcaaatatttgtggctttcaccacgtggcaatttaaaaaccaggctcagcttaaaataccctttgacaattggttttgccttctttttatttcattctgaaaatgactaatatatttacgtcaattcatctaccccctaaaattattttccataaaccaagtacaaactagcatatgaacctacaagaatgccttgatttctagagctgttgtgcattggttaattcaataaatatatattggtgatccaccctgcagggggctgcatgctgttctacagatacagagttggtaagcatggccttatcccttgggtgctcagaatctattttgcttaccagtcagtaaagagcattgtatgttacaatgagggccatctccatcagctttactaaatgtggattagcctgaaatttaaactgtgtatcaataaggagaactccattttatttaattcattccgcaattccttttataaagcatagtccttatgtaaatatcttcatattcatttctcttataaatgtaaagtttcttaatgtagagcatacctataatttctgcccttgaaattagtatgtaagagtaaatgtttgtgagaagttgcagcattctaataggtttttacactgttaaggtttgtgtgaatttagggttagatcataggtatttctgtctttttctttcatgtacaatcttagaactgggtggattgttagacaatgtgtgctcttgagatagaaaactttgaagtctagaatttagaccttagtccaggtcacactgtggaaggggacaaataggcctaatatctgcttttcaccaaaatagaccaaaagaaaagattttagtctatgcttagagtattcttatgagcattgactttgtgccaatgtatttaaattctcagtttttatatttagaaaaccttaccgaaattcatcaggccacgttcaagaaaggcttaaagagcaaatcttgagtgaaaaatgtaatagccattcctagaagttgttcctttttaaaaatgccattgttaaagctgtcgttataatacatgctctctgtaaaaggtcaattagcagattccccaggatatttaaagttttgtgccaccttctaaatgtcaagttgaagttgggaatcttgtaatatttggaagaattttgccataaaatagtctatatgatgaaaaaacaattccaggtcaaggatgaaagagtggtaggaaatcttgtctttcctccagaagacagaggcagataagggcttagtccagattagcacaaatacagttcccacaccgagccccactccttggaatggaaaggaaattgaacactttttgatacttgacctcctttccctgaacgaaatggtatggaggggcagtatggagtagcagaaggaatagtttttcatgcttttttaataaaagaaaggctttacgcctgcacatacactatggagtatgttttgggagagatttgaaaggataaagggaagaaaataactagtgagacttggtgttggtcctggttatggccagagaaatgaaattaaaagtttggtccatgacttggaacacttgttttcagagcctggaggaaaagaggtgaggacagatatggatgtagaaatctttgtttctgagtttaaatgtgagaaaattcatgcctagtcccttcagttttttgctgagaagatgtaagggagaaaaaataatatctttttttgacctatctcaagagtcataatgggcattactgtaacaaaagagagattaacaagagaaaagcataacaaatgtatttaaccaaagttttatgtgacacagccttcaggcatgaagattgcacccagggaaaactatatatttttatgaacagttgttggaaataagagtggagaacaaaagggtacgatctaatagtaataacctgggaagaactcagtgaggcctgtttgttcagattcttcttggcctctggatatagagaaggaaccctatagactgagggtcttacgacctactttcggaggatgtaggtcagagattttttttttttttttttttttatgaccatgcttcagaggcaaaagtgtggaaaagattagggtgtgagctccaaggtgccatattatggagcagcatgttctgagccccaacaaagacaaggccatcttctaagaaatttgtggaggaataaggattgagatttgaagagaattgtgggtgtttgggaaatctatctattattggggacaggaaaagtttcctggcaacagtgagtatccagccaaggttgaaaactttgaatgtgtatttgtatcaatatgcctggttgtgttatttctctgccagtacagaatagtctagaggttgaaaagtgttcagaaagagccaaacatgaagttctgcagggtggctttaatagagaaacctaaatatgaagacattgaggatctggtgagagtggttagaaggattcacatgaaggttccatagagagggaagcagagccatggagtgagtgagagatcagtggggaatgaatgttgaaggtctctttgaggtagcagagcagttgttcttggagtaaggaagttagggaatttaaaaaaagggcgaaatatctccacaggggatctatataggtgttctagattagggatcagcaaactttaaaagggccagataggaaatattttcagctttgcaggccatatcatttttgttacaacttctcagctctgtccttaaagcatgaaggcagtcataaacaataagtaaagaaatggacatggctgtgtttctgtaaaccttttttacagagtaagtggtacgccagatttttctcaacagttgtagtttgctgatgccaggtcatagatgataataatttccaggatgtggataaatgtaagcagaagtaaagacttagaaatcagggggctaagaaactttaagatgtgtatattgactaaagccatctagatcaggatttttgagaatccgtttgaggctggtgatcatgaattatagaagagctactcatctgctctatagtgtgactccttcagctacatttggctgtgtggctgaagtcacagataaggcaaatgtttgcattcatatagggctaggatttttaccagatgggtataatggaatgatagaggagaagggaaattcaggatattgaaatgatgggaagtggtcagtaagctaaagaaaggagaaaactgataatagcaagtagaggggtcagttaactggtgatcatcaggaggtctaatacccaaatcagcttcacgagggcagtgactgttttattcactcacatgtcccagcacctagcatagtgtgtggcacatagtaggtcacaggaagatcatttaataagcaagcaggaaaagtgggaagttggggtcacgcttggatgagtggtggaggaagttatttgttatggatgacatctcatatgcctgaaatgcacacacaataagttctcagtaattattagcctttatcattatgctttttgaacttttctagggactacatattttcggagaaataaaattgagaataatttctctgcaaatgagtgagttgacctttcccaaatgagtatcatttaaggccattggaacaattagtattgttaaatttaacttcatatgggcagaatacaaaacaaaatactagtagaaattatctcctttccaaattagcctagtctggttctcaaagccagacactcagtgtacttacttctaaagccttcagttgtctagtttagtgtgcttatcaccagtgtggaaaattttatatttacattgctgaatcacctctcagtacatttgaatggcctctcttttgctttttgtctagggctgaagtgtcattcaaaaataggggtgactcaggaagagtttacaggagggagaaggctgaaatgataacaaatctaatttttaaaccatgccagttgtgttagtctgtttttgttgttataaaggaatacctgagactgggcaatttataaagaaaagaggattaattggctcatcgttctccaggctgcacaggaagcatggtgctgacatctgcttctggtgagggcatcaggaagcttatggtagaaggctaagggggaacagccacctcacatagtgaaagtgggagcaagagagagaagagggaggttccaggctctttttaacaaccagatctcatgtgaactgagtgagaattcactcatcaccaaggggatggcactaaaccattcatgagggatctttcccccatgattcaatacctcccaccaggccctacctccaactttggggattacaattcaagatgagatttggaaaggaccaacataaaaaccctatcaccagtgctttcatatttagttacatgaatcaaaaaagtgttttgattttgaacattaagaaatattctttcatatccttttcagacaacttgtatgtcttttggatgtctttttcagatgacctatttctcctttcacaacccatagtatcacgacttgtacacagtaaatatttaataagtctgtgctgactgatctttaatgacaacataagcagttctctgaaatgccctttgctctacctcttggcctggtaaatttattttatgattcggtttcaatgtcacatttaaaacggttcccagctctcatcgttaaaatgaatgggcccctgttccaggtagctcatacccagtttccattacattgtcgttgttcatctgtttctcattcttgccttttatctaccaaggagcagggagatttgggcttattcatctttagtatctctgataccttgcatgtgcttgccatctgtaaagtgctccagaattttctggcaaatgattgtgtgacagggagaaaactcattctataagcatgatgtaggctttagttggcaaaccctgccctctaaaggtttttgcttctttaaattttttctgcagttagaatactgctgtcaaatgagcaatgagtaactgattatgactttgtgatccaattagcagatgtgattaggggatggttagcctttgtttctatacctacttcttttaaattcagaataatccataattgatactcagtatatctttgctgaaagcacagatttcaccaagatgttaacaatggccatatttgagtagtagtatttttatttaactgttttctttagacataatgtttttcgttgtttgaattttctttttcaggatatgtattagaaaaaaaaactattttcattttttaaaatagatggtgtatgaggtagacaattgagagaaatgaatgctttgatgcaacttggaaccagtcagggctggatcacaatgaggcagtctacagtttggtaacaaatctcagtggtttaggaaagcaaaagtttatttgctccagattgatggggactcttctacattcagtctctcagatccaagcctccttcagctcaaagtgacttccaaagttgctgtggccaaaagagggagaaatcgaagagaccagccagctctcacctggctcagcgcatgtcactttccttggccaaaacaagtcccaaggccccaagcttactgcacaagagagtggaaaatgcagagaagcacatggaatccagtatatggtgagcaccagttgtctctgccaacatgacggtaactcttttcatttttcagttactgtaatgaatgtatgttggatccagactgcggtttctgctacaagatgaacaaatcaactgtcattgactcctcctgtgttccagttaataaagcatctacaaatgaggcagcctggggcaggtatatcactcattttaccatacgaatatataataatatttcaaaacgaggcttatgtttaagttttcagagtgcttgcacttatagcagttcttttaaactggccttcataactacattactttgcagcatatactggtgatagtggatgcaaagcattgcaattgtgtgtttcacacagagtagaaagcactcaggcctagacttttggagacccagatttctctaataaggtataggagtttggatctttagttttaggcagctattcacaaatactgccaaggcaatttctcccactgcatattgtttaattgcactgtatttccaaactcccaagcttttaaatgaaagaaaactgtaaagtcaaaatgaattactatcacgttaggttgggcacagtgcatcacgactgtaatcccagcactttgggaggctgaggcaggcagatcacttgaggtcaggagttcgagaccaccctggccaacatggtgaaaccccacctctacaaaaatacaaaaattagctgagagtggtggcacatgcctgtaatcccagctgctcaggaggctgaggcaggagaaaggagaatcacttgaacctgggagatagagattgcagtgagctgagatcaaaccactgcactccagcctagacaacagagcaagactctgcctcaaaaaaaagaaaaaaaaaaaaaaaaaaaaaaagaattactatcacattacattcttttatggaactttttttttttattcttagaggccttttccagggttcagtgaaattaagcaaaataaggataaaatttggtagtcattggcatgtagctggcttgggaggctagaaaccttaatgtttttggtttgtagtacatgcataaatgaaatattagtataaaataaatattctccagatttatgaactaacatttatatccagacatataaaatgtgtaaatgttatctgatatggctttaatctattttgtgttttaaattcctataaaagaatattctcttatcttgtctactcatagtactgataaaggcaatgaaatctgtaataaagtattgtgtctcataggagctataaagtataatgcaataattgtttcattagagaactgctccaaagaagtaaattatatgttagttgagtaaaaatccagaccacattttaaatatactaattacaaagaaatatgtaaaagaaatacaattagtgttttaaatgaacactcaaaagagtttcttttaaaaatactcagtttatagttcttatcagccaaattttgttagtgagttaattgattaaatatttctagatgtacttgttcacagctttaaacctttagagttttgtttttgccaataggaaaaaaaaaaaactaagttactactagtctagaattataaacatgttatgaaatctgttaaaaaaagaaatgtacatagtttcctgtattttacataattaatttataaacttattagaactctactaagtagtaaagagacactaaaattagatgtttctcttaccttcagtagaagagttagaggtcagaggcctcaaagcaggagttttggcttttttgcaaataacaaatcatacaactttttagtagaaatgtttattcctttatttcagaaaaattaattcaacaactcactcttacattttatttgtatttttataccatcatcctgtaactgcacataaattagagaaaagtaaggcacagataactaagtagcaaaaataaaaataactaaaaaaaaaatgatgttcacagcatatccttacaatagtctcaaactctttacaaaaaaagaaagaaaaaaatgttttcttactcctccctgtgctgagcaacggtgctccttctaggtggaccactgctattggttacctccttagtcttggctagaaaagagcaaaaaggcaggatgtgttcaccatgaaaaattcttcagatagattttccacatgtaggtaaaataatattcagtatatataatagtatttttgttggttgattggtggtttggttgatagattttatacaattacctggaatggaactctaagggcaaagtcaaccatgaccttggattcccatctagagatatactatctctagatatttcaaggtcgagtgttgaggcaatccatagccatatatcctgatctctaactgtagctgtttcctgaaaagacaccaggtggaatggcaacaccattaatgatggaaatagtataataatgttgatgaactctgaattgtcaatataatgaaaatcatttgtacatataatcaactatgagattagttggaaacaaaacttcaaaggtccatcagtatggttttctatatctatgttgttaaatttcaatgaaaacttaaaaaaattatttagcagacttctagaaaatgtagtagactgagctgctgcaggaaaatctcctcctgcccataacctccccctacacctccaacatgcatcccacacacatacaagtttaatgcacagcagaacttgaaagaaatccccaagcgtcacaaaagagtgtaagtggtgagcccacatgggaatattagaagcgaatataagccttacaggtgagaggttagagtttttaatgctgagtgagataagctccaggccttgcctctgtagttacaaagcactatccaggttctgaaatagggacaagaaaaaatctggctagactgggcttggaaagctacctacttctctgctgctcatttgggactacaaatggaaataatggtacacatgaaaaagcaaaaccaagagcctttgctatgagggagtgtgtgttctcatttcacactgcctttgtgaagtgggaaccatgagttgagaaacgtaaacaaataaataaattgaatgaaaagtaggtcctaaactggagacatccatagaggcatgttaggaatccacatggaattatcagaacccagtgtacatgagatgtccatgggaagcaactgttggtaaatacaggaggacagtcagagagtatcaggctggtgcaaaagttaactgcggttttaccattactttttgccattaaaagtaatggtaaaaccacagttaacttttgcaccaacctaatagaaacgacaccaattattggaggcaaggaagccaccaggtgtgacagatggacaaatgaatacataaagaaccttgcattgcaaaaaaaaaaaaaaaaaattgaaagagactttaaaagaaataaaggaaatagtgtatttttcaattatactgaaagttatatacttatgattggtgcagtatatatgtgtattttatatgacatatatatgtgttataattcagcaattttgcaaaaaaaaaacttgggaagctgaaattttagagaaatgacataggatgtggtatgagaacttttagaaaaaagccttctaatgagtttttaaaatttttctgctttttattttttttcagaaagaaattgagattacaattagtttttcaatttgttaaatatagatgttacaagtataagagtaaactcttaaaatatgaactgttagagggagaaataagagactcaaagtatagtaagagaagaaggggcaaaaaaaaaaacccagaaaaattacatctaaatataactgtttttacaataaaaaataaaccaattaaacacagttgtaaaagacaaagatcttcatattgaattttttaatacagttgtatgctgttcacaggagacagtcacagaaaggttagaaatacagaaataagaggaaagaaaaaattagataagtactaagtcaaaaaaacaaaaacaagcagagactatttagaaaatttacaagcttgataggagagtcaaacagaacctaaagtagagaatgtcattctttttaagaaaacatggaacacttctgaaaatttaccatgttcaagcacaaacagtaaattcagtaagcttatataaatgtatagatatttcagtaaattataagtaaatccaaataatcagtatcatccagaacatgttttctaataaaaatgcaataaaactacaaaacaacagaaagatatttatcaccccttctagtttagctgggaaactaaaataaacaaaacacccaaaaagcaacttcaaattaattaataggtttagaagaaatcacaatgcaaaacaagatgttaaaattaataactaaacagatccacaagaggttagaagtagaacatagagtaagcctgtagagttagcagaggatgggaagtgcaaagcaaagaaatactcggaaggatcaaaaaataaaagttcttaaagaagactaataaaatgtggaaacctcttgcaatactaatcaagaagagagagaaggcacaaacaatatttagaataaaaaagatgtataataatggatagtaaagatttttaaattcataagagaatactatgaaccgtgttctccagtgcatttgaaaacagataaatggacagttttcaagaaaaaatgtaactttccagaaccaattccgaacctctgtgaagtaagtgatttctataccctacttacagatgagaatagtgtcgcttagaaggtatgaatgactttctcaaagtcaaaaggccagtaagtccacttcttataggggagcagcaactgagtagtggaaagacacacattttagattcagatagtttccaatttctaagttaaagaaagtatgttattgacaaatcaggcattagaattttttttctgtatttatctgtgtctatttatccgcctccctacctcctgactctccatatatacaaaaccttaaataatctattctgaaacttcaaacctcctgactatttaaaatagtattgctaatgagggacactttcttaatgcgctgattcagtatttgtttcctataatacagcactttagctctgtaattagaaacactaaaatagctagatagattccctatttggcaattcattgtttaccgtattcattcagcagagatatttttctcaaagctgcactctgatgtaacacccagcctgttttcccagcatttcaccactctcccacacagattctagtcagtttaaatcccttgtcattaccctaatatctattataatttcctgtctctatgtcttttctcacactgtgccttctgtctagaatttaccctccttgatctctgcctgaagtctattttattttttttgctcagattagatgtccctttttccttgcagtttctgtgataagccccagaaaacaatgcttattctatctcctgctgccctctagcactcccctggatgtagcatactatgagagacatttcctggctataagatgaatgatagctgtaagtcctactggaacacctcacagggctgacactatgtgccacttagcagtagcagtgtgaggcaacctggcctggagatttccaggagacacgtccacctcagtacagatgcaactcttacaaacctttaaacaaagttacccttacaagactagcttaacctccttttatgaatgaaagacctggtaactgactccgattgaacacaggtataagaaaggggaagaatcccccaagctctgagaatagtctccagatggagaccctcttggatgggtggtcatctgacccctgattgaatctggctcatgccacccacctgctcccattatccaacttgtaagagcgctgctagaataaactgctgatgttcaatatcagtcggtatctaagtctcatctttgatgtgaatcagaccacattggaagaaaaattgccactggggaagccagttaactaggaccattcaaaacccctgaataatgaatgatacctgtatagtttatatgataattatattttttatatgatagccatctgtgtttgaatgtatatttgcttctagattataaattctaatttctatattctgcattgtttttaaacctttggtgttttatatacatcaagtattcaatccatacttataaaaatatataagggtttaaaattatcacagttataaatgagaggatatgatgttccagtcacttcattttagttacatcttttgcatccatacttatttccaggaaaggaaacttaggaaaaaattgaagtaatgcaatttacattaacacaaagattttaatgtttacctgtagtaataaaaacactaaaaaacaatttaaaaataatacttaaccatgtgcttcagtatatcactgcaaaaatattgcttggagccatactttgtgaaaaacacttcttaaaaattattggaagaagccaggtgaggtggcacattcctgtagtcccagctactcgagaggtgaaagcaggaggatcacttgagcccaggagtttaaagccagcctgggcaacatagcagaactccgtctataataataataatatcatcatcatcctggctaaagattattagaagaaatattcagcatatttcctgaaaatattcactgatatgccagggaagcagttcatctatggtgatagcataagaccaaatgtattacaaaactatatcaaatagcaaaaacagagggagttttcctttgtaacctctttaaaatttttgaaaagagatatcacttttgtatttagaaaatgaaatttattttatcattgacaaaccacatcagtatcttaaggtactcatgtacaggattgatgtatttttatcagttagtcacataagggatagaaaaacctccagctgtgttcctaaattaataacaatgtagctcaaagttaatttttaccaacataaattttatagagagaagtatagtgtctgatatagaatattttaatccatttgacttttaaaattatacttttttatgttactgcttaaatagaagtcattatggtagattattctctttagtatctgtagctgcatgttatgtgtttggaagtttcatctacccataaataatttcagagatcacatgcctctaggctgttactttttcaggttcagaaatttagactcccttggatttagtgactatattgcagactcggatactatttatgttgcaaagtctacaaatcaaaagaccaaaacacttctgagtaatttatctccctcgtccatattaatttatcgaatttcttacttgacatttaattgtaataataaataaacacttgttaacagttttatccaagtagcgatattcataatatatttaactacctttcattttcagtcaaacttaatatttctagtcaacccatgttccttttacatttttaacatttttcttcatatttcctttgaaaagtagactgtgagttatttctcactaaagaagattaaagaagactaagatttttattataaggataaaagccaaagcttgaattccatgtgcatggtgagtgtaagataatggtggtgaaccttggttcatcaaacattggggcaagtaagcatcagaaggtgtacagcagagatgaagtctggggagcttggaatttattaaaaagggggctgagaaagtaatgagaacaagagaaaggaaaatgcgtggctggtgccaatacagtaaatatgagtttagatcagatggttaaagagccttatttagatattttaatttgttttttatagatacattttcataggcgtgggaatcatattgccagtgattttaggtgaatggctttatgtgatacctggacatggataggatattgtgtcacatagtgagttaaatattttcaatctgtgaagaagaaaatcagttggctagcatgattttaacacttgggcaggaaacgttatcttggaaatcatcattctcagtaaactatcgcaagaagaaaaaaccaaacaccgcatattctcactcataggtgggaattgaacaatgagaacacatggacataggaaggggaacatcacactctggggactgttgtggggtggggggaggggggagggatagcattgggagatatacctaatgctagatgacgagttagtgtgtgcagcgcaccagcatgtcacatgtatacatatgtaactaacctgcacattgtgcacatgtaccctaaaacttaaagtataataataaaaaaattaataatattcttttcattccatttttattcaactatcttctattcttggcacgtgtgatcgattgtattattgttcaaagtatctgctaccactcccaagggaaggattgtatttccctggcccattcagtcttatccacatgagctgttctggccaaggaaattagagtggaaccaatccctgtcatttctgagccaaagctttaaggcatggagttttaaacaaggatttgccacgtcctcttttccctcttcggtatagttcaccatgtcctaaaatagaaggtgttccattagatttggtcacagggtgaagaaaatgtggaacagaagcataactgacctgaggtagacctgtggtgtgagcaacgcattaagcttgggttttgtaaatcccactgcaattcgctctcttttgttactctgacataatctattctcttctgactgatatagcaagataccctggattctcctgtggaagggcacaaaaaaaaattttttttttttgagacggagtcttgctctgttacccaggctggagtgtagtggcacaatctcggctcactgcaagctccgcctcccgggttcacgccattctcctgcctcagcctcccgagtagctgggactacaggcgcccgccaacacgcccggctaatttttgtatttagtagagatggggtttcaccgtgttagccaggatggtctcgatctcctgacctcatgatccgcccgccttggtctccgaaagtgctgggattacaggcgtgagccactgcgaaaaattttttttgagttataaaaggaactctaaagaaaaccattgaacaaataatagtacagggcagtgaaagaaagggtaaaaaattatgaaaggaattgccaaatgtcatgagtttggggagcagtgcagtaggaagtagaagtttggggaacactgcagtaggaagtagagagctgttaaggtttttaagtaggggctaatgtgagtggctttaggttcaggagataaaattctgatataagaaggaagaaggaattgtaaagaattttatgaagaacaaacaaagggcaaggcatttggaaatatggtaatataagggatatagaagaatggtgcttgcatttttacatgttgctttatatatatatatatatatatatatatatatatatatatatatatatatatatatatataaatttaaaaatttaagccgaagattatacatgctgctaggtcacagaaagaagagcagcattagatatccaaataatctcaggaggttttttgctggacagcataaatgaaataaaatttgaccattcaaatcaaagaaccgctgcctctgtacacatcatttggtatccaggtccttcctactctcttggtttcagtgctagttttataacataaacaaaatagttttccactacatgcgatctgggtttacaacttgtgtagtttgtacaatagcaatccatgttttagcattggaatatgcatagacattcatgaaccaatgccaatcacaattcctacagtttgaaaacagtgccaaaatggcaacctgaaaactgtgataacacaaaactctgtgctcataatttctaagaaaaattcattatagtgcccttcactctgtcttcacttgccctctgttaggatgaatgctgtcttattttatctaggaagtttattcttaaatagttccaaggattaaccaactttattttcatttcagaggcacatgtttcctggaaccctccaaaaattacattttttttctttttgttgtcatttatttggtaaatgagttataggggaaagattggatttagagctgttctgcatggacaaacccataaatattaatattatatttaattattggtaggttggattatataacagaatttaaactctgttcacattggtatggcatttatacctgcaaagataaagagttttttctgtggtcattttataggattgaaatttgacattgtgctacatgctattaaaaatgtattattgggcagtgaacacccaagtgtgctttatagttcctttggctttgactttgtgctagagcaatgtctgttatttttctctgcattgaaaggagcatttatccttttaaatgtattcagaaagccagtacatttaattgaaagcatattaaaaagactcagacattactccctaagatttataatctaagaggtagattgtaacatttacacacgcatacttcaaaattattttaaagaaatgaatgttccttttacaaatagagaaaaaaaagtatttgcagtgtatactgcttagtgtcaaggacatttgagagaaaaggtaaatgaaaaatttattgtagaatgtgtaaatttggagtgagttttagaaatcagcccgggcttttaggaacatcaaataatggaaggcttgataaataaaagtttgtagtaaactatgggacagagcacttcagatacaagatatggactgtaaatctgtaaatatttaaagattatgtattgccaccttaatatattttaaaataatgtcaaaggtcctataactgtgacttagtttaactttctatgacataaatgagaaaaaaaattctccaaacgataaaaatatttgtaaaccatgaatttattttgtgacatttttaggctcataaacatatgtcatatattccttattgttcttgatgaaaatttcatttaaggcttaaaaatgagactgcaagtgtgatacatggatatccatttactaaacaatttcaaccatcataacttctgaagcctcagagataggaacctgtttgcttatataactatactgttttcccttctgtggggtgcaagcggttgtctgaaaactatgattgacagtggaaaaacatcttcgttcgtttaacattgagtttttgggaaatacttgattatgcagacctatgttgttttttaattaattggcttaggaaacaggcaatcggaattctgcttgggacaatcagggaaggaaagggccagatcagagttaagtcaatattttatatttcaatttttatacttataacaatattttatatgtagaaacttttctacatctgtgccttcaaactgtagttgttattggtatatgaaacatctacatttattctgcctacttaattgttcaacaaactttaagaactttctgtataacctaagatagtataccaaaccttggtatttataaaaacttgggggacatcagctaggacagttagacacacttgaaacagaatttcaaaggtgattacaaagcagagatacatgctgaccttgggctatgtcacataagctacttatgtaattagaacttataaacttacgtaattagctacttataaagttagagttaaacaaagaaggtaattactcagagcatcatcttccctgctagctcagatactattgtaagctcttcactgattgataagagatcctatctgatatcttggtagcagtggacatttttgcaagtaattctcaattattattactttgcttctttaaatagaaattaagaaggtaccgatcagtatttaatgtcttctccccctccccccaactcattttttttttcctgtgacttcacagaaaagtttcaaaaatcaactcctcagttttagatgtacatgactgggggaatcagatgattttaggaactctgtgggtatttaatagctttttcagttaggcttaactgtgagaagggatcacacacctggggatgtcacttgagtcagaggagtggcccaagggggctctctggcagtgtaagaatgcaggaggtaaattaggaaacatctgtagaagttaaagagctggaaagtgttaccataaagagatactacttgaaaggacaaagcagaggagaaactgacaaaatagaatgaagaaaaacagggcagacctagacaagttcaaggaatgtgtatcctggaagctagttcaggaaacaagaacacatagcctcctctgtagtgagtattctcatttgtggatctctctttgctggtcaaggaaccgtctttgaagtaagcagaattgccccgggtatactgacaaagtcctgataaggtttatagctttgagtttttctcatagatttagtgtttggcatctgcatacgttggctatagatattttaaaatatatataaagtatgtaaaaactaagatgactactaactgaaatagtagttacattttatgatctactgtgtacagctaactttttcgtgaatatagatgaagcattctgtatctttgtttcactaacccccttagctgccatcagttgcctttctcagctggcctctataaaagtttggtgttttatgatgcaaaagtttcatttcaggcaagaaaatctctctgcactaaataaggagttgatacaatgtaagttactaagagcctaaatctgtggagcagatgacccacaactagaagccagcacaccccatcctaaatggaaacagtaatggaactgatcattctgtggatttgcctgtgacttgtaacagcagtgtaaccttgtctaatgacctcctgcatcccaccctagcacaccacatggaccaccctaaaatgagcaacccggaattggttatgagctactttgagtctttcaaaagagactttctaatgaatttgttgagtactcctgtgagagatgttcaaagaaattagtacactttttcccaatactattcactcttatcttccaacttaaaaagttgaatgagatgttctctgtgtttttgctgttatgaaaagagaaggatacagtcactcaccacctacctattttttttttccctcaaggcatttgtggttcttggtatcctgaaagtgggaatgacccaacccacaatgggataacacatttgcccaagataaaaggaaatgataaagcatacccagtgtataggatgtaaaaaagctaaaaatatctgcttttctaggcatttttattagtctttcaaattcttaaaatctttcaaatgtttagaattcttctgaattcagtaaagcattgcttttcaccagcttatcaccaagaactaaggatgaaggcaaatggtgagaggttcttgcagcataaccaaaggagacccatgaaaggacaggcttatttgtttgtttttcatcctagtgttttatttttaaaaattaagtgaattttcctttataccctaaaatacagccatgtccagcttactaatataattcttgtattacttacccttgatttttctttctttttttttattatactttaagtaagttctagggtacatgtgcacaacgtgcaggtttgttacatatgtatacatgtgccatgttggtgtgctgcacccattaactcgtcatttacattaggtatatctcctaatgctatccctcccccctccccccaccccacaacaggccccggggtgtgatgttccccttcctgtgtccaagtgttctcattgttcaattcccacctatgagtgagaacaggctacttatccttgatttttctaggcaacccaacctacggcctttcatctcatctcatccttcaccccatcagtgagaaaaggaaatttttgtttgtagaagaaatgtgctgttttattctgtagcacatcagtacctgtgctaatttgagaatcataactagcgtagatccaacccagaaacaaaccccaagttcacaaaacttaaaaaggaataggcaaattctagttgaaactgtttcagacctcagctcactatcagcccagaacatattatgtgcctcatcgatttaaatgttaccgttaggatttggtggacactgtaagtctagagaatagctaattgaataagacttgaacatctaattgaatttcttgaacaaaatgtatactcagaacagaaaatatttcagaaatctatgacttcataatgtcactggctctgaaacattaacacactacttttccagttttatttggctatatttatttgacaattggatctcttttatagaatgttgtactgtgctataacttaacaactaaaacaacatttatttgttttttccagactgggaatgtcagaattgtgtcattgtagctagcatatatcaagatacttttcagctattgcttcaaatgctctatttttccctacatgccctttagtagaactgctttccagtgctttttctataaccaataattattgcattatggttatttttatccccgttcgcctcttaccgtcccccaaactagaaacttctcaagggcaaagttgggataatgttgttctctctgccagacgttatgcctggacacatagaaatctctcagtgcatgtgaatgttagtgaaaggatagtaataggtgaaaagaaagaatgctccagcctacgagtcctatagctgttttgacaaagaacctgttcgatttattcttccaaatgattttatatcatgtggagaaggccagtctgtttgaaaaacttgtagtagaaatgacaatagttaacaataaaggccagaccatcaccatatccagtacagctcacagtattctctgctttattctgttttctctttttctatttttgattcatatttgggcatatgggattcaggaagtttctttcagaaagtctaaaatcaatgggaagcttagctctggtataatgtagagaatacttgctggaatccaacgactttgatttgtgtctggactcagtaactgaccagaagatggccttgggtcatttattttacttctctaatccttagtttgctgatctttaaaacagaagaaagtaataacactagatcttgcttaccatctaagatcactgagaaagtcaaatgaaaaaaaaaaagtgtaagaagaattcataaacttgatttaattttttaaagaccaacttaaaaatctcagctccacaatctatcatatctttctgccttatctaagaggataaagcgattgataatgcatattgtgaaatatgcataattgtgataatgcatattgtgacatatgcataattgtgataatgcatattgtgacatatgcataattggcaaatgtgaaatttaaaatttctttcttactagtgttgagctaggccttgaaggataggcagggtttgtatatgcagggatagcagacgtaattgtatgagataaccaaatttagtaactgacagcaatttatgtttttcctctctttaaaatgtgcttttccattcttaagtatgtattttaccataaaagaggagttcctttttttctaccaaagcattcttcagtttgtaagaacttttatctattaatttttgttaaattgtatacaattataacagtgtttagcattatcagaattttgattttagtgagccagtgtgttacttgatacaataaagatcagctaaagccttcttgtgttgttcttaaaggaatagatgttttctctttactctctatttggaaaaagtttaggctagtttttaaaaacagtacaaagaggaaattataagtacataattcattaagtgtctttcataagcttattcctcctaagctattacacttgctgtctacatctgtagctcatttcctggggaggtaaagcaatgacattaaaactccagcagtacaatctacatcagaatggttgattaacgttttgaagtattatccccagacctcacattttaaattaatttaattcttaattatcacaaagaaagaaaagagtatgggcaaaagtgaagagaatattcagagcagttttcctcgtcttgaaagatatgattatagttttacagaatttggcaatacaatatagatgaagtaatatacgaaatcactcatactggaaattgtccaagattgaaactttcgaaatgtggagttatccaagatgtgactgtgtaggcttcagacagtttccaggaatgacattcttcagcgtaaaatggaaactccaattttaaaatgcctgtgtaggggttctgttcagttaatattcccaattacatctttttaattgctattttaaattttaaatcaaatggaactcacattgagattgtagatggtagtggctgcagccgtgtttcaagtctccctgaagcttcttcatcccccactactccaataaaaacagacagttggcaaggaatgggccttatttgaatcttgattcaaatgaactgaaaaaagtcacttaaagacaaccaggaaagtgtgaacagtgattggctgtttgatgttcttaagaaattattgttaatttttcaggtgcagtaatcatattgttatatattttttaagtccttgcagagatacatactgaaatagtaacagatgaaatatggtatctgaaatttgcttcagagtaacccaggagaggtggattaagtgacaatttagatgaaatgtcattggccatgtgtttacagttgttgaaagtttgttatgggtacatccggttaattatactatactctctacttttgaatatatttgaaaatatttgtaataaaataaaattttgatgtatgtcaaaataaatgctgacctagatcaaagacaaaagtatttttaagatagctaagaaacaaacagaatagataaaatggaatgcaaaaaatatctaattaatccaataaaagaagttttaaagggagggcaaaagtaatactataggctgggcacagtgggtcacgcctgtaatcccagcacattgggaggccgaggtaggtggatcacttgaggccaggagtttgagaccagcgtggccaacatggtgaaaccccatctctactaaaaaaaaaaaaaaaaaaaaaaaaaaaattagctgggcatgatgtcaggcgcctgtaatccctgctacttgggaggctgaggcaggagaatcacttgaacccaggaggcagaggttgcagggagatcacaccattacactccagcctgggtgacagagtgagactctatctcaaaaaaaaaaaaaaaaaggtaatactacaaactaaatgtttgtccccccaccccctaaagtcatatgttgaaattagaaaccgccaggtgcaatgactcacgcccgtaatcccagcagtttgggaggctgaggcaggtggatcacttgaggccaggattcgagaccagcatggccaacatggtgaaacctcatctctactaaaaatatacaaatcagccgggcgtagccgtgggcgcctgtagtcctagctactcaggaggctgaggcaggagaatcgcttgaatctcagaggcggaggttgcagtgagctgagattgcaccactgcactccagcctgagcaacagagcaagcatctatctcacaaaaagagagaaggggagaaagaaaggagaaagaaagaaagagaagaaagaaaaggaaggaaggcaggaaggaaggaaggaaggaagaaagagagagagaaagaaagaaaagaaaagaaaagaaaagaaaagaaaagaaaagaaaagaaaaaagaaattagtcccaatgtgaggatatttagaggtggggcctttgggaggtgattaggtcatgagggtggagtcatcataaatgggataagtgcctttataaaggggccccagatagattccctcttccattctaccatgtgagggcacagatgaaagatggctatgaaccagggagcagaccctcaccagacaccaaatcttcttgtgcctagatcttggacttcccagcctccaaaaccctgagaaataaatttctttgtgtaagagccatccagtctgtggtattctgttatagcagcttaaacagactaagacaagtaacaaagttgtttcttttatgagataaccataaaagaaacaaattagagatttaaaccaactctattggtaaactatgttaaaataaattgtttagaaactccaataaaagacagaaactccagtaaaagacagagttgtccaattagacatgaaaacaaatgcaactgtctgctgtctagaaaaatggggatggaaacagacatactgtactaacactaatcatataaagctagagtgcttttgttaatatttgacaaagactccagattaaggaatattatcagagattaagaaggatggcttataataaagtggccaattcatcaagacatacaattcttaaatgtatattcctctaataatagagcttcttagaaatcagtaaaaaaaattttcacaaaaattactaaatatttgaatattaaacaatacatttctaaataacccatgctgtaaaaaaggacatcacaaggtaattagaaaatgttttgaagtcaatgaaaatgaaattataacatatcaagaacgtcaggggacagctaaagcaatacttaacagcaaacttatactttaaaataagtatattagaaaattttgaaaggtttaaaatcaattacctaagcttacaattatgaagctaaaaaatgaagagcaagtaaaacccaaagtaattagaaggaaagatataatggtagtaggaaacaataaaatagaaaatgtaaaagcaatagatgaagtaaatgaaatcaaaaggtaatttcttgaagagatcaataaaaagcagattaagtcatagctggactcgtttagggagaaaaggagacccaactttctattattataattaaaagagagcacttctaataaatggagaaaattcctggtgacacatatttccaaaagaaataggaaaactaaatcatctatttaaaaaatcaaatttgtattaaaaatctccccacaaagaaaactgcattggtgaattaaaccagatatttaaagaagaaataatgccaatcctatataaactctttcagaaaagggcagagtgggggaaatttcccaactcattttataaggttggttttatcttcattaccaaatctatccagaaactgcaagaaagaaaaactatagatgaacatcgcagtatctcccttgtatacagacagaaaaattctcaaattgaatccagcaatataaaggaattcatggttgatttaacatctgtattcaatggatgtaattcattatattaagagaagaaaagagaaaaatcatatgatcatcttaatacatacagaaaataaattgattaaattcctaatccattcatgataaaaactctcagaaggctggtaatggaaggaaacttcctcgacctgatacataacatctcttaaaaacctacagcttacattatacttaatagcaaaatattattttccctctaaaattgaaaactaggtgagaatgtctactcttaacactactacatgacattttcctggagatcctagccagtgtaataaggcaagaaaaggcatacagtttggaaaggaatatatactctattttcagatggcattatttttataaaatgctatgagaataaataaatgaatgtaacaaagtctcaaaaaaggtcattgtagaaaaatatattttatttctattactaacaattggcaaatgaaatattttaaaggctaattatatcatcaaaagatgaaattcttaaagataaatttagcaagaaataacaggatcactacactgaacactataaaatattaccgagtgaaattaaagaagatctaactaagtagatcacactcgtggataagaagacttaatatggttaagatgtcggttcttcacttttacattgttggtgggactgtaaactagtccaaccattgtggaagtcagtgtggcgattcctcagggatctagaactagaaataccatttgccccagccatcccattactgggtatatacccaaaggattataaatcatgctgctataagacacattcacacatatgtttattgcggcactattcacaatagcaaagacttgaaaccaacccaaatgtccaacaataatagactggattaagaaaatgtggcatatatacaccatggaatactatgcagccataaaaaaggatgagttcatgtcctttgtagggacatggatgaagctggaaaccatcattctcagcaaactatcgcaaggacaaaaaaaccaaacaccgcatgttctcactcataggtgggaactgaacaatgagaacacatggacacaggaaggggaacatcacacaccagagactgttgtggggtggggggatggggaaaggatagcattaggagatatacctgatgctaaatgacgagttaatgggtgcagcacaccaacagggcacatgtgtacatatgtaacaaacctgcacgttgtgcacatgtaccctaaaacttaaagtataataataatttttaaaaaagatgtcagttccttttaagttgatctctagatcaactcaagtaattctaatcataatccctataaacagttctataaaaaatgacaagctcgttctgaaatttatatagaaatgcaaaagaactggaatggccaaaacattcctgaaaaagaaagacatgccctatctgatttcaagacttactataaagttacagtaatccagacaatgtgatgttggtaaaatagacataaacatcaagggaacagaataaagtccagaaatagatccatatatgcatggccaattgattttcaataaaaaaaccaaattaatccaatggggaaagaatagtcttttcaacaaatggtcctaatacagttggctatctacattgcgggtgaaggtggagggaatggacctcaactcttacaccctaaacacaaaaaagctcaatatacatcatagacctaatagtaaaagctaaaatcataaaacatttataaggaaacataggaggaaatctttgcgacatcagggtaagcaagtagataggacacaaaaagcacacacaacaaaagaaaaaattgatatattggagttcattaaaattaaaattgtctactctttgaaagacattgttaagagaatacaaagcccaagccacagaccggaagtattatttacaataagtatatctaacaaaggaattatgaataaagaattcttacaacttaaaataaataaagcaacctttcaaaagacgccaaaagatttgaacagacaagtcacaaaagactataaaaagatggcaaataagcacatagatataatgttcaacattattaatcattaaagaaatgcaaaaaaattatagtgacatgctacagcacaccaactagaatagctaaaatgaaaaagtcaaaatatcaagtgttggtgaggttgtgaagcatcatgttaatgggaatgtaaattggtacaaacacttcagaaatcagtttggaggtttcttctgaagttaatcacatcttttccatacaacccagtaattcaattatgacacatttagtcaaatgaaataaaatgtgtccaacaaatgtttctacacagtcgtttatagcagccttattcataatggacaaaattggaaattacgtagatgttacttcaacaggtgagtggataaacaaattatgatacacccatataattaaatactacccagatagatggaaggaattactgatatgtccagtaacctggtacaatttcagaaacattgtgttgggcaaaaaagccagatacaaaacaatatatactgtacaagtatttatataaaattctagaagagcaaacccaatctctattgaccagaaatagctcagttattgactggagttgggcatgaaggaaatttttggtgttatggaaatgtttactctcttgtctgtggtagtggttacatggatttatacattgtcaaaactcattgacttacacgtaaaattggtacactttatattttgtatattatacatgaatagatgattaaagtactggatttcttgacttccaagaattatagcatacaaaattatatcttcctagctattttcaaagggcagactaattctactttaagcaaacagcatttgatgacacttttcatcacagacaagattctcctggtacgattattaaaagttggcttaggcaacttttatagctagactcacctagggggagaagacccaactctccattattataattattataattgaaagggtgcacttagaagaaatggacaaaattcctgataacacaaatttccaaaacacaaaaagaaatagaaaaactaaatcatgtatccattttaatcaccagatttatttgcttgtagcttacctgcaggtttaacagtacctttgaaagcaaatgagtagcctagctgatatttatcaagtcttatagccaccctttacttgtttttcaattagtgtttttattttgaaataactatatatttacatgcagttttaagaaataatgtagagatcccatgtactctttacccagttcccctgaataacaacttgcataattatggtatagtttcacccaggagattgatattgtttcaatccactgattgtgttcagactttccgttttacttatgcatgtgtgtgtattttatacagtgttatcatatgtaggcttgtgtgtccaccagtacagtcaagatatagttctgttaccacagggatccctagtggtggtcttctgtaagcacactccactccccacatcctacgtggccctgtccttaactcctcatgaccactaggttggcgcaaaagttatcgaggtttttgcaattactttcagtggcgaaaactgtaattacttttccaccaacctaatgtgttgcaattactttcagtggcaaaaactataattacttttgcaccaacctaatgtgtttttttcatttctggaacgttgtcatctcaagaacgtttaataaataggatcgtacagactgtaatctttggggactggcttttttctcagcataattctctggagattcatgttgtatgtgtcagttgatcacaccttcttattgctgagtagtattgtatagtatgaatatatcagttttcttaacaattaaccctcttaaagacatgggttgtttccaattttaactcctacaaatttattttcgactgtcttgatttcattattccataacaaaacatagcaacccatgtttcccacagtataatttaagcattttgaagaattctcaaataataagatattaactttctgtatactgtctaaaatatcttaagatcttttcctgagtctctttaaggaagtttgcttgaagaagttgtattccaagcacagtggaacttcctttatggagcaccttggattagattttatcacaactgagaacatgactttttgtggacttcttgtgattttcagataatgataaatgcaatcagatagaagcctgtgtgacttctaattggatcccagggaaaatatatatcctgtagcatttaggagaaaaagtgccttgttcaggggacagaatgccattttcttctgtgagtgaaaaagggtgattgattcattaggcacctagggtcagttagatattcctgttaagaatatcttacaatttgttgggcaaaggttttggttctgacatatccttcattcccttcaaaatgcatttagaatttttgttctgatctttcagcattagaggttccaggcaagataaagacagtcaactctgaaatataaacttgtcatcgatttttttcttaatttttagtttgtgaaatcgtgttctcggaagctcttgtgaaacttgcatatatttgtatacaaattgattttgtgattttaaataatcagttctgttgcagctacaattgctgtcactgtaagctttttctggtagcaatcaatatcagaaagaagtttgctaaattgcagggaatctgctattgctaaggaaagtgtttaatgaatagaccagccattaattgtctcttgctgttagattcaattacctgtgaaactaagcaaatcctgcccacagctttctgatctcttcctgtgtttccaaaatgtcccttcagcaaacatagtagagaaaaaaacgggcaactccctttctagattatttatttaaaacctcaactctgacttgcccactcagatctggtttcattgatacctaagttactgaggaagtgcccctcctccaactcccttcacttacctttgccattttaattagcagattatttaagcggaatggatttttgtttttaaggagcgctgtcagcagtatttacaacttctccaaaccttttaaaaaatactgtagcatgttttaaatataatagatcagtttttaaatacactgtttcaggcctatgggaataaagtctctggggaaaaaaaaaaaaccaacagaggcattaacctaagagacagagtataatggaggctggaaagatttgtcatttatcctgtctgtgctccttcacgatgtacccagattcccacttccttacaccacttctacctcttacacctgctccagccaccccaggattattacagatgcctcctaactggtgtcccagcatcagccccaacccctgcctctccctgcaaagcagagcagccacactgacccttttcaaatgaggccagatcacaccactttctgttcaacactctgccgtggcttctcacatcatttagaataaaaaccacgccctgcagagtcctacacattctggccacgtccaacacacaactctctggcctggcctggcctgcccttgctgtcttcctggctccctccattgtcgtcactgatgaccctcactgttcttgcctgcccagcaggcttctctctccagcaggcttctccctccagcaggcttctctctccagcaggcttctctccccagcagtcttctccctcagactgtggcactttccaagcaagtgccaaagtcttcaggtatctgcagagtgttttctttctctgcccagcatagtgccttccctgagagccctgtcaaaacagtagaactacccaccctgatgtcctagccctacttaccctgcttctctttagggtatataattctccatctatatttaacatgtaaatataaatgtatctgtatgctaatccatttattttctagaatgtaagctccattctagacatttctctacatttctagaatgtctgtcctctgagaggacagacgttctgtttagtgttgctacacagcagactagaacagtgtgtgggagcctagaagtcacttagcaaattcttattgaataaataaattaaccaatctgtgtcccctttcctttatgccatattaatataaaagttacagaataagctacaagctaagaaatcagggaataccaaagctatttaataagcatgagtacagtaaataaattggttttgacaggttattattattaatctagcagtttctggtaatgaatgttaaactcttaccattatgattgtgaagttgtcagtttctctttgaaattaatcagtgttgcttcacatagctcgaagtatattatcaggtgtttataagattagaactatttctcttatggaatgaacattttattataatgacatttatccttgataactacttttgccttcaaatttgttgtatttttactacttttctttttgttgatattttcctgttacacctctttttcttcacaaatatttcaactgtctgtatttgtatatgtgggtttgtctcctaaataagatatttagtgtttttttccccaccactctaaccaactgccttttcatcaagtcacgtgtgtttacatttacacacatgcacaccagtttttttcattatttcttgtcaaattttttttaatgaattcagacatttcttcttcctgtactgtatcttttctttggatgctttgagccctgttgtttttttaattctgtagcttcatactgatgtatcttgatagaggtgtaattttatttatcttgggaagggatcgttgtccttcctaaatatgaagattcttgttttccatcagttatgaaaaattctcagccattatattttcagatattacttaccatattatctctcttctgtccttttggaattccggtgagatgcatgctggccatcacattctgctttccctgtctcataagctctttcacacatttcatttcttagtgccatattctgaggaatttattcagatcattcatccagttcactgcttttcttcacatatatccagtttgctggttagcatatctgttgaaggattcttttttctgactctatatatatatgtgtgtgtatgtgtgtgtatgtatatatgtattttttcaagaagttacattttatatctttttaaatctgaaggtttttacagtagctattttttaattttttacatatcttctttaaataattatactcatgcttatttttgctcctaagtgatagttttatggtctaaagtttaatgtgcctgtggctctgctgtttattgttgttatccactgctgtcatctactggctactgatcacggtagattgtttcctcatgcattttgtataattgtcatataagtctattttcatcacggttttatctgtggcaatcctgtgcagcctctgttgagagcttgtccttctagaaagttttttttttttttttttgcatttgcttcttttagatgccacagggctatcaccaaccaataggctggtccctagaataagggaacatttacaatggctgccttataccctgtacttcaggtgggagcccatagaatggctgtactttacttctcctttctgaaaattaatacaaataaatttagaaatttctgccttcattgtatcccaaggggcccatggaagatacctctagtgaggcctcttttccaatgtcattatcttggatgatcccacactgagttgcccttcccagagggctttattgtcctatgacatattttattttgatgttaattcccctacttggaggttcctagattattcattgaaatctcaatctgatataatatttttggcctgtggttataaattctcaggatggagatatagttacatatccatatctacatctatatatggttacatattcatatctatctttatctctgtatctttatatctatatatatggacatgtaactatgtgtgtatacatagacatatataaatataaatatgtaactatatatacatatagttctagacagataaatagataacggtctcaatctaagttcacacagaaacatacaagttttcttgtgtcccactttcagtgggtgggtatctctgcttgtacaccttttaatcaagtacactatgcttatacttccagtctcctacaagaccttgtatgaagtggcccttgcctatttctcggcatcatttcccgccactgtattcctcttacttctgtgcatcaaccatcttagtcttttttctgtttctcagacataccaacgttacgttgcacttgctgtttactcatagaatgtccttccaccatcttcacatacgtctggcttcttattgtcattcagatcacatatccctgaatgacaggctacataatatgaggacctgcatgcaaaatgaaaatacagggccccttgttaaaaatgattaataatttcaagacagtacaagcagagcactaaatcaaacagagacttctaagcatgaggccatatgcagtcgcaaagattacacacccatgaaaccagcggggccttcctgaccagcccatcaactgcccaaccccacttagtgcttctctattatatcacttttgtagttttttcatcatgacaattgtcactatgtgaaattctttgcttacttattcattggctatcccctggtactagattctaagctctgtgggaatgaggatggctgtgttgtttgctgctgcagcacctagaatggtgcctggttcaataattagtttgtgtagtgagtgagtaatgtctgctttcctaattagtctccaagtagcccaagaatcttcttcaacataagatgctgggtctccacttccagttgatctgattttgcacaaaccagtgaattttggattctaagcccgccctttccttttatagatgaggaaactgaatcccagacagtttaaataatttgctaaaattcagaaaaccagttaagtggcagagctaggaaaagaaaaataagtctgctgacttctaattctaccctctttttcctatgactagtacattgggtgaattttcctgctgtaataatctttgtattcagctacttgacttttaaaataatcttaaatggaatatttcccaaatttgaatcttaattctgtgccaagagaaattagactatgtcatgaggtcagccctctcaagcagattgtcattttctctgggaaaactctcttttgtttatggctgtttgctttatgttttgtttatgcctttgctacctacagcaacttcagttctttctttttttttttttttttttttaatttcctcattcatttattcaaaaatatttatcaagtgaaacactattataaaaatataaaaactttgttttaataaatgattttttttttaattatactctaagttttagggtacatgtgcacattgtgcaggttagttacatatgtatacatgtgccatgctggtgtgctgcacccactaatgtgtcatctagcattaggtatatctcccaatgctatccctcccccctcccctgaccccaccacagtccccagagtgtgatattccccctcctgtgtccatgtgatctcattgttcaattcccacctatgagtgagaatatgcggtgtttggttttttgttcttgcgatagtttactgagaatgatggtttccaatttcatccatgtccctacaaaggatatgaactcatcattttttatggctgcatagtattccatggtgtatatgtgccacattttcttaatccagtctatcattgttggacatttgggttggttccaagtctttgctattgtgaatagtgccgcaataaacatacgtgtgcatgtgtctttatagcagcatgatttatagtcctttgggtatatacccagtaatgggatggctgggtcaaatggtatttctagttctagatccctgaggaatcgccacactgacttccacaatggttgaactagtttacagtcccaccaacagtgtaaaagtgttcctatttctccacatcctctccagcacctgttgtttcctgactttttaatgattgccattctaactggtgtgagatgatatctcatagtggttttgatttgcatttctctgatggccagtgatgatgagcatttcttcatgtgttttttggctgcataaatgtcttcttttgagaagtgtctgttcatgtccttcgcccactttttgatggggttgtttgtttttttcttgtaaatttgtttgagttcattgtagattctggatattagccctttgtcagatgagtaggttgcgaattcaatccccccttggaaataccttgccaattcttactcagaataagttgcattcctatttatattattctcagaagagattctagtcacaaattattttttctgtttactgttttcattcaaagcacgtcagcaccaattacctttctgcaaaaatgccaaggatttaaagttatattacccatttgggaagctcaatggcagttttagagttgccctgattttttattgtacctagaagattgggatgggtccagctatcacaataaacattacatatatgtttacttggcaaaaatctgcttttcattgaactgcaaaaaaaggtagacatcaatcttcattttgtaatttgtacatatcagctgctccactgcacatggggaacacttcttactctaaggattctgacaggtgacacattattctgttgtaaatttgattctctctgcaccaatcatctgaaagttctaccaagtttcttgctaaggcatgtgaactcatgatccagccagctctcctcagttgccaggctttagtaatgtgaatgtgttatcctgctttgtctcaaaacacgttcttgtataataggcctaactttaaaaagcattcaagttgttccatttcactgacctgcattctctaccatttgaattgctattaattgtacatactgttttgtggtcttgatttttccaatctttttgaccaggtttttagctaacccctggtttgcatttggtttttgcttttgtttttttgggctatcttcttgtttactttatttgatttactctactctgccagttctaagggaaatgaagcttatttttactataattttagaggttattctgggtggatttctgtaaaagtgcgccgtgtagaggatcctaatggttgagattaaagaacagaacagactgagcttagtggctcatgcctgtaattccagcactttggaaggtcgaggtaggcagatcacttgaggccaggagtttgagaccagcctggccaacacagcgaaaccccattgctactaaaagcacaggaaaaaaaaaaaaaaaaaaaaaaaaggctaagcatagtggcacatgcctgtagtcccagctactcgagagtccaaggtagaaggtaggagaatcacttgaacctgggaggcggaggttgcagtgagctgagattgcaccactgcactctagcagcctgggagacagagtgagactctgagtctaaaaaaaaaaaaaaaggaaaaaaaaaaaaaaccagaacagtaattcttcaggtggctgtattatctgaagtggggataatggggagaagatggtaggattgttcaaaacaagcaacacctttgttttgttactctaatttattttggagacaatttacaaattataattttaatgtataattataaagctgttgtattatttcataaaattatttttatattatataaaatacataatagtgcattaacatatgtttatacatcattataattaatatataattgtgtttatacaaagtattttgagcttcatttagtactaaaggaatgtaaaagatttttatgtttccaaaagtgtcatgagaaatgtcccagaaggttaagaaagactggaatggatgtgatctgtctcacgagtctttcagcactagcccgggctgttccagggaggctgtgcttgccctgccacgaggccaaacacaggagctggagggcctgctcaggacagaagcacttgctttacagttagaaacagttgaagcgctcttatgcgtaataagtatgttgtaaatttttgatgaattaatagttacttggggatctagattttagtttactgttcattaaggtatctccttttgctttcagttacttattcaagttaattgatcttcatttaatattccaaagcccctatattactcatctattgctatgccacaagtgactctaaaacttaacaacttcaaacaatgaacatttatgtctcactcagtttctctgggtcacaaatccaggagaagctgagctgaggctctgtggtggtatctctcatgagattgcagtcctctgaaggcttaaggggagctgaaggatccacttccaaggtggcttcctcgtgtgcctggcaggttaatgctggttgttgtccgacaggccttaatttctctctttatgtggagttttccattgggcagcttggctgtcctcataacatggtagctagcttcctccaaagtgaatgatccaagaaagagactgacagacaccatcatatctttgatcttagcttctgaagtcacacttcatcattccataatatcaaattggttacacaagtcaaccctattctgtgggagctacacaagggcatgaacactaggaagtaagatcactgggggatattctggaggctgactcccacagcccctaatgaagatctcattagaagtattctttaattaaaacaataacttttatgtttacatggatagaatatataggttgaattacgaccggttttcagtatgcatccgtgtatgtgtgtgtgtgtgtgtgtgtgtgtgtgtgtgtgtgtgtgtgtgtgtgtttaccataactggcttataacatgtatccattagcttttcattttatttgaaagcacacttgcatcttggaatatgatgacattatctgcttcatatttatcattctcacagaataaaagttaccaatgagagacaacaaaagggacgaagttgtcctcataatctatgtgaaattgactaaaatatttagctactttacaagagatgggttattggattagctcctcattttgtgtcaaatcaccacttatatattttcccatattgctgttatttatgaaaatagaaaaccatattctgctagagaaccaacatataaatgagaaaaatactgtgctgaaataggaaaataggattataattatagctcaggaaatgcaagtcagaaatccaaaataagttcagtgtatgctgaaaatgttagcatttttcaatgtacttaaagataattacattgcaaacataatacagtttttaccattgtttcccagctgaaaggtttaggtatgttggcgtgcttactttaaatcaggcttgcatgcttgcttgaaatcacatgttgttttcataacatcagaatttttacaaataacaaaatgaatagttttcattaaccagtacttactgttgaatagtttccattatcgggtgcctacacaagttatcaaatagtactttttaggtaattataagttttttaaaataaccaaaaaacactcttttacactgatgtcgaacataaaacaaattatttttctaataggatatttggcaatatgttttaaaagacttaatgtccacattctttaataagcagcttcacttctagaaatgtgttataaggaaataactagagaggaagtcaaaggtgcataaatgtccatggcagcattatcattattaaaaatagtacaaaaccatctagcaggagaatggtaaaataaatgatgctacattcttattgttagttggcatataggctgaactgctgaaaccaaaagacccatctaaacaaagttgatttcaatcatattatattctaggaggtttgctggctgtacagcacaagattatctaaggcctgggtttcctctcctttttcagtagtgactagggtattatactttctagcttctgccagctcactatcactaggaccttgtgccagctcccagctcatgggaatggaaaaatggaaaaaaaggaaaaagtgggcaagcagcttgcttttaaggaaatggcctagaagtcttatacctcatttctttttttgtttgtttaggtttttttttttttttttttttaagatgggtcccactgtgttggccagggtgatctcaaactcctgagctcaagagatcctcctggttcagcctaccaagtagctgggattacaggcatgtgccactgcacccagaattgtaccgtatttctgcccacattccaatggtaaaaatttagtcacatggtcacactcagatcagttaagatgttaagggctaccccctacatcgtgggagtgaatgaaatatgaaaattgccatgcataaccttggaaacatgttaggtctagtaccagttacaaaaggtgatatactgtatgattccattaatatgaaatgtccataataagcaaatccatacacagagtagattagtagttgccagaggctggggggagaagaggtttgggagtgactgctaatggctgtggggtttcttttggggctgatgaaaatgttctaaaattaggtagtgatgatggctacacaactctgtgaatatactgaaaatcactgagttatatgctttaaaaggatgaattgatgacatgtgaatgatcccaatacaactattataaaagaaaaaaatgccccaatgcataaaaggacagcaaggaagtttcctccctcagccatggcttggatagagcaggacactctaccccaataatttaaaatcagaagtcagcccttatgtggcctgactttatgtttcccgtgcccataaaacttctagtaaagatttactcgaaagtagctctggctctgcagcacctccaggtgtctagcaacagccaatgtaaatcttctctggaaataacaatgtctatccaagcccaaatcattccatagataaaagtccaaagaaaatgagtaactcatgacataaaatataccagggaactaggcaccatgagtaggaatcagtgaaacacccagtcatcagctggacctgcaaagattagaggtattggatttattagacaaatataaaatcactgtgtttaagatatttaaaaaataaaagagaattttggaaatatgagcagacaataagcagatttataactataattataaaaattctagaaaagaaatatatgataaattaagtttaaaactgtgtagatttatcagcagatttgactcagtagaattagtgaactgaaagacggatatgaaaatgtttcctgaatgaaactcaaagaaacattaaaaaaaagatgtgacacacacagagagagagagaggtggggggagatcaagatataagagacgttaggataataagtttagcgtactccaaatgatagttctagaaagatagaatggggaagaggcaatatttaaatgtatgataactgagaatattcccgaatttttgaacccatggctttaagaagcacaaagcatcccagcagtaagacaatatccacaccaaacagattagaatgagactgctgaacagcaaagagaaggagaaaatcttaaaaaacagctaaggagggtggaaaaagaaatcatcttcaaggcaagagcaattagactgacagctcatttcttcagaagagaatttaattttatccttcatgcgtggagagaaaatacacagttaaaaaccttagacaaattaaatttaacagagtttaattgtgcaaagaatgattcgcaaattgagcaaagaatgattcgcaaatcaggcagcccccagaaccagaatatgttcacagccactccaggctgccacatggttggataacatttgtggacagaaaaaggaaagtgatgtacagaaaatggaagtgaagtacaaaaacagctggattggttacagctctgcctttgccttctttgaacctgcctttgccttctttgaacagttgtctgtggttgtctgaagtttggctactgcgattggctgagacttggctacttgttacaagagtaggttacagtctattttatacatcaaattgcgttatagttaattatgtatggggaaacctttaggcagaatttaaaatatgtaaagaggcagctctaggccaaatgtaatttaacaataccaatttataattctatgcccagtgaaaatatctttcaagtaactaaagagtgtctgtcagaaattcttggaatctcaaaatgcaacagaaaatgtatattattcaaatatcaagaataagggggttttataggggaaaaacacaaaagcaacaaagggagagctgcaagtttggtggacactgttcaggcaactcttgcaattttgcagaagggaggttttgttttggttttttttttttttttttttttttttgcaatttggcccattccaggccatacatcaccttctaggaattgctagctcaaaagagtaatttagagggagtgtgttactttctcagtatcagagaacaagaaagtaggtattaggttcagagcagaaaattttacagttctccacatccctcttcttggccaaggtggacaaaaatccaacactgaccaaccataatgagctcactgagataaaagtcattagaatgggagggtgaacttcagagttaaagttcccatttgcttctgttcaagataatgttctgggatcatttattttgaaattatgtcactgcttagattaatgaccctagaaattatgcatttcatgggagggattcctatgaagaggaaaagcaggtgcatgaataatctggagaattgttcagagccaagactcggtttctgtttggaatgcctaaaatcagaggtcccagctccatctacctaacgcaatatatatcctagtaagggccaggttgtccatgcagaagagattctggttggcttcacgttagaaatgttctcagggatgcacatgcagaagtcatttccaagtactatacaagtacccccactcaggaggctaagatgggaataatgttgttgtggttatttacatcctttgcaattccatatgaattttagagtgagcttatattgctaagatttttattggacttacattgactctatagatcaatttgggatgaattgatgtctttaccaataaacccataaacaaggtacatctctgcatttatttagtctttaatatttttcagcaatggtttgtagtttttaatgtacaattttgcacgtcttttgtcagatttcttcctaaacatttccttttctagtgctattataaatagaattttctttaattcaatgtccaatgattgtagtatatataaatagtatgtaggttttaatgtgccaatcttgtaaaatgcaaccttgctaaattcactgattctttttgttgattccattagattttctacatatatgatggtagtgtttgcaaactgtaagacttttaatagacaatatagttttatatctttatgacccaaggaatgtgaaagattttgttaaccagtcatagaaaacacagggcataaaggaaaatgtagatatatgcctacttaaagttcataactttggttcacaaaaagataccatagagaaagtagaaagagaagccccacattgatagaaatttgcaatacagttgaccctagaacaatatcggtttgaactgcgtggtccacttttatgtggggtttttttttttcattaaatacagccagccctccatatcagtgggttctaaatctacaaccaaacaggaataaaaaaatacagtacttgcaggatgcaaaacccacatatactttggtatctatatctgacttttggtatctgtagggccaactgcaggacttgagtatgtgtgggttttggtatccacagggatcctggaactagttccctgatggatactgaaggtgactgtatacacacctggcagaggcttagtatctagaattgtgctgcccaaaatggtagtcacaagtcacatgttttgaggacttgcagtgtctcttatcccaaatacatgccagatttcaaagacatagtatgaaaacaaaagaatgttgcctgttcactctgatggtagtttcttttgctgtgcagaagctctttagtttaattagatcccatttgtcaattttggcttttgttgccattgcttttggtgttttggacatgaagtccttgcccacgcctgtgtcctgaatggtaatgcctaggttttcttctagggtttttatggttttaggtctaacgtttaaatctttaatccatcttgaattgatttttgtataaggtataaggaagggatccagtttcagctttctacatatggctagccagttttcccagcaccatttattaaatagggaatcctttccccattgcttgtttttctcaggtttgtcaaagatcagatagttgtagatatgcagtgttatttctgagggctctgttctgttccattgatctatatctctgttttggtaccagtaccatgctgttttggttactgtagccttgtagtatagtttgaagtcaggtagtgtgatgcctccagctttgttcttttggcttaggattgacttggcgatgcgggctcttttttggttccatatgaactttaaagtagttttttccaattctgtgaagaaagtcattggtagcttgatggggatggcattgaatctgtaaattaccttgggcagtatggccattttcacgatattgattcttcctacccatgagcatggaatgttcttccatttgtttgtgtcctcttttatttccttgagcagtggtttgtagttctccttgaagaggtgcttcacatcccttgtaagttggattcctaggtattttattctctttgaagcaattgtgaatgggagttcactcatgatttggctctctgtttgtctgttgttggtgtataagaatgcttgtgatttttgtacattgattttgtatcctgagactttgctgaagttgcttatcagcttaaggagattttgggctgagacgatggggttttctagataaacaatcatgtcgtctgcaaacagggacaatttgacttcctcttttcctaattgaataccctttatttccttctcctgcctgattgccctggccagaacttccaacactatgttgaataggagtggtgagagaaggcatccctgtcttgttccagttttcaaagggaatgcttccagtttttgcccattcagtatgatattggctgtgggtttgtcatagatagctcttattattttgaaatatgtcccatcaatacctaatttattgagagtttttagcatgaagggttgttgaattttgatgggagaaaatttttgcaacctactcatctgacaaagggctaatatccagaatctacaatgaactcaaacaaatttacaagaaaaaaacaaacaaccccatcaaaaagtgggcaaaggacatgaacagacacttctcaaaagaagacatttatgcagccaaaaaacacatgaagaaatgctcatcatcactggccatcagagaaatgcaaatcaaaaccactatgagatatcatctcacacccgttagaatggcaatcattaaaaagtcaggaaacaacaggtgctggagaggatgtggagaaataggaacacttttacactgttggtgggactgtaaactagttcaaccattgtggaagtcagtgtggcgattcctcagggatctagaactagaaataccatttgacccagccatcccattactgggtatatacccaaatgactataaatcatgctgctataaagacacatgcacacgtatgtttattgcggcattattcacaatagcaaagacttggaaccaacccaaatgtccaacaatcatagactggattaagaaaatgtggcacatatacaccatggaatactatgcagccataaaaaaggatgagttcatgtcctttgtagggacatggatgaaattggaaaccatcattctcagcaaactatcacaagaacaaaaaaccaaacaccgcatattctcactcataggtgggaattgaacaatgagatcacatggacacaggaagggaatatcacactctggggactgtggtggggtggggggaggggggagggatagcattgggagatatacctaatgctagatgacgcgttagtgggtgcagcgcaccagcacagcacatgtatacatatgtaactaacctgcacaatgtgcacatgtaccctaaaacttaaagtataataaaaaaagaagaagaagaaaaaaaaaacactgtacacttaggctatactaataaaaaattctttcttcaatgataaattaaccttagtctgtcaaaaaaaaaaaagaacacaaaagaatgcacagaatcttaataatttctatattgaatatatattgaaattaaaatatttaggatatattgggttaaataaaatatattactaaaattaacttcacctgtttccttttactttttgaatgtggctactagaaaatttaaaattatatttgtggctcatgttgtatattaaagatatcctgatttataatatatctggacgttcctatgaaccaatcagaaataggcaaactgtccaattggaaaatgggaaagaatagacactctataaaagcagatacccaaatggccaataaatatgtgaaatgggggctcaagctcttaattaatcaataaaatgcaatttagaacgatattggcataccatttttatcaactaggttaatggatacttaaaaaagaaatgttggctaggttgtagtatagagttctctgtcttctactgctagtgagaatcttaatggtttcaacttcttacgacacagtttgtattatctataaaattgactgtgtgcacatactctataatccagcaattctatttattctgttttcccatatttattagagaaacccttgcacacatgtacctggagatatgttaaaaatatgtgcatagcagcattatttgtaattttaaaaactggaaatgagtagggggatgtatacatcagggataaactgatgtattttcataaagtgtatatcatgatgcactcaaaataaactgtagctaaaggcatctacctgaatgaatttcaaaagcataatattaagaaattaaacaagtaataaaataaatcatataataatccattaagttcaaaaacaggcacaaccaagtgatatgtatttttaggagtacatgcgtagaaaatatcctatacagaaaaacaaggatataaataacacagaactcatgatggtaattatctctggggccaagggagggatcctatcagaaagtggttcacagagagcttctaaaatctgataatgatatagttaataagctgattggtgagtaaatcagtgattatcttattatcattctttaaagtgtacatagataacttctttgtatgtataacagactttaataagttaaaacaaactacaaaacaactatggcatcaatccgattttgtttgcgcacacacacacagtagatttttaaatacgtattagaaaagaactctaaggaggcataccaaaatatttattttatggtgataagatggctacatgtagatgagtagttgaagtttgagtctggaaatttagattgcagggcaacttcgattgttgagctactttctaatacaaatcagcattctgttaattgtgcctatcaaaatatcagcatcattatattactacagacctgaacatgcaagcttggatattttaggaaaattttagatgattcctaaagttttcacacctgcagaaagccatgattggtccatttgatgtactgtagtcctcccttatccatggtttctcgttccacagtttcagtttcctgcagtcaaacatagtccaaaaatattaaacgggcaatttcagaaataaacaattataagttttaaattgtgtaccattgagtagtgtgatgaaatcatcttctcagtcccacctgggatgtgaatcatccctttgtccagtatatccatgctgtctcagctagctgcaccttaatcatttagtagtcttctcagttatcagatttcctgttgcactattgcactgtgttcaagtaacccttatttgttacttaataatggccccaaagcacaagagtagtgatactggcatactgttataattgttttttattttattattagttattattgttaatctcttactgtgcctaacttataaacatattcataggtttataaatgtaggaaaatgacacagcatctatagggtttggtactaggtatgaggatcttggaatgtatccctcacatataaaggtgaacaacagtacataagtttcctagaggtaaaataatttttgtttatataccccacaacaagtatgagtaatagaatattgtttgtattattatgtaattgtcctagaattcataaattactacattctcattccttggccaaatttctatgatagaattggcagtaccatatattacattagtaccaagtacattttgtaggtgacaatactgctcttttcatcaataccactctttacatgatggattcatggctagcaaacagaagtgaattatcagtaaacttgatgcatttggcctttctgatttttagataacgagaaaattaaaagtaggtctcccagctgtttccattcacctaacatcatgtcatttatttattaacagacaccttatcttgtctcttgcccttgctatttattcatttgcatgctaaaatttatcctaatgttacaaaagataatgcttacattactgaatagaaatgagtaagtttattcatgattgcatgaagagaaaacttgtttcaatagggactgaagaggaagccaaaaaagtatatcaaaatgtgattaaaagattaagaaaagtagtatgcctgggataaataaataaagtgaactgaaggaaaaaaataatctcctagaaatcccgataaaggatttctctctgctttagagaacacatcatatccacagggaatattgtaatgtgtaaaactttatagaagaaaaagtattcctttctgtccttggggctggcagaatgcatgcatttttaataataacaacagtaattactgttattttaatactaatttcatttcatgctaagcatttttaaatgaaaataccatgtctcaggtaggttaagtaacttgatggaggccactggtggaaggtagtaagtggtgaagccagaattcaaacctgggtctgttacactgcaaggcttgtgtgttaacctttgtataaaactagccatataccgaaatccatctaaatttttctgcaacttttaaccagattgagtcactcctgatacatagatcagaggtttaccgtaacatctaggtagactgccttgttttactacattacagaacttcaatgctatttattatttttttaaaaaaaagaaaaaacacagaaaatatgcccatgtctctgattagattcatgtaaaaagtcctctggctattatgactgctatgccaagaacaaaggtaagtggacaaagaactagctcaaaataagtcatttactaaaatctcaattccatcagttctgtctcacagaggaaacagtcattgcacctgttacaggagagaggggatttaaatatagaccacttaaccccttgagtaaagatagtacagagaatgattcacccaccaaggctgagcccagatttaatactgtctgtctaagttcccccaattcctaaaagtttctgactctgattttctgtggtgtggtcagggcagccagatggctttgaccatcctgagccccaagtctgaatatcatgctctccttgtgctttatatgcaagggcctgcttagaatgcactccagataccttgaaaccctcttcccttataagttagaacacatgaccagccccagagagctttctgggtgtattagtccattttcatgctgctgataaagacatactgaaaactgggaagaaaaagagatttaactggactcacagttccacatggctggggaggcctcagaatcatggtgggagatgaaagacacttcttacatggcagcagcaagagaaaaatgaggaggaagcaaagaggaaacccctgataaaaccatcagatctcatgagacttattcgctatcacgaggatagcatgggaaagaccagcccccatgattcaattacctccccctgggtacctcccacaatacatgggaattctgggagatatacctcaagttgagatttgggtggggacaaagccaaagcacatcattccgcccctggcccctccaaatctcatgtcctcacatttcaaaactaatcatgccttcccaacagtcctgcaaattcttaactcatttcagcattaactcaaaagtccacagtccaaagtctcatctgagacgaggcaagtcccttccacctatgagcctgtaaaatctaaagcaagctagttacttcctaaatacaatgaggatacaggtattgggtaaattcagctattccaaatgggagaaattggccaaaacaaagtggttataggccccatgcaagtccaaaatccagcagggcagtctaattttaaagctccaaaatgatctcctttgattccaggtctcacatccaggtcatgctgatgcaagaggtgggttcccatggtcttgggcagctccgcccctgtgtctttgcatggtagagcctccctcctggctgctttcacgggctggcgttgagtgtctgtggcttttccaggctcatagtgcaagctgtcggtggatctaccattctggggtctggaggatggtggccctcttctcacagctccaccaggcagtgccccagtagggactctctgtgggggctctgaccccacatttcccttcagcagtgccctagcagaggttctccatgagggcctcgcccctgcagcaaacttttgcctgggcatccaggcatttccatacatctgaaatctaggtggaagttcccaaacctcaattcttgacttctgtgcacccacaggctcaacgccacatggaagctgccaaggcttagggcttccactctctgaagccacagccagagctgtatgttggcccctttcagctgtggctggagcagctgggacacagggcaccaagtctctaggctgcacacagcatggggaccccaggcctggcccagaaaaccacttattcctcctgggcctccggtcctgtgatgggaggggctgctgtgaaggtctctgaagtggcctggagacattttccccatggtcttggggattcacattaggccccttgctacttatgcaaatttctgcagccggcttgaatttctccccagaaaatgggtttttctattctactacatcataaggctgcaaattttctaacttttatgttctgtttcccttttaaaacagagtgcttttaacagcacccaagtcactttttgaatgctttgctgcttagaaatttcttccaccagataccctaaatcatctctctcaagttgaaagttccacaaatctctagggcaggggcaaaatgctgccagtctcttgctaaaacataacaagagtctgtaaaaatgttctcccattctataggttgcctgttcactctgatggtagtttcttttgctgtgcagaagctctttagtttaattagatcccgtttgtcagttttggcttttgttgccattgcttttggtgttttagtcatgaagtccttgcccatgcctatgtcctcaatggtattgcctagattttcttctagggtttttatggttttaggtctaacatttaagtatttaatccattttgaattaatgtttgtataaggtgtaaggaagggatccagtttcagctttctacatatggctagcgagttttcccagcaccatttgttaagtagggaatcctttccccatttcttgctttcgtcaggtttgtcaaagatcagatggttgtagatgtgtggcattatttctgcgggctctgttctgttccattgttctatatctctgttttggtaccagtaccatgctgttttggttactgtagccttctagtgtagtttgaagtcaggtagcgtgatgcctccagctttgttcttttggcttaggattgacttggcaatgcgggctcttttttggttccatatgaactttaaagtagttttttccaattctgtgaagaaagtcattggtagcttgatggggatggcattgaatctataaattaccttgggcagtatagccattttcacgatattgattcttcctatccatgagcatggaatgttctccatttgtttgtgtcctcttttatttcgttgagcagtggtttgtagttctccttgaagaggtccttcacatcccttgtaagctggattcctaggtattttattctctttgaagcaattgtgaatgggagttcactcatgatttggctctctgtttgtctgttatttgtgtacaggaatgcttgtgatttttgcacattgattttgtatcctgagacttttctgaagttgcttatcagcttaaggagattttaggctgcgacgatggggttttctaaatatacagtcatgtcatctgcaaacagggaccatttgacttcctacccatctaatatccagaatctacaaagaactcaaacaaatttacaagaaaacaaacaacccccaaaaagtgggcaaaggatatgaacagacacttctcaaaagaagacatttatgcagccaacagacaatgaaaaaatgctcatcattactggccatgagagaaatgcaaatcaaagccacaatgagataccatctctcaccagttagaatggcgatcattaaaaagtcaggaaacaacaggtgctggagaggatgtggggtaataggaacacttttacactgttggtgggactgtaaactagttcaaccattgtggaagacagtgtggtgattcctcagggatccagaactagaaataccatttgacacagccatcccattgctgggtatatacccaaagaattataaatcatgctgctataaagacacatgcacacgtatgtttattgcggcactattcacaatagcaaagacttggaaccaacccaaatgtccatcagtgatagagtgaattaagaaaatgtggcacatatacaccatggaatactatgcagctataaaaaaggatgagttcatgtccttcgtagggacatggatgaagctggaaaccatcattctcagcaaactatcacaaggacataaaaccaaacaccgcatgttctcactcataggtgggacttgaacgatgagaacagttggacacaggatggggaacatcacacaccagggcctgtcgtggggtggggggagcggggagggatagcattaagagacataagtaatgtaaatgacgagttaatgggtgcagcacaccaacatggcacatgtatacatacataacaaacctgcacattgtgcacatgtaccctagaacttaaagtataaaaaataataataataaaaataacaagagtcacctttgctccgtttttcaacaagttcctcatctccctctgagaccacctcagcctggaccttattgttcatatcactatctgtatttttgtcaaagccattcaacatgtctttaggatgttccaaattttcccacattttcctgtcttcttttgatccctccaaactgttccaacctttgtctgttacccagttccaatgtcaagttcacattttcgggtatcttttcagcaatgccccactctacttgtaccaatttactgtattagtccattttcatgctgctgataaagacatacccaaaactgggaagaaaaagaggtttaattggacttacagttccacatggctggggaggcctcagaatcatggtgagaggcaaagggcacatcttacgtggtggcggcaagagaaaaatgaggaggaagcaaaaggagaaacccctgacaaacccatcagatttcgtgacacttactcactattacaagaatagcatagaaaagaccggccgcccccatgattcaattagctccccctgggtaccttccacaacacgtaggaattctgagagatacaattcaaattgagatttgagtggggacacagccaaaccatgttactggggaaacttctacacaaggtaaacacaaaggtttcttaacagcagactgcctcttactttgtaataaaagcatagcaagacttccttaagttaaaatatgctttcccctaagatttttgtctttatgtcctaagatttggtcttacttctaggcatagttccatactatgattacctcgaccccaccaagtacaagcccatctagaatccaagatagagcctagatgttgggtaattttcagttcctgtattcacaagacaaccataactcaagattatccattgcttcattgttcagaatattcttcattaccaggtggtagagctgatctcctagacacctctgcaagtacaggcaaatgtcctaaatcccttcctccagggtatgtgagggccgtatatgagcccacccactaacttttgtccattgctaccagatcctttccacccattctaaagagaagcacgacaaatgtctactaatatctcttttatgttgtatgcttgtctatgtgtttgtgtgtgttggaaaataactatgctgttaaaatataacttccaaagttgctctggactataatatggaaattcatagcaagaataagggataaattgaatgacttattcattctctccttacataaaatcgctttgaaaataaggaaacttcaaaactgtgagacaatattttgttacatttgtgaaatggtgaaaatgattccttcattaaacaaatatgtattgagccccaactgtgtgcatgtcactgtactagcccctggggcatagtggtgacaatggcaggtgacgtggaggaggtgctgtggaaggctggagggggcaggccagactgtgcggggctccctcagtgggaagctgggctctttttaggagactgggtgtgacagtaggtgtgacatgattttctttgtgccagtgccaggaacagattagaagggaggatagagtgaattttaatagacctgttaagctattcactcaccgaactggtagaaaactcatctttgatttggaaggattgagatagattttctcagttttacagttttgtttcattgctgataatcagtaaggtgcttcagaactttctatacaaatcaggaagtgagtaaaaaaaaggcaattgcagttaaaatgcttaatctgtgaagctattatgttttcactttagcagtaacttgagatgaaatattgtgaaactgccttacagtttatagttttacgataatgactttccatctcctcattatttacaaagctcttatatgtcagtaactaatggcacaagttctattttaaataattgctgagacactccacatgtattttcatactctaagcagcttctaggggaagtttttttaaaaaatttcttttagttccttactgtcatgactgtatcagagaaaatcattatgtagctccatgttttcgtgtatgtattattaaaagactgcctaacactgccatcttattgcattagaatgactgttctccttgtaatacatttgtagtgttgacatcactactctcaaatgagttacttagtcattgagattgatatgtgatattttaacttctagctcatccaggcatcctttctgttctaattattgttttgagcttttggggccaaatggatactgagtcaaaagagaatatacaggacacagaggcgcagacctgccaagatgctgcttattttaattcctaatgctctttgagaagcattttattctactcatttttggatgatatttcagtggcttacttcactgctgttattaaaaagaatgctaacttaggggagatttcaagcagttttcatttcatctctttttccattcaaattccataaaaagtaagacacctcaagagaggtttccatatatatatctgaactggtaagatgattatgttgaaggagaaagagacagagaatactggatttgaaacactgctgtcactgtgtaatcttggggaagtcactatatttaaaaaagacttatatgcaaaatgggaataatgatgctattgctttgaattgtcatcagatttaaatgaagtaatatatacgaatggtgttttgtatacggtaagtctctatacaaacgttagtcaatttcatcaaatgaggaatttacatctactcaaggacattcctgttgggaacacaactatcataaagaagccacagaactcacacttgatggaaagcagctataaaatggattgaaaagaatccaataaagaaagtatgccattgtttgcatcacgatagcccacagtgataaatcagcttgcattcattctcaggcacctgcagataaacacgagccagagatactgtgcaggcactcttgcagtggaaagaaaataaaatcagaatactggtgtagtttgaaatttttaaagcttaggatgatacagatagatttttcaatgcttatggtaaagaaatgtgtctctccttttaccatcacagacagtcacgttttaaattaaatagacatagatttcttagaggtcaagaaatttcaacagcaaatatatgtcttctctgaggcttacaatgtagtgaagaaattgttgtcagatgacaaaagatcagcctaatgggaagcaaaaaaagtgttttaatttttttaattaacatttacatttattgagctattgactatgtgtaaaatgttgtgccaagtgctggcctatgacgcctggggaaggaaaagggaagataataggtatggtgttctcactgaagtttactatctagtgagggtcataaaagtcccccaaaaaacccagggaaatagaagaattcaggcaatagagtgaaggcttaagtgtagaaaaacatcagttctctcaattggaacttggggaggatgctgcaatcagatggcagtgttaagcagtccttcccgtttcagaaggacatttgagaatgctgcatccaacatactcattttatggataactcaaatgaggtccagtgaggttgaatggcttgccaaagtctcagagcaaaactgtaagaaaaaccagtcttcagttgcaccccgcccataggccacccagctcaggggctagtagccactgagatccaacttatgccagcccttggggccagctgtagggatgactcttcctgggggaaagtgtctcatattctagttgtcacaaaggcatgtattacctacgtcctggttctgactccctagttagttcttttccctgcaattagtggtttttcagatatttcccttcctcattattaaactcttaacctaaaaagtaacccccaaactgatagaaacagagttttcctggaagccctgccaacttaaactcctcctatacccctatagatgttgctaaatggttttgtgttgcagacttgctgtttttcagtcattggtatttaagttgatagccacttgttttggtatctcaaaggatgtccaacacctggggcaatgtatgtatactcatgtgtcaaataaatgagtgaagaaatgaatgacgaaaagacaatgagttcaatagagtctattttactggttgccactgatttaataatttaatgtaataatacgttaataataactatttaatgataaaaccatttttaaaccaaaataacacaaaataaataaaattaataatataacttatcaagagataaagttatttctttggaaccgggttatgagtggccctcacatgagtctgttccaaagaaataactaacttcgtccctgtgatatatgcctttgtgacaactagaatatgagacactttcccccaggaagagtcatccctacagctggcccccaagagctggcaataagttggatctcagtggctactagcccctcagctaggtggcacatgggcagggtgctactgaaaactggttttgcttacagttttgctctgagactttgacaaacattcagcctcactggacttgatttgtgccctctataaaatgagtacgttggatgcagtgttctcaaatgtccttctgaaatgggaaagggtctcttgtccccctcgcagggtgtgtgatgggggtgtggctcacttcttcaccgccctgctgctcaaacctctaggggagcatacagatgggcaggctgtgggactccaaccccatggcagtgtctaggggtgaatgtttacagctgaagccccagtgggcgtgtgttacagggtgctcttttagtttagccatccataggtagctcgtgttagtcagctcaattagacccctgccttactgcagggacagagggctttctgtatcctagggatcttgcctctgtgtaccagaagaatcagatcacacgtggacttggagaatgagtgcaaggttttattgagcaggttttatttactcagtggactgggctctcatccgactgccccagccaaactccatgtcattctgccactcagtggcctgctggcatgccgatgcctgttggtgcgttcctctcgacggccagccacctgtgtgtgcctccattgatgtgcttctctcgacatccagccacctgtgtgtctccctgctagggtctcggggtttttataggcacaggatgggggcgtggcaggccagggtggtcttgggaagtgcaacatttgtgcaggaaaacaaaaatgcctgtcctcacctatgtccatgggcccgggccctgggtggagccctagtcagggaccacgccctcctctacctagcacttcccttccatatcatttaaagggaccatgcttttcccttcccagcacttcccttctgtatcacttctctgctgtagatttctataattttaatttgatgaccttcatctaaataaactcattttatttatcataactctggagtcaaaacatacaaatgaacttatcctgagtttgttgctattatttcaattgactatttccctgcctttactcagtttagtccggtctcttcttttcacccaaagtccctcatatgattggctcattatggcaagaaataaaaggaagcgggaagaaaggaaagtgaaccataagtacaatatgaaaaactaagtttgttttttcttgagtgacaaggacgcagattccgaatatgattccaaaaggaattccagaaaatatgagcagtatagtacagcatagttggaataagtattaatatattacctcccatagcaactatatggggaaaagccatcttaattttttatgccatgtctataaaaaattgaaaaagaaaaaacccataggaatggagttgtgttgccaacatagaaaaacctgtggggttttattaattcaaaatcaggatcagtactgtcttagaacctagccatcactttgttataacttttcatgttaagcagaaaagagacatgcttgatttcctcagttaatgaaagttttacaatataggtgcataggaaagttaaaaaaaagaaagaaaaatgtctcaactccacccatccctacctcatggaaatctagaatactgctcagcagactggcagcagtctgtgtttggtttctcttctatactcttctccatcactgtcaactccgtgacccttctttacctcatggcttctattgcagtatggcctctgcctacaggcttctctgtcattcaacttctgtgtcactctatcctctttcaatatttcatattctgacttctcagagaatataaaccatatgccacatcattctctggtatacagcacccaccccttgccaagccgcttcctagggcactgggcaggctgttggtggcctttatgccacacatagttatggccaggcaggcaggttttgcaggggagcactaccacttgtgcttggtggcgagggggaccactcagctgtcggcagaggtgggccccacagctcctaagcggggaagcagtgtgtagtataaatatggaaaccagcattttgaggcctttggtcaatatgaaggaaccgcacaatggagaagatgcataattcccttcctttcagtgccagttgaagcaggagaagggctaataactgtaatgcctgactgtattatgggaaaaattgtaggggggaacagcaatatggaagaagaagccccagattagctgtctatgagtcactaaactttctcccatcttctcaaattaatactgtcacaactacagtttcagtattcctgatccaaaaatctaaaatccaaaatgctccaaaattccaagctttttgagtgctgacatgatgctcaaaggaaacgctcattggagcattttggatttcagattaggggtgctcaaccagtaagcataatgaaaatattccaaaatctgaaatctgaaacacttctggtctcaagtattttgaataagggatacacaacctgtataagttcaaccatgaaaacaatcattaagtaataaattaccttctcctcccctaattttttatatttccagtcactcttatccatataacttattctctggcagtatttgtagtttgatatcttacccactccaactttgtgacatcttgtttgtttccaggtagactttatgaagtaggccatggccaggcttgctttggatgtgataatggaataagagaaagaacttcaaagtattttcttatgaattaatagagtctaaacattttcttagaccactcaaatgctaacgtggaccctccccaaggcagagttcagggctcctctgagcccgtagcctgttaacttcacaatgaccagagaacttcaggaatacaggaggaactggagaggcagaagtaggccacatccacatcctcatgtcctggattttgcatacacctattgccttgcttgttggccagtttggtgccaaaatgaaagtaacttacgttacctaagacttcattttcaccagtcttctatccagaccaacctttgtggcccaatttactttaaaatgattattttaatggctgcttttttattcagttgtaccttaattgcattaactacccttccattgtgggagacttttatggtttctaattctctatctatgttaatcttgtgataaatgaaagcacagagaaaagtacatcttgaagcatataatttcccatttaagtggtttcctaaggatacactttagatatcagactgagacagaggggatgaatattctaatgttcaaattgccaaatttctttccaaaaggaaattatatcaatttaaattgttaccagaattagagactgtaccactattgctatagtctcatcacctttaaatgttatcattgttttaatttgcatctgtccatactccatccatctattttgcatacttggggtatataaggtagtcaatataccgataaggagtttagatgcaatgatttatagataaataatattttattcaggaaaaaagtggctttttgctccaaatttctaaggcttttgaaatttacccatatctatgatttaattgtctcaataaagacttttttattagaaaataatagtaattaacaaaagaataggtttttcatcttgtctgtaaatgacaatcttctgcaggaaaattacaaaaccaaaaaaaaaaaaaaaaggctggacaatgggaaatcattcaagggcaggattttcaacatggtctccacactgcaagctaggaaaccatacttttctaaaattattcaaaatcacagagatgttattagagtttaaatgctatgtggccacccttgacataagtttatttcattttagattattaaataggaaatatgcctactgaacaataattaaaagtatctgagaagtaatgggccaagtttgtaacagtaacttttcatggttgctttgaagggatgcccggaagttagaatttcttataacttgggttgcttagagtaaatttacaccatcctaaatctctggttgggaattaggattttgcttctttagttctcctcagataagagtgaaggtgtcctatcctggagagatactctgtgctttcctaggtacgttttcaccactaccctcaaattgtaatggtgtaattatatcataaatttctatcaataaagaactattagggttaactttctatcaacaaagaactattagggttaacttttagagggatatctatgttttgaggtgatagcttagggaccttgtccagaaaaatcacagtcctgcgtcaggaactggaaataaaatcgtgcttcactgacactcctcagtaatgaattagcaagcttgtgcagtaagcccagtagaacgatggtagatgtgtcacacgaactgtagtaagctctccccttttctaaaattctggatcttttataaactctttgggaagggaactaagtttcatacatttatcagtgattaggactcaatatatgaagttggaagttttggtttttatacacaggtcatatttcttttcctctactcccatatataagcctggagcagtcaaattatttcatcatggagaataaaggggcaatatagacagcatgtgctgtgtaggaagcaaggaatatactacttatggctaactagcaagaacagttgtatatttgcactgcttaagttcctttggttatttcttaggtttgaaactctaaagataaatgatggagaggtaacattttaaaaggcagaaatagatctacgtatgaactaggtttggtgggtgttgagtgggcaggggagcattgttccaccttcaaagggagctgttaatttctacatgttattactaaagggagttctgtgtattccatgattggaacagggaaccgattatttatttggtctgtatatcaggttttagcctagtcattctgctggtaaggattagttctctcactcagccaaaatgagacatatttcacctgattgcatgcaattctgctgctttgtccactgcagtgccctctgagcagcttcccattattgcagtcattttcaggttttgctctaggatgtggtgaaaaggtgccacatccaagagcatgactttttctaatcccagcccacacactgatgtcaaagtatttttgttccttttcgggagcattatgttcttctaccagcagttgccaggaaagcatgaggatattttgcaataatgtttgaaatctgcatttttattttttagttggtatttctagtgtttatattttgaaggtcaggtgtgatgtcacattctcagtcattagctatctacgtattgctgagtatgtaactctgccaagttagtgcctgcagtgccttcccaaaatcagcatgaggatgatgaggagctacttggccttttttttgcacatgtaaacgtgcatagccagatggcaaaaagcttcatcagggcaagcacagagtccactctaaagtatcctacttcattgccacagcaggagatcaccctaggaactgtgataataacgaaaagagtaaatagaaaattgttcagtgaatcttagttatttcattatttgtaagtattcctccttacaggagcctgcctacctgcctgcctttcttttttctttcttcttctcttttttctttcctttcctattttcttaaatcttcatgactcaaaagactatttcattgctggggattattggtcaagggacatctaatgctgttttctactcacaattaaacaaatgcaaatgtaaaagcttcatcattcaaggaacatttatctctacatagggtattatgatggacaataggttgagatttaaaaaaaaaatagcacggtgattattcttttggcaagcccttataaattgctttctatgtgccaagcagttatcaccttgtttaatctttgtaacaaccctatatggactcttattttacaagaaaattgagacacagagaggttaagtaacttggccaaagttacaaagctggtaagggagagaactgagatacaaactcatgcagtctgacattagaccctgtgctcttgacccttgtgccatgctgtactccctgggatgaaatctcagtaccgtagaagaaggagtatattaatatatgaccatacagagcactatatgataatgacataaatgaggaaagtgaaaaggagttgagaggaggagagaatatctcggacaggtgaatgggtagcatccacacaggccttgggtgatgaggtaggaattgatggtagatactgacagtagatatcaagagtaagagtttgccttcagttacaggaaacgtcatgagtaggagatactgggtctagactgtaggttcagaaaataagtaatttagtttagttgcataaaaggattgtgtacaggagtacaagataaggtaggctgcagccacattttgcaggccattttgtagactgctggaataaggaggatggaggtttttgagcagtgaggtggtcagggcgcttaacttggtggcatatgagtttgaagaaaggaatgataggagcaggaaaatcaggaaactgtattcatttactactgcaacacacattaataatatagcacttcctgtgggtcaggaatgcaggcatagcttaggtgtgtcctctgcttagggcctcacaagcctacaatcaatgcacagactggagctatggtttcctctaaggctcagctggagaaggattcatttttgttagcagaattcagtaatttgtggttttgtgctgaggacttcagtttcttgcttgctgttggacagaggctgccctcagttccttccacaaatctcccagcataggcatcctacagcatggcgacttgcttctccaaaaccagcaagggaatgagagacttcagctcaacagcactggaatcttacttacttaatcacatatgtcctgtcacttttgccatattctgttggtcggaagcaaatccaaggtcactcccacactccagaaaaaggaactacacaaggcatgaaaatcagaaaataggaaccatcagggttactctagagtctctctcccgcagaggcagaggcaggtgatgggacacacactcggagtctaaattaggatggtgttaatgcaaatagaaaagtcagattcaagaaattatgtctaggaaatatggtttcttgcctatatcatgtgaaattctttgtgtacgttctctaacataagcatcaaaatagccttttgaggtaggtaccaggaaaatccttatttcacagatgatgacacagctttgagatattacacctagaggccacatatatcctaactttacctgggtgtcccagcctagatctgaacctaggatgtcaataccaaagctcctagtcttggccacttttctttacttggacttaaaagtataaaggacctaagagaagtggataagaggaaaatgaaaataactgcaagattttaaaccattccaatttagggtaaggtggtgttaactaaaatagaaatgtcatgaggggcactagtaaagtaatacttatgctatgcatataccacatgccaggcagtatgctaagcattgagtgtgcagatgctctatgcttatccagatgggaatatttaatgttcccaacagcccatgatacagttctttccccgatctcacagatcaggaaacaggaccatgccagtgcccgctaaactcaaggttctacaaatgcactggttggtattttgttcataactgttattgctaatgtctgatgcataaaaagtgctcattatataagcttttgaatgaatatggctattaagtggtagagtcacgatttgaactcagagcagccccatgctgccttctggagaggtcatttcgttgtagtcatattgcatttgaggccatggcaggatctagatgttcatagcaactctgctattttaggtacttaggtacctaaattccatcagtggaacttggaagaaagatcaaggccagaataaactattgaggagcatccacatggaaattataaagtcctaaaattagatgagatgattatgagagagggtataggtcccaaaatagaaccttagaggacacctatatttagaggttgagaagaggaagaggcaatttaaaaagcaatgaatacatataggtcagagagctaaaatggagatacagatataaaagcaaagagggaagagaaggaaggagagttgtcagcaatgtcaagcaccacagagtaatcaaagagcatcaagattaagacaagaaacctgaatttgtatgttaggagctaattgatgacttttgtttgaacacatccaggaaaaagaccacataaaagttagccagcatctgggagggtgggagagttgggctgtgaaagaaggattgtgtagtcaggtagagctcgtgagtataaacttctggtatttcaggagagctagttgtggtaatatgagaggagttgaacatttgagtaagagagatcttgtgtattgtagacagaagggaaggctcaagtaggatgaaactaaatagggcaggaaaagaagagatattgatggaacgtgaccccagaggaggcaggagaatgagatgcaagaacactgataagaagggcagtcctcagaaagggtgacagacttgtaccaccggagggaggaaggaagcctacaccctacaatgttttttaaaaaactttcttttctcaaatattgagagaaaaatatagaaaagtagaagctgatagagaaaaattgatgttcaaagtaatgatcttcaattcttttaaaagaattccagttgttaaaagatctgttcttcagattcaaatgtatcaagtcctacaaagcatctccaaattcctggttttattttatttttctcaactgaaattgataaatcttccaaaaaaaggaggtaagttcgtcacataggaaacagaaggaaagatttcaggattacaagatagtaagaaatattttaattaattgaggcaatagttgacaaaagtttatggaatgtctactcttagataagcagataattcagtagagaagacaataaaggataaaataagcatcattagggaaccaactgagataaaatggcatgaacttttaatacagcccaacagcatggtttcataacactgctcagtttctgagaagtggttgttgaaagaagttaataagccacaccgggttgggaactcaaatggtgaaaaatggcagacaaaaatagaggaagaatggattctagaggctagtgaagacagtatatacttcattttattgtgtttgccatcattgcacttcacagacattgcattttgttttacaaaccgaaggtttctggcagccctgcatcaagccagtctattgtcaccatatttccaatagtatgtgctcatttagtgtctttatgtcacattttggtaattctcacattatttcagactttttcattatcatatctgctatgatgatcagtgatctttaatgttactattgtaattgttgtcgggcatcacaaactgcacccgtataagacgtcaaacttaattataaatgttgtgtgtgttctgaccactccaccaaccagctgtttccttctttgtctccctctcctggagcctctctattccctaagacactacagttaataactctacaatggcctctaaatgttcaagtgataggaatagtagcacgactctcactttaaatcaaaagctagaaataattgagcttaatgaggaaggcatattgaaagctgagataggctgaaagctaggcctcttgcaccaaatagccaaattgtgactacaaaagaaaattcttaaaggatattaaaagtgccactccagtgaacacacaaatgataagaaagtgaaacagccttattgccgatatgaagaaagtttgagtggtctggatagacgatcaaaccagccacaacattcccttaagcacaagcctaatccagaataagtctctaattccatttaattctatgaaggctgagagaggtgaggaagctgtagaagaaaagtttgaggctagcagaggttggttcatgaggtttaaggaaagaagctgttttcacttcacaccttgttgcaaggtgaggcagcaagtgctgatggagaagctgcgtcaagttatccagaacatctacctaagataactaataaaggtgatgtattagtctggtctcacactgctataaataactgcctgagactgggtagtttataaaggaaagagatttaattgactcacagttctgcagggctggggaagcctcagaaaacttacaatcatggaggaaggggaagcaaacatgtcctcttcacatggcgacaggaaggagaagtgccaagtaaaaaggggaaaagcccattataaaaccttcagatctcatgagaactcactcacaatcatgagaacagcatgagggtaaccacccccgtgattcaattacctcccactgggtttctcccacaacgtggagactatgggaactacaattcaaaatgagatttgggtgaagacacagctaaaccatatcaggtggctatactaaacaacagatttttcaatgtagatgaaactgccttctgttggaagaagataccatccaggactctcatagctagagaggagaagtcaatgtctagcttcaaaggacaggctgggtctcttgttaggagataatgcagctggtgacttttaagttgaagccaatgctcatttgccgctccaaaaatcctagagcccttaagaagggctaaatctattcagcctgtgctctaaaacgaaacaaaaaaacctggacgacagcacttatatttacagcatagtttggagaatattttaagccactatggagacctactgctcaggaaaagaaaaaaaagattcctttcaaaatattactgctgattgacaatgacactggtcactcaagggctctgatggagatgtacaagatgaatgttgttttcatacctgctaacacagcatccattctgcagcccatggatcaaggagtcacttcaactttcaagtcttattatttaaaaaatgcatttcataaggccatagctgccatagatagtgatttctcagatggatctgggccaagtaaagtgaaaatcttctggaaaggattcactattctggatgctattaaaaacattcgtgattcatgggaggaggtcaaaataccaaatgaacagtttggaagtttgcaagaagttgttccaacctttatggatgactttaaagggctgaagactttaggggagaaagtaacttcagatatagtggaaaacagcaagagaactattgtagaagcgaagcctaaagatgtgactgaattgctgcaatctcatgataaaacttgaacggataaggagttgtttcttaaggaggaacaaagaaagtagtttctgagatggaatctactcctggtgaaagtgctatgaacattgttgaaatgatatcaaaggatttacagtatcacacgaacttagttgacaaagcagtagcagagtttgagaggattgactccaattttgaaagaagttatctgggtaaaatgcatgctacagagaaatatttagtgaagggaaaagtcagtcaattttgcaaacttcccagttgtcttattttgagaaattgccacagccaccccagccttcagcaactactaccctaatcagtcagcagccctcaacattgaggcaagaccctccaccaaaaagatgatgacttgtgaaaggtgcagatgatcgttagcattttttatcaaaatattttaaaattaaggtttgtacatttttagacaatgttattgaacacttaatagactgcactttcatgggaacataacttttatatgtagtgggaaaccaaaaaatccgtgtgacccactttattgcagtggtctggaactgacctcgcaatatctccaagctatgcctgtattggcgtggtctaagctgagcagtgaggtaaacgaatactgaaaggataatccaaaggcagatctgggtgtagcacagatgatcagaaatgaggagataaacaaagtggtggttgtgatcagaaaaggaaggctcaaagtctgaagtaaaatagttccaaatcaaggaaactataaagtgctgtctctgtagtgttggagattaaataaggaactatgaggccaatgcattatacggagcacagaaaaccacacactgcgtgttttcacatataattgggagctgaacaatgagaacacatggacacagagaaggaaacaatgcacactagggcctgtgggggctgggaggagggagagcatcaggataaatagctaatgcacatggggcttaatacctaggtgatgggttgataggcacagcaaaccactacagcacgcatttacctatgtaacaaacctgcacatcctgtgcatgtgtcctggaacttaaataaaataatttttttaaatgaggccaatgaattaaaaataaatgaatgtggcaggggatgagaggaggtagactgagcaggcacccaaatcatcaagacaggtggaatgttatgatgagttcataaatatggtaacaatagggcttggatgacaaggttcaaagatagaggttgaaggagacagaacaatactctaaattgacaataggggataggaatgtttttgagtctggtaatatcttcaggggcaattaaggtaaagaactggaagttcaacttcagaatggatctaaactgtaggaccctttgctttactatggattaagaaggcaaggtcatcagggagtgactggtagagaagcaaggacacggagcagaaagggagagggctatttggaatcagatagaatcatttgtttccctcatccaccccatcaccctttacaggttactcttctaatccttaaaatagtctacaaagtattatccccattttatcagatgaaaagtatctggctctgaaatttgaatcttgtcatgattgcaaatgccatggtcttttcactgccacatactgactctcagtggtactgaagtgttactgcagcttccagggactaattagaaatcatgtctaatttatgtgaaatggttataaaacacggtgtctttgttttgctcttgaattatacttggctgtaaaattgctatacaagctcgcatatctaatactgtatatttagttcttattttttaagaaaaacattttggactcttaagacattaaggaatttccaaatacataaatatgatcatattgaatttctgcaactgtagtcaaaaacattaagttaatacttatattgcattatttttcaggtgtgaaaatgaaaccaagttcaaaacagaagatatattttgggcttacaatttctgccctactccatactcctggactgcacttctgggccttattttatatcttgtcttctttgcacctggtaaacaaagactttgttatactgttgcattaattgaattgcctctttttggagtagataaactataatttttcaaatttcttacatgctattttactaaagtttttaatgttttatttctcaggaatgggaccaatgccttggactgtgaattctgaaatatatcccctttgggcaagaagtacaggaaatgcatgttcatctggaataaactggattttcaatgtcctggtttcactaacatttttacacacagcagagtatcttacatactatggtaagataatattttttctaacatagttttgtttttatttttatcactatttttagatacactataatatcatttgtgattgagactatgtggttatattttgctgttataagtatctccatgtggctttcttgtcctccaaaggcatcggaaatgtgtctgggaaagaagagagggattctcctatcctaaacagcactgcttcttgttccacagtgcttagggctgtcacccaacccctctcccaactcagacatctcccagctatctccccaggtggaagtctttacaccatagcttttagtttcacagaaacaaacaaaaaaaaaaaacagaaaatggtaaaaagatgtaggcagggagtctagggccaatgagatgtcctgtgacaggcatagcgtccagtccaagagcagaatctgcgtagggctgaaagtagcttcctcaaatgcttaacagtatgctgtgctgtggccataccttccactgtatcacctgtgctgctcaggccagtgcttgtgcatttcagtgtcctctgagaccagtacttaccacttgcaaaagtgtaaacatgacggaagtattcaaatgcaaatgtatggaggccataattcaaaatgaaaaacaatagtgcttagtggctgagtcaggaaaagactttgctttttagaaaaaagatttctgcattgttcacatgactttataggttgcaataggattattcatgatgaagtatgaggtttcattctaatatcctcataagtccatgtggtagagacggaatgcctgctgcttagaccattctcccagaagagcttctctcatctccccgcaatctctttactctgtgctctggccacttatcatttctctttgcaagaacaggtttgtctgcccttagctctctctagtagactataaatccctggagggccaggactgtgccttgttcattgttacattcccagttcctgccaaggcatcctgttcacctgataagcaccaaaaagtgtttgtcaaatgaataaatacatggataaattttgcagatgaatggtgaatatgatgaaacattataaaaatctattccccatctcttctgaccatgctgaactggtatttgcttttagttaatggtatttatctaatgcttttattatcttcataaaactcttctctctcctaatcaccacttaagacatttgaaatatttattttcttggaaaggaaatgcactggcattttaaactggatatatatttagtatattcagctggatcccatttggcaattaaaatttttcgataaattcataaacttatcttcatgacataataaatacgagcacaataaatatttcctcgtatttactgattctagagaacacttaaatatttgaagacctaagtatatgctcgcatcctgagaaagcatttttcatagaaaggcatagaccaaataataaaagtttacatgattatacttttgacagcaaagctcctctttcttgaatttatcctgccagaaaaccagagaaaaatgaggcaacagtaatgaaatttaaatagggcataagcagaattctttcaaaaataaacagttaaaagtgtgttgctttgcattaagcttctctcatgtcagagcactggtccatttggtctactactctctagtagtagaaaaatagttcattcaggctagtttttctccctttttgtgtctcattttaatccacatgttactggtttatgtaagctatgcatttatattcctcatttaataaatatacatcctaatcgtgtattcctctggaaatagttatgtcttctttgttgcctccttttttattgtttcataagatctcaaaatttgattccttcctcaaccatattgcttacacaggtctgccttgtgcccccattcaataatgtttattactaaaaagtatcattgctatatcaccaatatgccattttatatacagcacatgtggctaaagagatcccttggggggcattatgtcaaagcttctctcttgaggtagtcaatttgtgtaattcaattaaatagttgttttaatctggaacttaatgtagggctctaataagatttaaatccttagaagaataaaggtgaggaatatctaactgttcaatagtcctgatggactcgttacagacattttttcttgccattttcactccaagggaggaataaatgagaaactgagatagtgactgatttgaccatgacatggaccaggtcacagcctcccaggtctgcccacactcctccacgacttagccacaggtctaaccattggaacccacactgagtaggcagttttggcatttgcgtgctttggattcctcagattttgtaaaacggtcttgtattttaatagcaattccttgatattattcagctttgggaatccaggtcacaagaaagaatctgtaatcaacttcaggaatcttcctaacccaacaaatgttttttaactataggagtgagtttagcgctgacagatttgatttgttacttctaattatgctactgttcccaaattgtgaaagataatgatgaagataaaatatactattatatttaaaagtcaaactgggtttgctgttacagattttgtagtttagaagcctagtttaatctaaaatgttttaccatctgtacttattttttctttatcttcatcataattactatcccgtctttgtccctccctgctaaagattccatttctcttcctacctccacagtcttgcatatctgtactcagaacacaggacttcatctcctttcattttttttttgtcaaaattcccccattctccaagagctagcttatcagtatcaccctttttgtaaaaacatcccaattaattagtcacactaatcttattctgtatcttaatagcaactcttcctttcctggtcatttagtagaatttaacaatctgggcatcacttttttgagcaactgatattcagaattctaatgggcatgataacatacattatttctattctttacagttgggcaaagctagaattattttccccattacacagatcaagtctctctctcaaccatctcttaactatatctcctatacatgcccctgattttggctgtaagatttacagaatcataaactgccaacacttaagtaggagctgagaagcccccttattttacttaatgaggcaacagaggcccagagaagaggttaaatgactatccagaagtcacatggccaacacttaaactcagttcttcccactcccagtctgatatcctttctccagccaattgtcacattagtttttcatcttacttcccccatctcatacacatgatggtctggactgaaagcctaaaattagacaggggctccattttactttgttgttttccaccatcaaaagtacaagtatagtttcttatattcaaattggcaattcaattatgtgtgtgtgtgtgtgtgtgtttggtagagacaggtttcaccatgttggccaggctggtcggaattcaattattttaaaagtccatcttggaaatgtgtagagaatataaacaagtcatacattcatatatctcatccatctaggcttgctatcatgacccttagaaaaccaaactagctaatatttatgtgtttctggctgttctgcattgacatgcataatcttacagcaaaacaaaattctctgacttcatggagtttacattctagtggagggaaatgaaaaacaaattaagaaaggaacttcttctgacctcaaagtgcctctagtgtaatagacaaggcaagcatacgtgtgtgtacataattataatatttcttggttgttattttaggggtctcaacaacatgctgtgatagcacatggaagagaataattccctctagtcagggaagggaggaaaggcttcaaagccaaacttacatctgagcctgttctattattcttgagtttctaaacttgagtttagaaagatacattacatcatattctcagagttggaacaattggagtaaaccaggttcatagtaattttttggtccatttcatactgtgattatgcatgactgaccagaaaaaaaaagtcaaaatcaagtaatctttccaacttaagcctctctctatatattcatattcatgtatctattatattccgttgcaggagctttcttcctctatgctggatttgctgctgtgggactccttttcatctatggctgtcttcctgagaccaaaggcaaaaaattagaggaaattgaatcactctttgacaacaggctatgtacatgtggcacttcagattctgatgaagggagatatattgaatatattcgggtaaagggaagtaactatcatctttctgacaatgatgcttctgatgtggaataattttcagctgctcatatatttagttatttaaacaaactggggggagaagaacagcaattggtgacttcactgccctgcttctaatctggttctttccacagcctagttttgattgacttcatattctagaatacttgattaggaggaagatacaaccatgatgactttttttttccacaaggaacaatattttaaaaaatatttacagagattttaatctaataattcttaagcaaatgtgtgtaatgccttcctgaaatagtctaaaatgaatattgtacccagtgacttcagtggtatccttttttcctaagaccatttataattattagtggcaacagagtcagtgctaatctagccaaattacatatgtataatatatttataaaggattctgggagatggtccaagggtgttctgtgtcaaaagatggcctattggccctcagttttcctacagagtagtggcttatctctgatcagctgttacaaactaaattccatgtaagctttcatcaacaaattccaaagtgcctcctacaagggcacagctgtccgtatctcctttggattccatatttttgtttctctccaattcagatattgggagttcttcagatactgactctgcacactatcttttgaacattatgaaaatataatctgtcgggttgttttcatacttcttttttttgcatcagtgataaggcatacatttgcgcagatgagctaggaagttttgagaagtaccttttatgttcagaaagtaacagattaaaggtttttatgggttccaaattggttagtcacttaggtatgcaattataaatgcaaaatagtgccagatctttaactgtatatcagggtcagtttttgttcatgcccaaatcactacaccttcctcattggccttggagtcctactatttcgtgccttcatttgtgttacatacatagctgcaagcaaaccatttttcccctttcttttattcaaacaataatttttgaaacaaaaaagaggaaggaaatcagtggcagaaataatcctgctgttattggtgtttgtttaataaaaataatgggacttttttcttaactttttattagctcttcctaagggaaatgtcacatattattatttaattgtacttgtctttttttactttaagagcataaactcgtttttattttgcacacttttctcattttcctgagaatttaccagaaaaaaaaaagatacatagatttgtctctgtgtttttcttattcttggcttagtttttccttcttgtgtaaaaattgagattgcctattggaacagataattggttctaatatagcacgtctataagaaatgcaggcttaattatatttccacaatgtctttccaaggtattcattggtttttatggtaattcatcactgaactcttaatttttgcttttctattaagaactatatagtatgtacaaaattacttgatcacaaaattacttgctagttccaggaaaaatatgaatgaatcttctgtggccagttaggaatacatcagtttgatgcatttttaaatggctctaaacatctaataaggtactgtatttggagagaaaaggtggctatctccatattcaaaatatttcttccagtctccaagatactctattcttttaatgtctggcttgttcctatcacagttatcaagctgagaatacagctgaggaagttcattctctaagtcaccagaggtataatatgtgcttaaactgtcaatttagtgccctaaaaatccattaaccaaaaacaaaaacgttttctccctttggtcatttcatataataaaaaaaattaatattttatagaggttttttccttgaattaggtgctttaacaattgatttccaagggaatattagtattgattttttcctcagaaaagcagatatgatttaatagggaaaattattattctattgatatttcttatctcataagaaatttcttatctaatattttacacaggtaaattgaagtgaaaaataagctactatatggtacaatcaaaatataataaggagaaaaagtagaccaataaagtgctctctaaaaatttattttttggacttaatcaaaataattgcctcaatccttctctttattgtatatgtagccttaactaactatatacttataaactcagctgggctgatgcacagtaactttattaaaggagaaactggactcttgttatttcctaaagcagaacatggcctgttctccctgatataagaaaacaatgttttcaactttataaccataaatgcacataataacagggaaaattagccacagttctcctcccctactcccctgagcccctactttaaaggactatttgttatttatatagtgttaaagataatattccatatctttgaagtataagacagagaggcacagtataagaattatttataactttttagaaacaattacttgaaaaggaaccttatacaattagggtattatttttagatttggtgaacatttatagtatattaaaaattaaatgtttaaattttgcaggtttttttatattaggcaccttttaagttcccagcatatttggctaccactatcaacttggaaacattccatttgtagtatcatcaaatatatattttgtaggacaatttatatatgatgtgatttgacctaccatattaaagcagacacagattacgtatcatgctttcaaccaaaattacagacttcctttgaaacatgctgcagatttgatagaggtatattatgtcttaggaaaatacaatgaagaaggtccaaatccctattgaggctggatgtctgatctgcactagacttaagaggatatatcatttcatctgcatataaacacatagggctgaatgtgatgtcaaaagggtttgccgttaataattttcttcaatgtaaacattcctaataattttgattgttgctccttagtcaatcatttcccaaaacatgattatttttaatatatgtaaaatatttaaataataaataataaaaggtaatgtgtccattttaaattttgttcccagccatacacagtagttccctgatacaaaatgctatgagaataccgactattttttcataatttaattttaccactgaacctgattttagtacataagagtctaaatattaagttattcactctaaaaggggaaatcagtaaaagcaaggaatttatgaaatttttgctgtaatttcagtatctgttatacaggggaagaatgatcaggaaaaatataagctgacaacttacccttttgctttttaacaacaaaataatattgaaaatatattagaataactcacagatccagaagttggtggaaatggaagaatgttttagaaaataccatccatatgtttatctaagaaagtctcagaatttagtgacactaatacagttcataaatactgtaatacagtggagagagttggaatgttattttggttttatttcatcagcacaattattaaaaacaacaaaattaatgagacgttttgttataatcagatttttttttaccatattgcaagttataaaatgtcaacttatactaagtacctaacaactgacttttattcacttgttgtgacaagtttttaattaccaaattaagaccttttcagtatctatgagtaaaagaaatagatgattatatcagaccaggagcagagaatttataatatgtgctttatagcaaaatgtattaaattgtggttaaaatttatagctcatatgtagctgctgccaataagaaggctcagaattgttctgtggattaatttttacatcctgttttctgtcacttttaccaatcttcttggcctcatgtacaataatgtaaagccaatttgatgaaatggttcaggttgtagcagtctataaattgtcggtacattcagctcttctaggtgagcaatactgctgctatttttctagaaatagcaatcatttaaaaatgccaaatagctaactgctaccaactctttcttgtatcttgtctctttagagaaggaaatttttgtgtgccagtaatcatcaaagaggtgttttataagagtgttgatgttcagaagttcatgaaagtattttatccgtataatttgctagtgagctaaaacaatataatttatgtaaatctttatatgtacaaaatatatagtctgttgtacttgagtaatttggtctatggaattttaaatgccttcatttagcagtaatattcacatttttattttagacagttaagttcatgtgtttgattttgtcatgtcagcataaatgagaaaaagaagtggatcatgcagctaatgagtaaccaacattttgtaaagttttaaagttttagcaaacaacattattccatctcatttaaaggttaaaaaagaagagacaactctagccaaagtagaaatttatattctacacgtccaaactgtctcctagcagcttttggactatatatcacttgatgttaaagtatcttttatttgtaataaatattcaaatttctatttagaagctctaatgtatacctagattaaatcaaatcacagttttatgcttttaaaatatatgtatttcaaactgtatattttaatttctgagtgcatgttatatagtatttaatacttcagatgtcttggcaaattcaatataagtatttattcccacaagcgatatatgggatatctcttaaaaattatgaatatgtaccatttccttcaaagtcatcctagcctatgctgtatcaaaagtattgtatattttatggagatttagtgatatacatgtaaatgttttttaagttattttattgaagttcaatctttacataaaattaaaatctttttttaaaaaaagtgtcagtgccagaactgtaaatgaaaataatcaaataaaagttaaaataattcattactca

SEQ ID NO: 1265 - DNA, 273221 bp, Homo sapiens
cttcaatgttcttaactatgtcatcttcttggactgctgttactgcgcagcacccaagccccagggagacatggaagcaggtaaatagctactcagagggtggcagtaaatttggtgagagtcctggcaggtgctgtctgagggggcctttgtggtgctatccaaaggggcccgagtctttgggtcagccttttgtccctgtgattttacaatcgacctttctcagaagagttgcctttagtttgaggttccttgtgagtagggtagcagcagtttgcttcaatgttgggaggacttctcgaatttttactcacagggaatgaaaaagtgtcttcaggcacgcagagaggaagtaaaggcactaatcgtagccacagagagagcgattggaaagacggtggatgtggcagtcttctttaagtgattcactgttgtttacccatatgtgacatggctatgtttgaatttaaaaaaaagttaatgtctccataaaatatgtttaaaagtactgggctacataaccaacttacaaagagcacagtatcagacaatcaggtacgctgattaactgttaggaatatatttgaggaatggtatgtaaaatggcgagagaaaaaataaagaagatagtccagtaaatgggctagtttttgaaaggaaaatttgcacttatttattgcatacgtctgttctgtttgagaaacaggacaatttacatgtgaatctttaggagagacttaagtgtgagtaccaaacttattagattatctgtcaaaagaatggaattaaatcttggaagagaacaatatatctataagatgctttttttttaagatggaatcatgtttctttaatttattgccacaagaggtgtttgtaagtatatatgtatcagaaagttcttacagaagagaaatttttagtgcttttataaaagaagtcatatagcatgaatagattcaaattatggttccagcacagggcaatagtcaacttacttcacctagcatgtttctctacctgtaatatggagttaataaggactgagagaaatgctaagtaacttatttagtatttagtaggcacttgataaatataaattattttcgaaatcacaatgcaagcctttaaactacatggcaatccggtatttaattctaatagctcatatgaatttttaaaaatttcaaatatttccttatttgatgctgaagagttttctctcagtagctgggccattatataactgagtatggggacctcagaggctaagttgcattttttatttgattccctgtctttgctactatgataaattacgtcagttggagccggtcctttatcctacctctgtgtcgattttcctgttggtagaacatatgttatgagagtatctgtaggatgtggtaaacataaaaataaattagaaactagagtctagatttttatttgagttaatgaatcactgaatttgggcctcatcttttgtaaaggaaaattcattgttaacttgagaccctatgctatggctacaccaatcatcgtgaaaattactactagagcttccagatcatgaaattcacatatttcatataagacaaatatatattttttattgctaggtataaatttaaggcaagagagatgatttcaaatgattagtgttgacattaccattatatttttgattgtcacataacagttctgattttgccttcattcttgacatacaacatttacctgcacataacaaaagcaatttaggtaaacggtctgactctgaccagtatgaaacttggtacacaccatagttctatttttataaaattgaattattactggataggtcttagttaagcttttgtttgggaagtggtattttccaatgtgtatgttcatgctgagataacaagaggcttaagacaaatgtttcactccaaccatatgggtttcttttttttcttttcttcttttttttttttttaatttttatttttagtagagacagggtttcgccatgttggccaggctggtctcgaactcttgagctcaagtgatccacctgcttggcctcccaaagcactgggattataggtgtgtgccccagtgtctggtccagccatatgggtttctgctggcttaattctagagtatctagcttgttttgaagtatttgatgctatatagtgttctagtttaaataagtgataggtacaatacacgtgtgactcacgctttaagatccatgttctatgttaccattattattttggcagcttttggtgttgttaaattcttctattagaaattttaggctgtgtacagcagctcatgcctgtaatcctagacttgaggagactgaggcaggaggatcacttgagcccagaagtttgaggctgcagtgagctatgatcacaccactgcacttcagccagggtgacagagtgagaccctgtcactaaaaaagaagaaaaaagaaaaagaaaagaaattttagtgtttaaacttgccaaattcctttaggacagctgtttggcttgttagcatttatgtctgcagttatgtatcaccttttctgaaccatacattttggtattcttcccatcatctaaattggtttaaagaaaagaataaatattgcatcagacgaacgtcataaattgacattaacctgatatcaattggctcacattttaagaacaaatatgattaatccatccatatttataaaaggagttataaactatgagagggaaagactcttgatttcaaaagattcaacctaaacttaggataaagaatttctgtaagtctagaaccctagcttatagcacatggcagtgcctataaaacaactcctggtaccgcctggcttcatgatcagaatccagtaatgtatcacttcttttgtggaatctctaactagagattttgcttaacaagccttcagtctcccccaggttttgtggatcttttacttgttctgcttatctatctggtgtagaaattgaattcataatatttgatgtttgagatcatggaaagtaaaaaaaatcaagaccactaactttaaattaaatataatagaacaaactatatataggtaagactttaaatatccctgggattcatgaaaaaagttatactggagaatcagacatacagaaccagaaaatttttaaaacctgcgagaaaagaatgtctggaagatttagctgagatgagaaaacttggaagtcttagatccagatctagccggtgggaggtcacccctgactctaaaaggtgtgaggaagttcaggtgatggtagagccagtatttttggctaaagtgagaggcaaagtgaaaaaagtaaaaaatacgagcattaagtaaaagacaaacaaacaaaatagggttaaagtccacaatggtcgatggctttgtgtgtgcatgtgtttcggggaagggagtaggggaaaggttgaaggggtggaaacaacatgtaggtccagatcgcaggagatacttgtcacgagccagtttctttctctaggcttagggactccttttgttaacgtttatacgttttcctattccttgcttactttatttgattttccttgattttcttgttatctttcatgtttaagtcttatttttagttattttttcagacctgaagtttctttagaatcaagctactaaaaccctccatgcccttgccttgtactgtacgaataaccttgctgtacagtggcctttattttaacctaaaggtgaccttgtacagctcacttttctagtaggatggcttctgctctattttgcgtctttttctgtctgggatagacggggcctgccatttatatcatgtacaaatgatacatttatatcagaaatatctgttaattattttaaagtatttttttcttaaaaaaatgcctttcctttgaatttaagttttttttttttttttttttttttgagatggagtctcactctgttgcccaggctagagtgcagtggtatgatctttggctcactgcaacctctgcctcctcggttcaagcaattctcgtgcctcggcctcccaagtaactgggattacaggcgtgcgccactatgcccagctaatttttgtatttttagtagaaatggggtgtcaccatgttggccaggctggtcttgaactcctggcctcaagtgatccacccgcctcagcctcccaaagtgctgggattacaggtgtgaaccactgtgcccggctaagttttgttttgattccaaattgtgcttgctttctctctctctccttctgtttctcataatcacggttctggcattatgtttctccaaccaactcgctagaggcagtgacagcacagcatccagcaaagtgtattgttgcagaaggttttaacacactgctgattagttgctcatgcaagcttctagttaagactcagtactatagcctgacatgggcttttcacgtggacagtcctgtagccgctgaaacaagtcaggtttccttttgtcatagaggaaattttattcagtgacaagcagagtaggcaaggccaagaattttaggagaggcaaaggggaatttgctgtctctctaccagtagcaaatactatggagtaaataaaatttgaggccgggcgcggtggctcacgcctgtaatcccagcactttgggaggctgaggcgggcagatcatgaggtcaggagatcgagaccatcctgcctaacacggtgaaaccccatctctactaaatatacaaaaaattagccgggcgtggtggcaggcgcctgtagtcccagctactcgggaggctgaggcaagagaatggtgtgaacccaggaggtggagcttgcagtgagccgagatcgggccactgcactccagcctgggcaacagagcaagactcagtctcaaaaataaaataaaataaaataaaataaaataaaataaaataaaataaaataaaataaaatttgagaagctgcataattgaaggtagcttttctttctttcttttctttttcttttttttttgagacggagtctcactctgtcacccagtctggagtgcagtggcacagtctcgggctcacgataacctctgcctccctggtccaagcaattctcctgctcctgcctcagcctcccgagtaggtgggattacaggcttgtgccaccacacccggctaattttttgtatttttagtagagacggagtttcaccgtgttagccaggatggtctcgatctcctgacctcatgatctgcccgcctcggcctcccaaagtgctgggattacaggcatgagccaccgtgcccggcctgaaggtggcttttcaaactagaaaagggaaggttttctaggcataggttacctgagttccctttctagatcggaggcagaatggtaatgattgggaatttgtgataattattaaataatttaaagaaacatgatgcttaattcccaccagctttactttgcattttgtctatatctgacagtaaccattgttttccaagcactgtcacagctgttgatcaattaacttccacatgaggattcggtgataagaatgcacacaccacagatcacagtatctgtcccatggtagagacctaataaattccctcacagctcttttgctacgttcctgacagcttacctaacctcttacttctcttgttgtcccgtgaaggggtctggattagttacggggagtaaataagaaagattaaaggaagatagaaaaataggtgctatttcacatttgtgaaaccaaattcaactgaagaaaaaagaagttaaagagaccatctctttgttcttagtaatttttttttccaatgtgcagaggctgctatgactgatatcaggtaaattttaatgaaaaatgagtttatattgacatctgtgcattgtcagtctttgtcagagtatagagagaataattaacagcatcatatcacatacatttgaagaactgtacaaaataattagctagagagaatacttgctatttatttccattgtttagacaaggaaaacaggttcagacaaattccacaatcatacagctagttaatagtagggtacaaagaaattaaaactttgagtccaggcccttaattaaagactctactctacttggctcccctcagagaggaaaacagttatggactgtggaaagttatttggcaataatcacaaaagggcatattaaaatgtgcaaatgaacataccataagttgaatcctaattccagtagctagatgacctccaaaaagtcacttaaactttctaaacctcagtttcttcatctgtaaatctggtaatatctgtctcttagagatgttgcaagaatgaaattatattatttgtgtaaagtactcaacacagtacttggaatacactgaacactcaataaatggtaacattggtggtggtggtggtggctggtagtgattgtccaagggctgaagggaagaggaactaatgaaatattagtaagatcccttggcagacaaggtctctgctctatttcacatccacaaactggcaggccaccttatccttgccaagactcttattattgttaatcatatatatggttacagcagatccatcactatttctacaaaccgtacaaaacatgtgttgttttgatgatgggttagtggcatctcttgtgggatgaaccagaaggagcatagaccagtaacaaaaatatatatttcagctgggcacaatgttcatgcctgtaatcccagcactttgggaggccaagacaggaggatagcttggacccaggagtttgaggttgcaaagagctatgatagcatgccattacactccaacctgggtgacagaccaagtccctgtttctttccttttcttttcttttctttttttttttgagatggagtctcactctgtcgtccaggctggagtgcagtggcgcgatcttggctcactgcaagctccgcctcctgggttcacgccattctcctgcctcagcctcccgagtagctgggactacaggcacccgccaccacacccggctaattttttgtatttttagtagagacggggtttcaccatgttagccaggatggtctcgatctcctgacctcgtgatccacacgcctcggcctcccaaagtgctgggattacaggcgtgagccaccgcgcccggcccccaagtccctgtttctaaaagtaaataaataactacacaataaattaacttaaaaaaagaaaaatacatgttctggaacgtcctccctcatccactggttctgacactggaaaagatacttaagcactttgagcctcatcttaggtatcattacacctattttaaagaatcactctacagccaggggcggtggctcacacctgtaatcccagcactttgggaggctgaagtgggtggattgcttgagcccaggagtttgagaccagcctcggcaacatagcgaggactcacctctacaaaaataagaaaaattagccagatgtggtggtgcgtgcctatagttccagctacttgggaagctgaggtgggaggatcacctgagcctgaggacagatgcaccttcttatcaaggctgcagtgagccataagaatctgtttttcttttgacaaataacaacaccttcatggtgtgttttatttatttatttttgagacggagttttgctcttgtcacctaggttggagtgcaatggcatgatctcagctcactgcaacctctacctcctaggtttaaaccattctcctgcctcagccttctgagtagctgggattacaggcgcccgccaccacgcctggctaatttttgtgttttttagtagagatggggtttcatgttggctaggctggtctcaaactcctgacctcaggtgatccacctgtctcggcctcccaaagtaccgggatcatgggcatgagccaacacgcccagcctatgtgttatttatttatttatttatttttagacagagtcttcctctgttgcccaggctggagtgcagtggcacgatcttggctcactgtaaactctgcctcccgggttcacaccattctcctgcctcagcctccccagtagctgggactacaggcacccgccaccatgcctggctaattttttgtatttttagtagagatggggtttcactgtgttagccaggatggtctcgatctcctgacttcgtgatccacccacctcggcctcccaaagtgctgggattacaggcatgagccaccgcgcccagccagatttttaagaaggctcttgtaaatgttagcttccccatctttcagtgctcaagatggcattttgtagcaggccattacttgtacttttaaaactacatattttaaactgctttaatggtaatgcaatgtcaatatgtagctcattgaaataatgcaaatgtggctcatatactagactgtaatttccaagatacagatgaagaaactgaggcatcaaccgttttatggctaacccaaagttgatgttagagctggactttgtattactgcacctctcttctgtcaacagatagtttgcctcttgaatattttcctgcagtcctgtctagtgaataatgatactccccattttctttgctgagaagcttgatttttcaggaaggtagggtgaaagtaagcttattattttggttttcttattggctagctgtttacaagatggagacattatatttctaattttttgcctctttcttgttcttttgatggagacaatagtcattgtggctttttgaaaacattgtgtacaactgtctctgatgattatgaaatacaccaatttttctttttttatttttatttttattttattttattttattattattatactttaagttttagggtacatgtgcacaatgtgcaggttagttacatatgtatacatgtgtcgtgctggtgtgctgcacccattaactcgtcatctagcattaggtatatctcctaaagctatcccttcccgctccccccaacagtccccagaatgtgatgttccccttcctgtgtccatgtattctcattgttcaattcccacctatgagtgagaatatgcggtgtttggttttttgttcttgcgatagtttactgagaatgatggtttccaatttcattcatgtccctacaaaggacatgaactcatcattttttatggctgtatagtattccatggtgtacatgtgccacattttcttaatccagtctatcattgttggacatttgggttggttccaagtctttgctattgtgaatagtgccgcaataaacatacgtgtgcatgtgtctttatagcagcatgatttatagtcctttgggtatatacccagtaatgggatggctgggtcaaatggtatttctagttctagatccctgaggaatcaccatgctgacttccacaagggttgaactagtttacagtcccaccaacagtgtaaaagtgttcctatctccacatcctctccagcacctgttgtttcctgactttttaatgattgccattctaactggtgtgagatggtatctcattgtggttttgatttgcatttctctgatggccagtgatggtgagcattttttcatgtgttttttggctgcataaatgtcttcttttgagaagtgtctgttcatgtccttcgcccactttttgatggggttgtttttttcttgtaaatttgttagagttttttgtagattctggatattagccctttgtcacatgagtaggttgcgaaaattttctcccattttgtaggttgcctgttcactctgatggtagtttcttttgcggtgcagaagctctttagtttaattagatcccatttgtcaattttggcttttgttgccattgcttttggtgttttagacatgaagtccttgctcatgcctatgtccttaatggtaatgcataggttttcttctagggtttttgtggttttaggtctaacgtttaagtctttaatccatcttgaattaatttttgtataaggtgtaaggaagggatccagtttcagctttctacatatggctagccagttttcccagcaccatttattaaatagggaatcttttccccattgcttgtttttctcaggtttgtcaaaaatcagatagttgtagatacgtggcattatttctgagggctctgttctgttccattgatctatatctctgttttggtaccagtaccatgctgttttggttactgtagccttgtagtatagtttgaagtcaggtaatgtgatgcctccagctttgttcttttggcttaggattgacttggcgatgcgggctcttttttggttccatatgaactttaaagtagttttttccaattctgtgaagaaagtcattggtagcttgatggggatggcattgaatctataaattaccttgggcagtatggccattttcatgatattgattcttcctacccatgagcatggaatgttcttccatttgtttgtatcctcttttatttcattgagcagtggtttgtagttctccttgaagagatccttcacgtcccttgtaagttggattcctaggtattttattctctttgaagcaattgtgaatgggagttcactcatgatttggctctctgtttgtctgttattggtgtataagaatgcttgtgatttttgtacattgattttgtatcctgaaactttgctgaagttgcttatcagcttaaggagattttgggctgagacaatggggtttttatttttatttatttatttttgagacggagtttctctcttattggttgcccaggctggagtgcaatggtgtgatcttggctcactgcaacctctgccccccgggttcaagtgattctcctgccttggcctcccaagtagctgggattacaggcgtgattacaggtgtgagccaccacacctggcctcattgttttttaatgagaggcaataatatctggagattccctgtccttagaatgttttccatagtccatgtcctgatatatactgtctgcacctgaataggtgtctttagagaattttgaggaggtaatttttttttgagacaggatcttgctctgtcacccaggccagagtgcagtggcatgaccacagctcacagcagcctcaacctcccaggctcaagcgatcctcccatctcagcctcttaagtagccaagaccacaggtgcctgccaaccatacccaaccattatttttcatttttttgtagagatgggggtcttaccatgttgcccaagctgatctcgaactcctgccctcaagcaatccttccaccttggcctcgcaaaatcctaggatcacaggcatgagccattgcaccctgaggatgtagtttttgataaagtatacctatgctcttgttcttcatctgccatgagatctttaaaaatgtatcagcttaataggaaataaaataaagatgatccttacatcaggtcaatgggaggtaggggctggctccttacaaaggaacagcagagaagtcaggttgaaggggcaactggctgaatggaccatctgttttctgtagaattctttacctgaagaaactctcttaaggtcatgaaggagaggaaagaggagaactagcaactagctccacacatgctgaccagagccagttgagcacattgttgggacttttgggggccaataaacaacttcattcataaatctggaactacttgagaaataaggaataaaagtccaatagcaatgaaaatagtagctcagtgtttttggtaaaagctgttttggagagtgtagcttggatgtcacaattggcttcctaatactaattctgtggagtaaactcacctatcctcttacaagcagagcacaacaactggaagagcaggggtgggcccaggaacagagagaatgtgccttctcagtgggcaggcagttggaaggaggaagcccaggaagggctgagccaggcttaatccatttcttcaacctaacccgccagtgagagaagacccttccaccctcagagtgactacttacatggggactggggagggaatggaggctacactggtggtcgtctcatggaaacacaagacaagaggaatggcagtctcccccaacactctccagatttatgttcccttcactcctggctcccctggaaggactagatgaacagtttatcaggactgtactgctgcatttccataaagcttgtgctcccaatatcaaccactgcttcctttggatttcatcctttggaacaggtttggcaatttagataccctcaatgactgaaaagggttagaagagtaagtatactagttaaattaactctgaggcccccaaatgttcaatattgctcattggcaattatatagtgacacaaagtgatagtatcaagatatgctaacaattcaatgtcagcaatataaaaatgccccaaattttagcaatatgaatcccttcctattatcaaattataacagaaaattaaatttcaaaattaaatatctttgaacttatgtattaatagccaaagaaatcaaaaccactgtttattaatctaaaggcaagaccaaaggcaagtaaaaccacaaaacccccaagcttcctcttttgggcacagtctcagtttgagtatagtttcatgcctggtggagttggagttccttcagcagtttcagtctggattgttttccactagaatggatgccattccttcagggcatccaaagttgcataagtttagcaccaagactttcatgttctccaccttttaaagatcttctctttgtctttgatgttcttcagttttgtaatcatatttccatatgtggactctttttaaaaaatcccatctggggattaaatccaagcatttatgtctttcataaattccagaagatttttcaaacattatctcttctagttttggctttcccctgttccttgtactttctccttctgcaatgctaattagataatatttgatcttattctgtcctccatgttttgtaacttcttttttcacattttgctgttttcacatttttgttgttctgtgttgcattctacgtggtttttcagatttaccttcatttatttctagtttttgttttttaacttcggttctcattaacctgcccattcaattttttaaaattttattttgaaatcactttatattctcagtaagttacaaaaatagtacatagaagtctcatgtaccctttgtcaagttttccccaatggaatgatagtacaatttccaaaccaagaaatttacattcatacaatgagttatataattctacgagatttttgtcacaagtgtagttctgtataaccatcaccaaaatcatcattacaaaaatatccctcatggtaccctttagtagtcatagccacccttcctacctttacaccctatctctatgctctggaaactaataatctgttttccatctttataatatttttatttcaagaatgttaaataaatggaatcatacatatgtgacctttgaaatgggctttttttctttcagcataatgctcttaagattaatttgacttgttgcatgtatcagttgttgttttttattgctgaaaaggattccatggtatggatatagttagatatgtgttttagccactctgccagttttctgtcttttaagtggtgtgtttagacaatttacatttacgcaattattgaaggttggggcttgagactgctattttacttttcattttctgtttgttccttctattttttatttctctattttccgtttcctggcttctgtgaacattatttagaatttcattttgatttccctgtagtgcttttgagtatgtctttatagagctttgttagtagttgctctaggtattagattgcacatacataacttatcactggctaatgctgtcaatactttgctagtttgaataaaatgtagaaaccttacctccctttatcttttcctatttataattgttatagttacacaggtccctgagacttattttattctattttctctctgttgttcagataaaatactttctttcctctgtcttccccatttctgctactgggcccatccatttagtgtttgttttgttttgttttgttttgtttttgagacagagtcttgctctgtcacccaggctggactgcagtggcgcgatctcggctcattgcaagctccgcctcccaggttcacaccattctcctgcctcagcctcctgagtagctggcactaaaggtgcccaccaccatgcctggctaattttttgtattttttagtagagacggggttttaccgtgttagccaagatggtctccatctcctgacctcgtgatctgcccgccttggcctcccaaagtgctgggattataggcgtaagctgtcatgccccgccagttttttttttaattttaaaattttgtattcactgccaagagccccattgaaggttttttttttttgagatgagtctcactctgtcacccaggctggagtgcagtggcatgatctcggctcactgcaaactccacctcctgggttcacgccattctcctacctcagcttccagagtagctgggactacaggtgcccaccaccatgccctgctaattttttatattttttagtagagacggggtttcatcatgttagccaggatggtctcaatctcctgaccttgtgatccacccacctcggcctcccaaagtgctgggattacaggtgtgagccaccgcgcctggcctcccattgagtttttatttcagttattgtagttttcatttttaaagtttctatttcattcttccttttatcttctatttctttgctgagactttccgtatttttatttgtttcaaatgtatttgtaattgcttgttgaagcatttgtatgatgtctactttaaaactgcttgccagaaaatttgtaacattttgctacctcaatgtcagtgtcttttttacactcaggttaaaattttcctggctttgctatgatggtagattttctgttgaatcctggacattctgagttatgaggctgtcaatcttattaaattttctgtttgagcaggtctcctctgacactgtgctggtggaaggggtgctgcttgttattttaagatgagaatggaagtccaagtttcccacttggcctctgttgacaccctgagatagggggtgcttcattagtgctgagcaggtgcgggagatcagggtctccattatgacttcactgatagcatcctgactagaagaagcaggggcaccttctattgagtttttaatttcaactaatctacttttcatttatgatgacttgttctttacttatactttccagtccttcctttattcccttctattaaacatactttgtttatattatgtatctggtattctcaacatctgcaatttttgcatgtctgattctgtttattatttttgctgcttctctcaaggtggtttaccttctcacattttgtgtatttcatgattatttttatttttatttttgagacagagtcttgctctgtcactgaggctagagtgcagtggcatgatctcagctcatcgaaacctctgcctcccggattcaagtgatccttgtgcctcagcatcccaagtagccgggattacaggcccttgccaccatgcctggcaaatttttgtattttcagtagagatggggttttatcatgttggccagactgatctcaaactcctgacctcaagtgatcctccctcttcagcctcccagaatgctgggattcaggcatgagccaccttgcccagccatttcatgatttttgattgtgaattaatgttcaacaaagctttctctgagggaattctttgaagaatagattgttggtacatttttccaagaagatttgcatttgcttctgtcaggtgcctgagggcattaccaacttgtaaatacttaaaaaattgtttgcctgagttattattattacatacgtagcatgactttagactgcattaccacatgaagaccacattatagtttcaacttcccatgggaggtagttttccctatgtccacaaccaaggctaacagattcaagtttccttgttgtcgcctttggggcagcgggtttttgtttgtttatttgattgttcatttcattttggttcaacctttgatcaaggagtcaaactttgtaaggggatctctggtccaactctccatctcgcatcgatctcagttttgtctcttataacatccatgatcatgtggctgtcaaaactcaaggctagagcatttgtctttattggacagatgctcttaagtcagattctgacttcaacttacctttctggattttgacttttacttcatttttggcctttgagtacattttttattttctgccacactttctgaagatttcaaaaagtctgaaaccttatcccagagctagaacagttataggaaaatttagattaccagaatttagcacttactataaaccaggccatctttattgctttttatggccacagcagagactcagaaaggaaagaagtcttcttggtttttgcctctcaaagataccagccagtatctgccagacctggccagggccaagacctgggtacttaggtccactggcagagctttcacaacaggagatcgattatggcaccaagttttcctatctggtaaacacatggtatcctttcccagcgagtgacattgaaaacattcttgcttgcttgcagagtttagatatgtgcagcagtgacatcctgggctgcagattttatttgtggtacatttccagtcagcatgtgaaagagatgagagagggagaaggggagagggggagagagagagagagagagagaaagggagaaaggaagggaggaaggaaaggagggagggagagaaggaaggaaggaaggaatgaaagaaagaaggaaggaaggaagggaagaagagaggaaggcagagaggaagggagggaggaaggaaggaaggaaggaaagaaggaaggaaggaagggaagaagagaggaaggcagagaggaagggagggaggaaggaaggaagggaaggaaggtccttaattccatttccacttgaagcccctgctttgggctctgtctacacttgggcaccatctatactcactgctgtgactgcctgtagctctagcactgcttagacctgtgaatcctgcttctaatcctgctgctccctcatgctcacattcatctgaagttcagccttagcaaactcctgagctgaagctgttttgaaggcttcaaatttgtcttgttgtttctgctttatgctcctccaaacattatctttccacagcttttgaaggttgcaagcatatcattcaactgaatgtctcattctgaagtttggaacgtgcttctcgtgttttatttccttctgtgttctccttctcctctcaggaaggctcagttaggttgttaatggtttaatcaagttcgtaagctggtctttttccttctctacctcctgtaggctggcattttcattggactttcttccttttactttgtcatggttttctgggtcagatatttattattcaaacagatttttttctactctcagtgagagaaatgaagtcagggttttatgggtctgccaaaggcaacagttgtccaaacaaatctgatcaaccctcacctctctgagttagatagtctcacttgaaaggcattttccaattaaaccaaaaatcgacccaggcctggactcaaactattattgtcctgcctagatcccattcagtaagtctcggccttcctgtgcctgtcaggagaatcctacctttgtctgttttttaatctgttcactcaggacatgggaaaaccctgccccacaataactattttgttttgaagctcatctaataataccctaaatattctatgccaatatccattgtcttctcctctcttatagttccaaactttatagaccctttgtacggcttcccaatctttcacatggtggttctcccttccagttactctataacaaaccatcccaaatgtactggcataaaatagcaattgttttatgaacccaggggttcagtgggctagaatttggaaagcacacagtgggaacaggctgtgtgcttccacgatgtctgaggcctcagctgggaagactcaaaggctaggggtgacttgatggcttgaggctgcagtcacttgaaggctcattcacttataggtctggcatccgggctggaaggtctcaatgtataggactgctggctggaccacctacacgtgactgctccttgcgtcttggcttccttgcactagggtggtctcaggacattgggtgtggtggctcagcgtttcaagcatgagtgctccatcaaacaaggtagaagctccattgccttttctgattcaaccttcgagtctgtggattgcaagcaagtgacaagatggaaggagtgtcaagcacatagagtcggcctttgaatggaaggcgtatcaaggtcaccctgtagaagaacatgtggactaggagaacgtggagtagagatatgattatggccatctttagaaaaacaatctgcccggtttgccccttggctatgattctcatcacttccacatgcaaaagactctcactcctccctaagatccctaaaatctcagtccatgcggcatgagctccaagtccaggatcttgtcaccttgaatgggtccatggttaaagaggctcttctgggacaattcctcagatacagctccttgagttatcttcctcttgatttggagatctgtgaagtaaagaaagaaatgggccaggtgtggtggctcacacctgtaatcccagcactttggctggccgaggtgggtggatcatgaagtcaggagttcaagaccagcctggccaagatggtgaaaccccctctctactaaaaatacaaaaatcagctgggcgcagtggcaggtgcctgtaatcccagctacttgggaggctgaggcaggagaatcacttgaacctgggggggtggaggttgcagcgatccaagataatggccactgcactgcagcctgggcgacagagtgagacttggtctcaaagaaaaaaaaaggaaaaaaaagaaacccatgacctgccctccacacacccaacacataatgataggacagtcatggaataactgttgtattccccaattgcatttattttggatggcattcacagctttgagagggtagcttttaatagctgcctggatctgtatcccactgatggtagaggtgcattccaaatcccaggcaactatctgaaatattgccttcctgcttctgaaagatttatttggttgctagtccccagtctcatctaattcatcccccttttaagagtatttagatatgtgggcatttttcttttttgtatctttctagccccaagaaagctctccaatcctctaacttagtctgcctgttgtttctgagagcaaattactctctctcattttctttgcacagtaatactgcagcatgtaataaaaattgctcttaaaaactcatgctcactaaggtctgttaaaacagccccatagctacgacagcagcattcttctgtagccaataagctgctgcgacctgccaaggttgaaatactgcctgactgcctgactcactcttactgaagcattaaaacctggcagctgcttaccacaggctcaatctccatgggttactttggcctgtagatactcatctttatctttctcaaggttcctgccaacttaccaatatgttagggcttcagggacacataaataatacccatttcttactcttctaggtttggaagcaattgataacataagatatggatgacagttgaacataaaatattaacctgattactgatattgaaggatatggcttagacatgtagtggcaaagagcttcctaatcgtccaccccagaattaaacttcctcacccagtcccaggcctccctccacagggcaaaacctgccccagttagcttctctcatgtagcaggattgcaggtccctggggaaggcaaatttgaaaaagaagtcccagaagaggatagctgagcatgctgcactctttctcccaagcttactggacagagaagtgatcctgcctctgggaaaagtcaggggagtggtagaaagatgtctagagtgatgggcctttggaggcgccctcatggaaatgtgaagcttgggggaatgcagtgttcccctaacacaaatcaaaaactgcactgggcagctccattgtgaaccatgtaggccatctccagagtgacttatcctgatgggaagaagcatattttgttccatccctcaaccccttcccccactgttagcagatttggatataagtgccccactcaaagatgcatgataatcagcaaagatccaacatggtaactacatagagatactacaaagaaaaagttaaaaaaggaaccagcaaaaaaggcagaagaaaaaatacattgaagaaaaataataattaccccaggtgacagaagaaattttcagataaaacaatgaacatgaactgtcagaactccggtggctagggaaaagataacaaacattacagaaatgaaactcatataggaagcagtgaggcataaaataagcaccactgaaaaccatcagtgagctagaagacagggtggagaaattgattaaggaattattctagttttttgagactaagtcttgctctgtcacccaggctggagttcagtgtcgcgagctcagttcgctgcaacctccgcctccaggttcaagcgattcttgtgctcagcctcccgagtagctgggattaaaggcacacaccagcacgcctgactaatttttgtatttttggtagagatggggttttgccatgttggcaggctggtcttgaactccacacctcaagtgatccgcccgccttggcatcccaaaatgttgggattacaggcgtgagccactgtgcctggcctcatcaaggaatttaaagcaactggaagacagataatagatatggaaaacaaagagcagacatgcagcataatatacacactaggtgtttcctgatgtagaaagcagacaagtgccccatgaaagaaattcgaagatataatagaagattttttttctgaactaaatgatgataaaaatttgcataccaaaagggaaaattgatatggaataattcatacatacattctggagaagttgctaaatatcaaaaataaagaaagaatcccacaggcatctaggcagaaaaagcctgaggacaaatatcaggctgtactcagatttttccacagcgacatgcaatgtcaagatacaatgatgagatgtctatacagttctcagaaataaaataaaacacgaacttatgaatttcatacccatctaatctaagttttgctcatttatgaatggcaacataatgacattaacaaatatatatatgtagataacccaagagctcttctttttttaaaaaaagactagatgaaatccagtcaaccaaaatgtgaatcaagatgagctcagaaattggaaagccatggtatgaaaagactgttggtgagcatcaaatcaatttgaatatagaactgtggctaagccactttcagaattacaggtacacaatagaatgtaagtgttttggaaactgtcaatgaaatataaggaaaaccaggagggtgcagcattcaaaagtcaaattaggagcgtaattgaagaaggaaagcaaagattctctaccactgcctctcagctctttctgcttcctctcctattgcagtttgaagggtattggaaagaagcaggggaagacaggattaccaggggctccaagtcacatcctcatgtttaatgaccagacaagaaatgaaacctctctcccaggttcatttgaaaaattccgaaagaagaactctggcccatcttgggtcaagtgcccatctcttgaaccaagcattgtgatcagggcatgagggactgtgattggtgtacgtgcctacctctgtatccaaggggacaaagggaacaggatatcttaccacaggaaagcagggaggggttcagggaggggtccaggcaatctgaagcttaagctgacccatttaaatactggtggccacaaatacagtgcttgctttctagaactcatgttggttgtgggtccatggcttcataattacagcaataatgccttttatttttctatatatttgtaccttcattatcttatttgatattcaaatcaactagatacactaagtagtatgaggctattctttgcattttacagattaggaaactaaggctcagaaattctgtaactggtccaagttgtacaataacttcatgtcagaggtcaagaatcttagttctcttccagacttcatttcaatattcaaaacagcctctcattttgtgatagtaatagtgtctcccagtccagataccttgattctctctacttttctgccacatgactagcaggtaggtcatgatggcaaaagaaggatgtcaatgataaaactagggggtttgggtttagatttacaaaagattttattttaaatatttttatatttgtaacatagtattaatcaatgttttatattcatataatattttattagtcaatagctaatttgttttaagataattagctaagtagattatttggattaaggggacatacatgattttataaaaagtaggatactctagataactatgaaggagattccacaactggaagtcaacaatagttttgggtatgacaacagccagaaatcaatggaaggagccaatgtttgttgattatccactaaaggaactatgcaagaccctttacataagctttttcatttgattctcataactactgtctgagagagtgatacctctatatctagcttagaaatgaaaacatagaggctcagaagttgagtgacttgctcacttgcgaagagctgacagaagcaagattggattttagatgtgcatggctccaaagcctatgttgtcccactacatattcaaccagtgcacttggcaaataaagttaaggacatttattaatatctttggttttgaccctctctccccttcacacaaaattatttccacaatttcttgggcaaaaggcttttttcatgttcatatagtctaaaaattaaggcgaaatctagcagtgaagaaggttgccatctgtgttggattgtttctgatggcaccaaagaacacataggaaaccttgttgtaacttacaaaataacacaatttaacttacagttaaaacaattaggtctagaatcaacatcaaggggtttttctctatttcttgcaacttgtagttctttttgcttccatttgaattggaaatagtctaaaagctgatttttccccctcactgttcacccatcaggaggattcagaccccaaatgatatcagtaaatgatgatgaactctgaatgaaaagtgtttcttaaactgccagttctgcctttaaccctttcccctgttcttcctagtagccataacccctttcattttcgtgttttcacttacccttgtccccttgacaaaccccaagcacagggtttctctatgagtgcgtctctggggttgtccttgtgacctggagatggtaagaaacacagagagcagtgctatagtgtcaataatgacaagatgaccccagataccacagttggcctctttgctctcaaatgaatctaatagcccaaggaagtatttctcctttatcagcagcccattcaaagtggtgttagccattacccagcttttatcattccatatctcatggaaaaataatagcgttcacctcaagtcaagaatctcttaaatttaatgcattctgaaatacttcgagaaaaaaaggcatcatcctggtgttatataaaaattgatgtcatctttttacatccatgcgatcaacagatggtaactttggttcctatattttgtatatgtggaactattgtctttcaaactatgcttttcttcttttttttttttgagatggagtctcacttttgttacccaggctggagtgcaatgacatgatctcagctcactgcaacctccgcctcccaggttcaagcaattttcttgcctcagcctcctgagtagctgggattacaggcacccaccaccatgcccggctaatttttttggtatttttttgtgtgtgtgagacggagttttgctctgttgcccaggctagagtgcagtggcacgatctcggctcactgccagctccgcctcctgggttcacgccattctcctgcctcagcctcccgagtagctggcactacaggtgcccaccaccacgcctggctaaatttttgtatttttagtacagacgaggtttcaccgtgttagccagaatggtctcgatctcctgacctcatgatccacccgcctcggccttccaatgtgctgggattacagatgtgagccaccacacccggcctttatttggcagttttagtagagatggcatttcaccaagttggccaggctggtcttgaactcctgacctcaggtgatccgcccacctcggccccacaaagtgctgggattacaggcgttgagtcactgcgcctggcctatacttctcttctaattgcagaaacttaaacatgttttatcttatgtcttcataaacttcactgctccccagatggatctgtaaacaaattcttaaatgtgtattttctctaaaagtaatccttagcgaatcctttggtgaaggaaaatattctgctgtctctctaaacttggatttaaaactccaggtgatggttattttttgttaatattcactgagcctttcttatgaacctggcactatcccaagcaatttatataccttttcccacttaagtctcatgacaacctcatgaagtagatactattattatccctatttcacaggtgaggaaagagaaggtttagtaaggaacgtgtcccccaggtcacaagagcagttgcaagtgagaagcacagcccagatttagttccaaatcggtccgactccaaagctcaaattattaactgcagcgctactctgccttttaaattttctcaaagtgagtgcaaaattaaaattatttagagtctggtattttctcagtaagtaggtggtatcacgtgatgctatgctcgtgctcctaacacttcctgggccagggctattaggagacatactctttcgttgcaagaacaagtggcattttgaagaaaccatggaggtggcgtttgggtgaggacactgcaggctgatgggcacagctttacattcatattagagctgcttcgttctaggtgggctgcaaatcacaactcccttataaatatagcccactcaaattagtattgaccactatctcatttttctttcttctttttttttttttagacggagttttgctcttgttgcccaggctggagtacaatggcaggatctcggctcactgcaacctctgcctcccaggtgcaagcgattctcctgcctcagcctcccgagtagctgggattacaggcgtgcgccaccacgcccggttaattttgtatttttagtagagacagggtttctccatgttggtcaggctgatctcaaactcctggcctaaggtgatgcgcccacctcagcctcccaaagtgctgggattacaggcgtgagccacctcgcctggcctcactacctcatttttaatcttttgcacatctcatgcctccatcactaaaaaaaaaaaaaaaaaaaaaaaaaaagaatggttactcaagtcaagaatctcttaagtttaatggattctaaaaaaacttggaggcccaatatgcatacttttggggtacaaaaattacctttgtacaaaaggttacagacgtacacattatataaattcaccaatgaggagctgacttcatccacaataagaatttggtgctttggaaagatgtccattctcttctccaaaggcaatgtcatctcttgtcaagtagaactaaaaacaaaaacagatgcttttacagtttctaaaaaaaaactaattgttaatttctggtcaaataccagtataaaaataatttttagtgtcataatctctgaatttgtgaattgtagcatatcaagttttgcaccaatactaacagaacttttaaaaaccatttcatttgtttagaacaaaagaagcattaaaggccaggagcagtggctcacgccccatctccactaaaaatacaaaaattagctgggcgtggtggcaggtgcctataatcccagctacttaggaggctgagtctggagaactgcttgaacctgggaggtggagtgtgcaatgagctgagatcacgctattgcactccagcctgggtgacaagagtgagactccgtctcaaaaaaaaaaaaaaaaagatgattgagttagtataatctggaagcaaagggtgtaagctctagagtttgatgcctagttcagagctcaaatctatcaatcatttacagcttgtgtggtcttgggtaagttacttaaaatctcaggttctatcctataaaatagtacttattttatggggctgtgatgaggaagaaatgagatgatgcttataaaactctcagcacagggttgggcagagtaagagatcaataaacaaaagctatttaaacctcacaatttgctgttaagtataaaatgctggccaggtgtggtggctcacgcctataataccagcactttaggaggtcaaggcgggcagatcatttgaggccaggagttcgagaccagcttggccaacgtggtgaaaccctatctctactaaaagtacaaaaattagcagggtgtggtggtgcacacttgtagtcccagctactcgggaggctgaggcaggagaatcagttgaacccagagggcagaggttgtggtgagctgagattgggccactgcatttcagcctgggtaacagagtagactctgtcttaaaaaaaataaaaataaaatgcagcctgtatttttatcaattaactttatatatactgtgtgtgtgtgtgtagttttagtacaaacatttttctacagtgctttttattgacaccatctggcaacacttaccctttcttaaagtcaggaatgggtcccccaggcaggctgcctctgccacttccagctcctccagcttcctcagccactggctttatggttccatccactgcactcctggggcagtgacacaattcttatctgcctttggttaggaaaataattgggcaatttgctccagtgatacatttctgctgatttcaggttttctttcagtggtgaatgacaaagacatgcaattagcaaggaatgctttagtttgtcaagtttagttccaccaggcttccctcacttattttgactgttttgcttgctgtcatattaaatgtttcagaagctttacagtttgaagacagtctaagccagaaacagcaatggctacagtactctgataaatctcttttgtctattagagtgtctcatctgttgttcaatagtaattccatcacacatgtgctgtagtattaatactattgacaacaataatagaacatttattgagtgcttactgtgtaccaggcactattttaagcattttacacatattaactcatttaatcttccctatactattattattcccattttacactagtgaaaaataccgtagtctatatcttcttacctctacattattgattatttttatgttgatttttagaaaatacttccaatgatcaattttctctaattctcaatataaggatattttcctggaggtgcaaatatttaataagctctgagtttggaggcttatctggtgtaaggtgggacttggatcaaggatgctttagcatggctgttatggacctcagaaatactgaaagacaaggttatgttttacaaggctaaggacaatgaatagggctagaggttaggatgttctgtggttggggggaggtggggttgagacagggccttgctatgtcacccaggctggagtgcagtggcaccaccacgactcactgcagtctcgacttcttgggttcaagccttcctcccactttagcctcctgaatagctgggaccataggcacacacgcctggctaattttttttatttttattttttgtagagatggggtttccctatattgcccaggctgatcttgaactcctgggttcaagtgatcctcccacctcggtcttccaaaatgttgaaattacaggtgtaagccaccacgcctgacctgtgttttttttttgtttgtttgttttttgttgtttttggaataagacatttgtattcatttctaagccaaaactacatgtgtattcttcaggaatggttaaagttcaggggctagggatggggaaggagaatagagatgaccagactgcaccttcaaatcctctatgggatgagataatgagacaacaaaagaaaccaacaaagaaacctaggagccaggcctctcaaacctccacagcaggaagagaccagcagcagacacccttcttcaagggtcccttcctcagcctcttccagagtcctggagacagttaccttctggataacttttatttggaacacagcctgttgtcaatagaagagtcttggccaggtgcagtggctcacgcctgtaatcccagcactttgggaggctgaggtgggcagatcacttgaggtcaggagttcgagaccagcctggccaacatggtgaaaccctgtctctactagaaatacaaaaaataaaaaattagccgggcatggtgcctgtaatcccagctactctggaggctgaggcaggagaatcgcttgaatccgagaggcggaggttgcagtgagccgagatggcgccattgcactccagcctgggcaacaacaacgaaactctgtctcaaaaaaaaaaaagagtctttatttggaataaaccttcatgtaggtcagtcgattgtactgcgtatcaggtcatgctgtcagggacacgtgggggtgagtagaatattctcttcaatgaagaatgagacaagtacacagaggaggtcagccctggtttctttggcggccaagggacttgtgtctaccacaaagtagaccagccttcgagtgctaggcaggagtgcatgcttacagaagtggggtctgctctcctgagggctgcctgcgattcacccagggaaggaagccttgacagcgaagatcctgaaggggaacggggacgatcttgtgccatgagtgggtaataggaacgatcctgcaccgtttataatggctgtgaggaacaagagaggattaaatagctttatcctggggttagtggaatgagggtggagggctgagtggcggatgaggtcacatttcacgaaatgaaaagcaggaagcaccctcaagggcaagttgccccaagcctgtgctccggggccttgcacctgattaatatggaatctgcaccgcaaggtgcctatgggcacgtacgcgaaggtgtcccagtccaccgcagcgaacacaccccacagcagccaaggcccttatgactgagtcaacaggacactggcgaccctgagggccaggagaagcggggtgtctgggtgaatcccacctctgcatggggagggagtctgtgaagattgacgtccagacacgccccctctcctccgcagcgcccctctctgcacagtcctgtcccacaaagagagacatcggctcgtggccacctgccaagtcaggcccaggccgcgagggaggggaaaagggccgcgggaggcggtgcacgggctgttcagatactgcccccgccactcctttagactctggacgtgcggggactggtggcgctcggcctcgcgttataaaaagcggtggggcagggccggcgagacaatctgggaggcgggtaccgggcctcacggatccgcgccgcgccccccacctgtggctgcgcgcggggtgggctgcgctcccctgggcggcgccgggcgcccggggctggtggcgagatgggccgctactctggcaagacgtgccggctgctcttcatgctggtgctcaccgtcgccttcttcgtggcggagctggtctccggctacctgggcaactccatcgcgctgctctccgactccttcaacatgctctccgacctgatctcgctgtgcgtgggcctgagcgccggctacatcgcccggcgccccacccggggcttcagcgccacctacggctacgcccgcgccgaggtggtgggcgcgctgagcaacgcggtcttcctcaccgcgctctgcttcaccatcttcgtggaggccgtgctgcgcctggcccggcccgagcgcatcgatgaccccgagctggtgctcatcgtcggcgtcctggggctgttggtcaacgtggtggggctgctcatcttccaggactgcgccgcctggttcgcgtgctgcctccggggacgcagtcgccgcctgcagcagcggcagcagctggcggagggctgtgtccccggcgctttcggggggcctcagggcgcggaggacccgcggcgcgcggcggacccgacagccccaggctcggactcggccgtaaccctccgggggacctcggtggaaaggaagcgggagaagggggcgaccgtgttcgcaaacgtagcaggtgcctttcggttgcatcctttggaccgcttggcccttccttcctcctcccacccggtccctttcttctcaccccacgccctctttttcttctgcatgctttttttctgtttttttttttttgttgttgttgttttttttttttttttttttttttttttttaataaatccattccctttacaatcccgctttacttctcttctgccaatttaacatattccccatcccttcttttttctcctggatcctcgggtagccctggcctcttttcccttaccctattctctgtatatgagtattgattttcttggaaatcggtcactattattgggcaacaggcaggactctccaacccctcctccctctcattacttgctgtctgaattttgttgttctccccccctctttgcccatccgtttgtcttcttgggtgttacgggtttaggggctgcaggtgggctcccattcaccctctttttgttttaacttgaaaggatgtgtgaatgaagtccaaaggtggatcacaaggctatttcaaggccaaaatgtactgttctgagctgtgggtgtgcagaagggtctcccttaagctagtagaaatttaaaataacaaaactttattttgagtccattggtttttttttgtttgtttgtagaacttatacacaacacaaggtttcttctttgaatgcaggtgattccttcaacacccagaatgagccagaagacatgatgaaaaaagagaaaaagtctgaagctctgaatatcagaggtaggattgactttgggcctatttgaaatccctttctatgacacacatggactgtgttgtttatttctgtttgacttttaataaggcaaaggtgtgtttgaaagtaggccagttacatgcatagactatgacccaactctctttcgtaatcactgcattgatcctgagggagaaactggttgctaatgatttatcttagctccactgagacccatgctaatactgcctgctccagagctgcacatattaatattgtgttactactttacttggttttactggtccgtggatattgctaataaatcatgcaacccattttaattgaattgattttgataaaggtaggaaaagagtaggtgagctgctatccaaggttatgccctatctcgcattgctgagtgaccctattgcatcagctatttctgccagaaatctgcttttgtgaagggaccgttggctcactaaaacctccactcccaggaccaaagggagtgttctggtgaggcccaaggcaagcacctagctagcctctcaccatgtggtcaaggtcggaagcactggactaaggtcagcccagggctttttgagatgtgtttctcgctggacaccattgtagccaacatctctcccttccaacttcttgggcatagactttgcttcagagtgatcccagaaggggttaatccccaattttgactttgagaattccaacaaggattaagcaaccctctactttcctgtggtttggggaaagcctgtaagtggggctttgatggaaataatacaatgaaaaattaataattcaggagataccttcactttgagtgtctcacatctgttttacaaaggaattctcagagtgaacctatagggaaaatccagaagataacaacaataacatatgatctcctaaaaatttctaaattaatcaaacaaatttaaaggcaacaggggaatttgctctctgaaagagcttagtagtgagcttttaaaagagaatctgtaatgaaaaaaaaatcatcctttatctctcttttttaaggtccagtttaaaaatatatacattggggtgggcgcggtggctcacgcctgtaatcccagcactttgggaggctgaggtgggcagatcacctgaggtcgggagtttgagaccagcctggccaacatggtgaaaccccaccccatctctagtaaaaatacaaaaactagccaggcatggtggtgggtgcctgtaatcccagctactcgggaggctgaggcaggagaattgcttgaaccccagaggtggaggttgcagtgagccgagattgtaccactgcactccagcctgggagactgagctagattctgtctcaaaaaaaaaaaaaaaaaaaaaatatatatatatatatatatgtacacacacacacataaattttaaggtggagttcaccatcagaggctttaacttttcaaagcctgttctgttaagtatcctcattttttttcttctttgagatggagtcctgctctgtctcccaggctggagtgcagtggcgccatctctgctcactgcaacctctgcctaccaggttcaagtgatccttgtgcctcagcctcccaagtagctgggattacaggtgcgcaccaccacgcctggctgatttttgtatttttagcagaaacggggtttcaccatgttggccaggctggtctcgaactcctgacctcaggcaatctgcccgcctcggctgcccaaagtgctggaattacaggtgtgagccactgcacccggccaactatcctcattcttatgttacaaagttgagaaagagaataggtaggtggattgatgcaaagaagaagaagagtaggccctcatagttatagtgatcttgtttgggaaacttgtatgaacttgccaaattttagtcctaagctattgaagtttcttggtagaaaaatgtcagtagtagaatgccttgctatacctggctgggcctttggtttacagggactgacaccagtgcacctttagcttctgatagaggtgaatagtgcggtggctgaaaggttgggatttggcttcaaactgcctgagtgtgaatcatggctctgccacttaagaaccatgtgactttgggcaagttattgaacctctctaagcctccaatcccctcatctttaaaatgaggataataacagtacccaccttatgggattgctttgaaataaatgaaacatataaagtgtttaggcttatagtaggaaaactagctaacatttttattgagtatgtactttgtccctggtaccattcatgaatgagtgaactggtagtcacattaatcttactgagtggatacaattatcgtttaattagtgggtggaattgctgggctcaatccatagtgcttccgtgttagctgagatcattcctgctgcttttgatgagtacctgtactgtggctaataggagcctttacatattcccggctaagtgtgaggctggcctcccctttggtgctgtgttcttatcttggagccacagttcagggaaggatcacagaatgttagaactagaaggaccttagggaaattggacttcaacctttcacttcacagatgaggaagcagggtgtggagagtttgacgacttccccaagtcaccccagctcatagcagagacaaggctggaatcctgggctcctacatcacatttctggccctttccatgatcacacattgcctctagactccagacagggcttgcttctctagtacacagtccactgaatggttatatttctaacatttaagcaactgctttagaaagcaggactgtgtcccactctccagatctgcagaggtaacagcttacggggatctctgtgaacaaaaacaatttcttcactttctttactgtttctcttattccaatgggaatttaaaaaatgagtttttgtttgtttgtttgttttgttttttgagatgaagtctcactctgtagcccaggctggagtgcagtgtcgtggtattgactcaccacaaactgcctcccaggctcaagcgattctcctgcctcagcctacagagtagctgggattacaggcgcgcgccactgcacccggctaattttttttgtatttttagtacagacggggttttgccatgttggccaggctggtcttgaactcccaacctcaggtaatccgctggcctcggcctcccaaagtgctaggattataggcgtgagccaccgtgcctggcaaacaaatgagttctaaggaacacactctgtcttctactgtaaagtatggtaaaaacacaatcctcttaaaatgctcatcaatgtgctttgtagtggtcaattttatttaataggatcaaacatgatgtattaaaaatgttgtaacaatatgtcagaaagacaattagctttttaaagtttggtgtaaatagatgaatagccatcttgacatcccttgaaaagaaatcccctttgatgagatgtttctttgtaattccaataagaaagatctcagtttttcattaccatttgcccagtgcaaatgcactatttccagtcattcaacaaattcaacagcactgatggctttcctaagtgctgggacacatcagatttcaacttgtgtcaaattgccaatttatgttatatgcccgttttttgggggtttcgttttaatctaaaggcagcaagtgagggccaagtacagaggtttgctgtctttgcaaagctaccttgagagcattgtaacttagcaggtgattgagttgtctactaagtggtgctctttatgtctcagataatgctgccagatttatctttctgaatcatagatgtgatcacatcggagtctgctcaaagccttggccgcatacagggtatggtctaaacactgctgacattcagagcttgctgttccggtgccaatactcctttctagacatttctgcccttctcttcaccccttcatggcctcacctcccccatcagctcttcactgtctcccggcatacccatcaacatttaatgtacatctgtagtgaggtgagaagcacttacaccctgtgatcaggcagatctggtttgagttctgcctctcccttttcctagctaggtgaccttgggcaaggaacttcatctctttaatgttcagtcccgtcatctatataatggagataataggaccaacatcactgtgttgtgcggatcacatgggtggttagaatagcacagaggacccactcaacaaatggtgcctgttatcattatcatcacctcttggtcattctcagagggttttcagacatttttttacatactctacagaactagcctctgagggaggtgaggcagatattattactaccccatttcacagatgagaatcttgctcctcaaagaggttgactctcataaggtctttggctcatagcaacagcgtcagggtctgtgagtccaaatttagcacgtcagcctccagcgttgccccacgagcacgtcctccatcttcagtttcccacgagtctcccgtgaggtgtttctgtctgaaatgccttctcctgtggttgcctgttgaagtctgtctcctctccagagtcctgcccaaattacctacctctcaacaagactttcctgagatgtctcatcacaggagactcttttcctccctgaggagattatcgatgtatttatctcagaatcttccattttgagaggctgaggcaagaggattacttgaggccaggagtttgagaccagcccgggtaacatagcaaacccctgtctctgcaaaaaaaaaaaaaaaaaaaaaaaaaaaaaaaaaaaaaaaaaaaaaaaaaaaaaaacacacacacacacacacaaacaagaaggtaaaaaaattcttttaaaaagtaaaaaaattaaccagtgcagtggcacacatctgtagtcctagatacttgggaggctgagatggaaggatcatttgagcccaagagttcgaagttggagtgagctatgattgtgccactgtactccagcctgggtgacagagggagaccccattttttctctctctctgtctctctctctcggtctctctctctctctctctctctgtctctctctctctttcacacacacacacacacacacacacacacacactcagagacaccccacagaattttgccagtgcactgtagttaatggtcatgaccaggccttcttcatctttgcatgggcagccagaagatacattgcattattaaatgtcaggaattgagtgggatactgctttaaacagtttttcaaactgaaggctgcgacaatttgggccctagaattagtttagtagaaaattaattataattgaatgaaatagaatagataatattaagaagtcatatataaggatgagttttgctttcccatgaattatttgttgcaatttgtatctctgtgctaggatgcaaaacataattcttactgtggattatgggaaaaacaagttcaaaagttactattttatgtaattcttagggggtaatagtgggatttctcagaaggaaaagctgaaattgaattttagaacttacatgaggcaggatgcacagtagatctctggtcagaccacccagattgatatccccagttaacactttttagttgtgtgattttggacaagttacttatgtattctgtgcctcagtttcctcatttgtaaaatgaagagagtaccagccataaataatcaaaagggtcagattccagttttccagagtttattcaagtgaaaagttggcaatggccattccgggactcatcactccagagaaatggggatagggttccaaagttaaaagctaaattcttgcttatatataagacaaagaaatttagcagggttacaacattttgtatacaagcctggtttagtagttaaaaaaattagttacaatttgttttcttttccacgcggcttgttttctttatagctggttttcatttcctttccaacttaaaagagtgtatttaacattccatattaagggactgtgatagccatgatgtcttgtatgaaaaaggtaagagggagaatgaaaatcaacaggaagagagaagggggtcttccctggggccctttgccatttacaacattttacagagcaatgcaggtaaggaaaaagactgaattcagacatacaacagcttacagctgcctgtcacgtagctcaggccctgtaattcacattccttgaaggctcaaaatacttttgagttccaacagcttagattttgcattacttatttttacaagggtaaccaccttacagtccttaaaaggacttaatgggtaagtataatacgcttaaatcaatacctggagcatatgtgttagttagcataataataataatagttattattattaaagacaagagttactgtatgtcataggagttatgacaatcaaccagaagctactgttttattgaatgcctacattgctattatataaacaaaggcaatttggagtatggccctgatcctcatgttacttacggaggaaatggacctaacatgtatgagacaatcagagaataacagactgtctcacgcagtaaacatgacatcacatgtgtataggagatattaggctttcatatttttatggtagcattttgtactgtcctgaagcaagttaaagcttcgattcttagctccttgtagaggaacaaagtatttttgagtttcccttcagtggttcaggacagggactggggagttaaaagctcctttgggggtggggtgttgggagaaaggagcacagcattagaaaatgagaatgttaatgtatatattgaatcaagatcttattatcataagtaaacactcatccaaaaggaaatatgggaattctttttattcctgtatttttttggggaaaatttgaggcaactgcctcaaattacatttagtgttcacatgccattttacctatgatgttatttagaattgtggagttgttgccaagaggaggaattagctcaattaaagcaccttccaaatgagactgtttagtcttagccatgagtaagttgttagtaatttggattattattaattctactgcataagtctgtggaatacatggagagacaaagcagacctttcttaatatatatgctttcttctagagcagtgctttggaaacttgtatgtgcattccaatcatctgggcattttttttttttttttttgagacagagtttcactcttgttgcccaggctggagtacaatggcactatctcggctcactgcaacctctgcctcctgggttcaagcgattctcctgcctcagccttctgagtagctgggattacagatgcccccacaatgtccagctaattttttgtatttttagtagagatagggtttcaccatattggccaggctggtcttgaactcctgacttcagatgatctacctgccttggcctcccaaagtgctgggattacaggagtgagccaccacgcccagactcacctgggcatctttttaaaacgcaggttcagattctacagatctgaggtgggtcctgagatgcatcatttctaacaacctcctaggtgatgctgatgctgctggtttgcaaactatactttgaattgcaagattcagatgttgctttttgtaaaaaacaaacaaaatcccccaaaaccaaaacccaaaactttgtgtttatattttataatttttctgaccaaatttttacctaatttacttactgaatcccaatttagtctttggctaacaattgggcactcaaatctttgctgaggaatgcatgtgttctatatcataatcaatatctttagaaacaattcccttaattaaaggcacccacaatttttagtattatctgtagaattttaattttattttattgtgataaatggctctttatgcaatggaaatgttgccagagtccctgttcttggacacctcttaaaccaaatgccatttaaatgaccacagactaaatacaaagtaggtaaatgcttacagggaaaggggaaagtggatcaaggtagaaaaaagacaatttgttttaaacactcttaatacaacttgttctctctccccttaaacatgtttaaaacaacgtaaagcacagatgattgtctgaaagaaaaagaaatcatttgcacagcccctgttttccagcttggtgccctttgatgggtggtgagtggtagcgatgtggcccagtgagacggcacagtcgctcttcctgcaggtcagaatcttcctaggctgttgctcttccaaggtactctgagtcctgcgatggtggcctggggttttgtttcctaagaagtagttgccattattttgattcatcctactgttctaaccaaaacaaaaaccaaaaaactccaaatggtaacagatattcatatacccggacacccaagtcagtgagtgtcacgtggcttccagatttgcatctgtgctgcagtagtctttcttcctggcaggtgtacttttgcatgtgatgggagatgccctggggtccgtggttgtggtcatcacggccatcatattctatgtgcttcccctgaagagtgaggacccgtgtaactggcagtgttacattgaccccagcctgactgtcctcatggtcatcatcattttgtcatctgccttcccgcttatcaaggagaccgctgccattctgctacagatggtcccaaaaggagtcaacatggaagagctgagtaagtagactgaattttgatccagaaccactctcaatttaatgttattcaggccaaaggacaagcattatttaagagcagtgtttgagttatgtattctgaaacaccttaaatcaccaggtggtagagatgtcatcatatgttttatagcctattaagatgactcagctccaagtaccaaaggtcctttgcaatccgtgattctctgactcaactgcaaatttttaagaatgcaatacttggtctgggcatggtggctcacgcctgtaatcctggcactctgggaggcagaggtgggtgagtcacctgaggtcagaagttcaagaccagactgaccaacatggtgaaaccctgtctctactaaaaatacaaaaaaattagccaggcgtggtagcacgcgcctgtaatcccaactactcgggaggctgaggcaggagaatcgcttgaacccgggaggcggaggttgcagggagctgagattgcaccactgcactccaggctgggtgacagagtgagactctgactcaaaaaaaaaaaaaaaaaaaaggaaagaaaaaaaagaaaagaatgcaatgcttggataatacctattcctgggctacttactttcatgtcaaagatttattttaattcaaataaggccatttctgccaagaactttattttattctccttattctaaaaacacaaatcattcatattctagaccctgctttctagttaatgcgggcatgcaagtcactgtgtctctcacaacactgcccagagctgcaggcagagcaggtggtgggagagggaaggagacagaagagcagacatacagcattgcctttgccttcccaggagctagatcatttcccaattgaggaaataagataaacatatacaaagaaatttgtgatatatactggatatgtttttagtaaagtaatatatttaaaaacagatatttttaaaaatagagggctactttttgtgactcattcctgtaatctcaccactttgggaggctgaagtggaaggattgcataaggccaggagttcaagaccagcctgggcaacatagtgaggcctcatttttagaaaaataaaaaaattattttttataaataaataaaaaagtaaaggttgtagtgtgtgcctgtggtcccagctactcagtaggctgaggtgggaggatcactggagccctggagtttgaggctgtagagagccataaatatgccactgcactccagcctgggagacagggcaagactctgtctctaaaaaaaaaaaaaaaaaaaccccacaagatagtaataacaatagcaatattttcatagcgtttactacatgctagaaatgtaagtgttccaagtgctttacttataataattcattttaatccttaaaataatacaaaaaggtactattatcatttctattatacagataaggaaactgaggcacagagaggttaggtaattgcctaacgtcatgcagttagtaaatgtctaaactaggattcaaactagctgactgcaaagcctttgctcaaatcagcactgaataccatctctctaaatacatactcattttggaaagtatagaaaatacagaggagcctaaatgagataatagaaatctttcataatttgaccatggaaactaccactgttaatattttcttctatatgcggtgtaaaaagaaagatcataccatacacacagtttagcaatttgctttttcacttaaaaataccttatgtacattttctcatatccttaaatatgcaacttacttttaaacaactatatcctattccattacatcattgatttaactatttccttgttggttccatctttttaatgaacacaaggagcattgtccaaaccattcttgtacatacatatttggttatttcttttaggttaaacttttagtactagaattgctaggaaaggttttttttgatccatgttgccaaatcatcccttttaagaaaaggcattgcactttatcctactatgggaagttcattcaagtgtccattcccttgtatactcagcaaccctggggacttttttcttgtcgttgttagacttactttcttaaatgactttgtgtggactaacaatgtgtggagaaagaaggttaagggcaaatgtacccacagaggtagaactaatttcttccagctgttcgtagtaagtaggcagccattttggtgagaatgcttaacggaaccatatccctcctgtagttccatgtttcaaatgcagcgctcaccttggcttttgtttgctcttctctgttatagtgagtaaactctctgctgtgcctggaattagcagtgtacatgaagtgcacatctgggaacttgtaagtggaaagattattgccaccctgcacatcaagtatcctaaggacaggggatatcaagatgccagcacaaaaattcgagaaatcttccaccatgcgggaatccacaatgtgaccatccagtttgaaaatgtggacttgaaggaacccctggagcagaaggacttactgttgctctgcaactcaccctgcatctccaagggctgtgctaagcagctgtgttgtccccccggggcactgcctctggctcacgtcaatggctgtgctgagcacaatggtgggccctctctagacacatacggaagtgatggcctcagtagaagagacgcaagagaagtggctattgaagtgtctttggatagctgtctgagtgaccacggacaaagtcttaacaaaactcaggaggaccaatgttatgtcaacagaacgcatttttaatctggtactcacataatcagaccatatagacgaggcactttggaaccacaagcttggctcacaaaaagagctttctgggttgtaggcccagactagacttgcagcatgcatgctctgtgttcactaggggttggctgtttgggattttagttaaacgtgtctgtgaatttttatgtaactaactcctttccattcccctgggtgtctcatgctgctctttgactgtttcagcttgaacatgcattttctaaagcaaactgcactagtgtatatatcagggacattaaagtctgggactggggctcaatagctgcggatacagtgttcaaagaagttcttgtttctaaactgattagaacttctagctaatgctcaggtgagatcatagcttaaatacattgaaaaaactaaagtaccacaatagctgtatttttcccaatccccttaacgatcataaaagaggcaagttaagtatttctggcactgaagaaatatcttttttctttgattcatttttgaataaatataaaatgaataactattaaggtagaaaatattctcagaacattctagaggaggtaaaggttagtaggagggcgttggccatctctacattttgtgaggtgagagaaaactaatgtttactttctgctgtgaactgaactgcagctatagaatgtttcaaatgcttaaatatataatacatttttttccatggaagtgagggaatatttcagtttcctgaagtatgacacaaatactcatatactgtcttttagagtcagtatagttggagctgttttcatttagtgctttgataatgatttacttatttttccaaatttcgtttgaattttctttcatatgattgcattgatctatgcagcatttaccagaaaagagtattcctgggatagcagaatgcataacactgagtgttaattcttgtgaaataaataagctagactgccttctctttaattagacatattttaaagtatttattatagttgtcaactagtaactcaatgaaaaagttgatgcccaagggagaaatgagaattagcttaattgctgcctttaatgtgtttttgaggaacttaaaattttctttcatgtcgctgatccatattaccaagttcaaataaaatttttataatcggattcagacccataaccaaactatgttggtagtagagaagcatctgtcatgtttttaacacattgctcagacatcagtatttaaatcagaacagtctcacaggtatgagaaaatgggaagtgcctcactagacaactagtatcatctctggtagactgcaagattgtctgaaaataaccatctcttagtgtgtaaagtcctgttcagaatctgcacagggtttttcagaggtgctgggttgataatgaaggcagcatccacagaacaaacatcatatttaaacaatgtatcttagtcctaaatttgaaggctaaaataaataagcagctatgatccgtaggataggaaattattatttttttctttttttgtagagacagggtctcgctatgttgcccagctggccttgaactcctagcctcaagtgattctctcgccttggcctcccaaagcactgggagaacagtcatgagccactgcacctggccaggaaattctttattccttgaaaatgtattatctgagtttaaattggctgtgaagtaggtaaatagaaaaatgcctaaaaatgtttttatttctaggagcttattgggctaggttatatgccctttataagctcaaaggggttaataagtaagaatttctatttttagtattaaaagtgtggcatgtactcacacaaaacagtgcatcctcttaagaaacttggcatggagatcagtgggccagattctcctacataaacattggttgaaattccttagagccaaaaaagaaatttttctctgacttccaaatttgaaggtctaatttgatttcacatcattctgcctttattaaaagggaaaattataatttcacagtttttgtgcaactggctgaaggaatggatattagtttgcacttaaacactgttctttaatctctaaaatatttttctgggtaagaaaaggcacttaattccactgtaattaaacctaacttcagaaaagtatcttgatagacagttataccagattatggcctggagtcaatatgaagtaatacctttttaagacagtttggctgactgcatttaataatgtccaatcatgctaagtgcaataattttgtattgggttgagtggcttgcatttgccacctgtggcactgtgatgcctgctgtatgctattttcacttgggtttcactctctctttaattgtcctgccttttaattctcccaaggaaatacaagagttttctttttccctttaaatcagccctgcttggtggcagtagcagctgataaatagatttaaaacagcactgttttcctttaagattagaaaaacactggcactcagtttggtgctcctgtatacttaggttatttacagaaaatcccctcctccccgcctttttttaaagaactgacataatttttttttggtttgtttgtttgtttctttgagacggagtcttgctctgtcgcccaggctggagtgcagtggtgctatctcggctcactgcaagctctgcctcctgggttcacgccattctcctgcctcagcctcccgagtagctgggattacaggtgctcgccaccatgcccggctaattttttgtatttttagtagagaccgggtttcaccatgttagccaggatggtctcgatctcctgaccttgtgatccacccacctcggcctcccaaagtgctgggattacaggcgtaagccactgcgcccggccagaactgacataatttttaaagtctacggcatattttgtgtgtcagctcagggaccagttgtcctgtgtgctcacctggccttctacacggccctactgcacttctgtttctacagaaacagtcctttccacattattttagcattggccataggaaatactgtctgtttcattttctgactctcaacattgtttttgaaaatataattaatttttttcatgatattgggccattatgaatacccacaggctccattgttgacagaaaataaaattactctcttcttgataaaatgtcaataaagtagggagacattatttgaggaagaattaagaatattctccatatttagttcttttttttttttttttttttttttttgccattggtagagcaaattccagtggtggtaaatcaagaactctaaagttcagtagagacaggtgttttgaatgtcaaggaaatcactgaggtagatttgggattacaataagacagctgccctgtgaggtcataagagcttttgtgaggcttactccaggggttctcagtcttggcattactgacattttgaattggatgtgttcttgctcctgatgtgtgggttgtgtactgtaggatgtttagctgcacccctgaccgctatgcataaatgccggtactgtcccccgaagttgtgacaaccaatgtctccagacattgccacatataacctgggaaaaaaaattgccccaagttctgagccactgggtagaactaagggtagtttagggacaatgttaatgaaagcctctccaaagtcccatagtctttttaataattaattctgcagaatttgctctttaaaaacatatttttaaaggcaagaccagcctattcataaaaattgcagttgtttccacataagaactttggatatttaaagaaaaatgtaatttgaaatgaaaagcccttataaatccctttatactcatcagtcattataacagtaaatgaaatgaagaaaaagcatttggtctcactcttctgtgctgatctctttaactcctgaatatcctcaatttgatgagcccactatccaatgagactggatagttatcagcacaattgattcatggggttgagatgtttaaatctccttcatatttaaaatgatcgattttaaacttgatgatgttaattcttcttagttcctggtaagcagctcatcttagtgctaatgacaagttcagatgttaaaaaaatctttatcatttatggctaattttatcctttgccaaatcatatctattttcttcaagagagcaaaatacatttcctgattttaaagtattctatttttaaatatatcttcacattcctgtagtaaaagactgcaaaaaaaaaaaaaaaaaaaaaaaaactgatgtagaaaaaatgaagaaacatgacctgatttgaattttgagtttggatgaatgatcgcggactgcatgcctgctctatagaagtcatgcacctgataaagtgtcacgtatttgtgcttcttagtttatttacccttgagtagccacaggtagaaatgaggttgtcaaaccaggaatttagtttctcaagtggaaattgcattgaaagataatcctcaatgtaatctgcatgttcttacccatctggagtttagataatgcagacgagtcattttctggtgcttctcttttcatgtgttttatttcgtacctttttgtttacatggaactttcttgaatgtttgctagatgatcaactgtcacctcttagtacaaagccatgccagacactgcacctactctgcactctaatgagaacaatccggaaaggatgattttcaagggagagtgacctcttcctggagatctgaggttatgttacagtattgtggagttttgttgcttaaaattctcctcctgtcctcacaggcaattttgctagagttgcaatcctcacatttgagagaactgtcaaaactctaagacataaagtttaaataactcattaataattgcatgtgaatcccccagtaatgtatgtacatgagcatacctttcaaagatgttcaatggtgctgtaaataaaatttttttaaaaaatagaaacatgactgagatatgtctgtggcaattaaacagataactgaaagtagcagaactcattttgtctttgtcacttaccctggtaagtttattattcagtaactccttggattggttttaataatttgggcctatttctgtttttctgttttgctagtctccttcacaccccttcttctgtcacccaggctggagtgcagtggcaccatctgggctcactgccacctccgcctcccagattcaagcgattctcctgcctaagcctcctgagtagctgagattaacggcgcccgccaccatgcccggctaattttttatttttagtagagacggggtttcaccatgttggctaggctggtcttgaactcctgacctcaagtgatccaccctcctcagactcccaaagtgctggcattacaggcatgagccaccatgccccgccctgatttggttttctagaaagactgttttggccctgggctctgaccgatttggctcagtaggcttcgtgtagaagggaaagctgtttggattcagggaagatagagaggcctggcttattttggagagggtctctggatttgaaatatctccaatgggttgactgtaatctttataaatgttggattagaggaacaatcttccagttttttcaattgcttttatcaattaattgatttatcagcatacacttattgcaaagtgtgtgcaagtgattcttgtcttcaaggagtttatagtccacatgtgaacttaagtaaggccgtgcaacttagtgggagtttaagggcagctgtgtatagcctgtgattgctgagataaccttgtgctggatgcgttctggtgctcaaatgtgcacattccaacccctgggtagcgtctgcaataaaagggggctacacgacatttcatgactatcagtttctttcaacaataagagtctgtaggatgaagcagaggactgaacccaggagttagagtacagactctctattccacagagaatcccacctaccctctgtctcttaccctgcagaatatttttttcataccactattatgttgtaacattaagttatgcattcacttattttcagtctctctcactagataaggctttacataatccaccactgtgttcttcagcccctatcacagtatttggaacagtacctggcacatagtggtagctccataaatatttactgagtgaatgaatgaatgaatgaaacaaacacaagaatgaaggaaaatttcaactcttggtgttagtagttacaggctttgaacaaattctataacttcattgagcttcagttttcttatttataaatgaggctaatgatgaaaacctgtggtacctaccacagcgttgtaggaattaaaggagatgatgcatatgagaacagatttaaatgtcaatggatcttattctttcacactttcaatctggcattcatatttttcctgttcttatcctgcctcctgccatctaggtaactccattttgtcaattaattaaacatcaatgctaaacagcactaaatggtagtataagcaacagggtgaaagtgaagaagaaagaatgaagagtcaaagacagcttcacaggagagctggcatttgaaatcagccctggagtggttcagcgagtggagaaagaggggaaaggaccttctgaattgagagcttagttttaattctttaggcaattgcccttaaagctttggtgggaggagtgtgagagggcaaattggggaaatgccaagaatagaatattttcagaagacaattttctccaaaaatcttcctcagctgctctatgttgctctgtacagagcgtttcacctgacacgcactgagccactagcatctccagtcctgcccaggatgctgagctccatcagagaaggactcactgttgttaagtcaagtttagcctaaagctgcctccttacatatttaacttcagcctaaaggtttccctgtacatcatgaactatagctagtggaagtggaaccagattgtagcccacacttgcgccagtcaccgagttttggccaatcaaatatggctctgttcccaggctgcagtgcagtggcccaatcttggctcactgcaactttcgcctcccaagttcaagccattctcttgcctcagcctcccaagtagttgggactacagggacaggccaccatgccaggctaagttttctgtatttttagtagagacagggtttcaccatgttggcccaatggtcttgaactcctgatctcaggtgatccacccacctcagcctcccaaagtgttgtgatcacaggcgtgagccaccatgcccagcctatcctaattttgaaatcagctttccttgactcttctctgttcctttcagtgggaacagctgccccagattcccccttaccccctggcttatccccacaaaccagctcaaaccttgcagccatgtttaatgctgcctttactcttatcctatgtctaactcatcattatgctcaactaatgctccctgcaaagtactactcatgtcagcgcctcctttccattcctgcctgttcctcaggttcagctgtatcacctcagcctgtactgttgcaggagcctcttggccagctcccagccacccctaaacttcctcttgtcaaccctcttgcttccctctgctccaggaggagggacaaactcccccagcctgtcactgtggtttccttctcaccccagcaccccccagggtttatcttcttcagcagacaagcagagcacaaagatacctaaggaagttagaatgtgagagggtgcaaggatgcattttctctataggctagtgaatcgagttttgtatgagctggggagagagtattatagagtagtctgtttcttctatgccaaaagtctttcttcttcttttttttttctttttgatttttacattacacttaccaagttatttcttttctggtttctctttctggctgacttccttttctatgtgagtgtgtcattttgccccaaagctgacttcctgtggatgaccaactgcgaccttccttgactagtgtcctgattccagagcacactctgatattgacatatcccatgagcgtaagcagagccatggcctctctcatcttgtgtgaggcaaaaaagagggtggactttcctttatctcatattttcaccacatggtcacatatgtggctgtgacataataatgaactccaatatagagccaaaatatttggcacattgcacaattcttttaggcttgaagatgcaagagtagatttgcatgggatttataaccacagggctgggtggggacgaggtgaaggtgggggagcaaattgtcccagtggctaaggtcgatagaggcttgcagtggtgctgataacaaccaggtctcctatctgcctcagaaaactggggccaaaagaagaccatgagtttgtagatgtcatctgatgcccaaaagcattcagaaaaaaaaactgttgactcttggaaggcatgatgattgagaatgttttatagcatttactttccattgttaaaaattgcactattggctgggcgccgtggctcacgcctgtaatcctagcgctttgagaagccaaggcgggtggatcacttgaggtcaggagttcaagaccagcctggccaacatggtgaaacctcatctctactaaaaattaaaaaattagccaggtgtggtggtgggcacctataatcccagctatttgggaggctgaggcaggagaatcacttgagcctcggttgcggaggttgcagtgagctgagatggctccactgcactccagcctgggtgtcagagagagacgctgtctcaaaaacaaaaacaaaaacaaaaacaaaaaaattgcactttacagcacttcctgagtggggagacatgacccatggtatgactaatgttaagttataggaaagtgtttacagagagattttattataaaaatcaatacatactatgaactatagtttaaggtttaaacattctggtcttgaaatctgcctgctttcaaatcctagctctactatttgttagttatttgacctgtgaaagtaaattgccagagaatttaaaaagttctctgggcctcatttgtgccatgcgtggaatggaggcaattagatttcctgcctcatgagattgtcgtgcagactaaaggaaatgcggaacgctcaacacagagcctgggtctctgaatgttctatgaatgctattaacaaatcttctttaaatgccaactttaattaataagtaaaatttgagccagagttattccaattgttaactcactactcgtgaaatgtcaaaaatatatggtgtagattagcctgagtgtcagcacccagttagatttgaaatggcagaggctgtattacatgactttaccaaagaactatacagacctggacgcagaaccctgcttctccacccccaaattccaagggcccttatttctaagaaaacacaattcaatgctgaagggcttcaacaaaataccagggcttgatacaacaggacctcacctcccagccatacacaggtggcatctcgaacagtaatgtcaattgctagagggctactgagtccagggttccagtcagaggcaacgaagtcttcagctgactctgggtgaacctccattctgtcaatgccttccagctagagacgaacacacctgtggttgaatgagttgggtttaataattgatgccaagaggagaaggtacaccatggggaaccacggggcatatcagcaagagggtgttcacaaacttgaggatttgggttcatgttaggtgattttgggggaggattaaaggaaatgaggctttgctttggattggatgctgtcagcaagtggggataactctgaccaggtatcttaataaatcctatctttaagggaagtggggaggaatgaagcaaggctcaagttttaactgggagcagttgtcacttttttctttttttgagacagagtctagctctgttgcttaggctagagtgcagcggcaggcccatagctcactgcagcctcgaccttctgggctcaagtgatcctcccacctcagcctcctgagtagctgggactacaggtttggactaccactcttcgctagtttttctgattttttttatcagagacaaggtcttgctatgttgccaggctggtcttgaactcctgagctcaagtgatcttcctgcctctgcctccctctgcagtggctcacacctgtaatcccagcactttggtaggctgaggctgctgtcactcattttatccagggtggggtctgggattttagggatttgcacagtgctcttgtttttgtctgtgctgagatggtattacagagtgatcttgtttctcacctcacttcatcacagtcacggtggcctcttgtctggtgctggtgttctgagagatggtttgtgctccacaggggaatacaatggcttagctgtgagagccaggccagtcccaccaacaccaaggtcttgtatagtatcagtttccagatgccaggggtgtacttttctttttagtatgttctcagtacttaatatatttgtggtacattttaatgaagcaggctatgcgcattgaaatcctggctgaaaggacacttagaagctatgtgaccctggaaagttactccaccttttgaggcatcagtatcttccacattttatatgtgaggtctatacctggcctcccaggggtgctgtgaagattaaatgagataatgcatgttcctgacaaatagtgatttaaaaacttagctatttttgttgagtccttctgtatagtttggcctccatggctttccgattttaagacatggatcaaatgcattctctctctctttttctttcttttttttttttttttgagatgaaggcttgctctgttgtccaggctggaatgcagtggcatgatctcggctcaccgaaacctccgcctcccaggttcaagtgattctcctgcctcagcctcctccgagtagctcggactacaggcacgagccaccatgcccagctaattttggcatttttagtggagatggggtttcaccatattggccaggctggtctcaaactcctgacctcaggtgatctgcctgcctcggcctcccaaagtgctgggattataggtgtgagccaccgtgcccggccagctcagaaaattgaaatgcgttgttcaactcagctacagtggagccaggattagagccaagctattttcgatttcagtgcctctgcccttttcactattctgtgatgccctccacttcagaatctaccgaagtccccaacatagggatggacacacgattgatgtttaattaaaaagtgttggtttaactactattgaggacaataactttctctaaagtcataacctggtcagcatacccaagccagtctcctcaaagaccaatgctatatgatatgtcctgaccagcaatgcttctttttttatattattagccactggattctcttcagcatttggccttgacacatcacaagaagaaggagaaaagcaaactggggaaaaggtgaagtggtttcttgaagcagtaacgtatggtggaagacagaggctgaagctcagtagatccaagggaatgactcctacagaactgaggctattgattggtattgaaatgtggggtgcctattcgttgtcacccttatctaaaagttgttcattagaattcataattgccttgtcataaaagagggcttgcattttgaactgctgggcaagcgaaaactctggactttttaatgtttttgaacagcctactccttatgaaagcaaccacacctcatggcgatctcatcagttctctggaaagcaagtcatgcatttagaggcaggtcatgcagcagagacgtggtcttccctctttctccacagtgctcttctctatgagagctctaagtactttagatatacagtaaatctgtccttaactacaagttcttactccactaaattctaacataagaagatttgcttctgtatatcttttcaatatctgggagaatttggattctagaacatgcaaattgcgtgtcaactcccgcgagggtaatttggaagaacagggagctaggtatttggaatagagacaaggatatagttgacagagcagaattagagccctttgcatggacttcttaggaaagataaaagcaaatgagggaaatgaaaccttggccttgggactgcatgtgcgtcagaggagccaggagtaggcaaggtcagggactttgaaatgcagagaccaggagaggggctaaggggataaaagcctagatgtgtggcctggggtgagactgaatggtgagtcctggaagttaggggttaacatagccatgtgttaaccttggaaaagcattcaacacttggctcagaaaaaaagcacattgcaataagaggactatctgttaaagaaaacaactcaaaatgtaccaacaacttattttcaaaattagggagatcatggaccttttctagcaagcaagtgatgatagcatgaaaaaacatggcacctttattacttatttacaatgtataattattattactatcgcttacactttgcactttctttgtaggtttattttagtggatgtataatatttactaggcctttcattctcacctttgccttcaattgaaatttcataaataaggttttaagtcctcttctagtcccacactgaaaagttctcctatccgggaactttttagatacccaacaccattgttcagggagagtgttctggtttatgaatgactagtaataacatcaaaaggatgcaaaatacgacaacaaaaaataggcatgggtacaaaagaataaccaaaaatgcatacttgccatattaacttcatttaaagacgttttgagaatgcagccctcacttgaatgaaaaggaagtttgcactgagctgaaacattgaactataacaaaatttgttgttgggctacttagatccccattctcaattcccttttctcctgcctgcctccactgtaaaggctggaaatgccacctgcttactgtcccagcttcacgtgcagttcgggattcccatatggcagttttggctgatggcaagaatgcaggagtttttaggtttgggaaagagagagtgctgggaaggccttcattttttttcttcacaaaaagaagagatataactcttatttccctttctctcttctttttcacttgaatgcagattacatgcacagagctatgataaccatcttgtgaccaaaagaagggaaaagacaaaaaaaaaaaaaagaaattgatcacagggatgcagtttgtgatgttgctgggctgtgtaaccacagtcagcagctgctgatctctaggcttcttttcataggagaagagtaaacttgtactcttttaaatacattgttagaaagtcttctgttacttgaagctagaagcattcctaactgattcatagtattgtaattttcttgtttcctcattggcaaacatgagtctgttcatggaattgtattaccaattgatagtccctatggggagtgtatattgttccagccttgtctttaattcttacggattcccgagtcgtatttcttttttcttttctttttttgaggcagagtcttgctctgtcgcccaggctgtagtgcagtggcgagacttcagctcactgcaactttcgcctcctgcctcagcttcccaagtagctgggaattcaggtgcacgccaccatgcctggctaatttttgtatttttagtaagacgggtttttaccatgttgcccaggctggtctcaaatgcctgaccttaagtgatccacccacctcggcctcccaaagtgctgggattacaggcccaagtcatagttcaagaatcacaatattttaaattgatatccatgttatatatccatgttataggctgttttatctatctaaaataatttctctgtgttttatattgaaggagacaaagatattttgtgaaagtcagggaaaaatctatgttcaagagtttttatagcctcattaatacttggggctaaacagtatacattgtcatctcatactaaaactctcatgcaaggtggtgggcagagttccatccactttacaggtggaaaaatggacttaaatagattaaaactattatgcaaaattttactgcaaatcaggcttgggggaaataacagaatatttgcattatattaggaagcctcaagtattttcttaattttttaagtccttaacaagtgccacaagccctggatttattttgcctacttaatacatcttttaccatgtggtcctatgtcatctcctccctttctccctccctcccctctccgtccttcccacctcccttccttccttcttattttaattccatcctttcaacttttgtgtaaactgttttcaatcaagtttattgtaaatcccatttttttttttgagaagtaaaaacttaaaaagaagattaaatgattgtctctttgagaatcaggtcttgagtttctctcgcccatttaggcgacttctcctttttcctcagatgaaacaatgaatttctattttgctgtcacattttggatgtggaatctgactttagagaaagaacccctggtttctgagtcttgggcatatcttttcagcctgggccttcttttctccctgtcaaataaggaaagtgggctgaatgatctcctttccagcacgtccaccctaggattccatggttcatgctgtgagtttcctggccttattcttgagagtcttgagggtttcttgctcttctgctgtgttatccttctctgtttgtacagctgtggcacatgatgagtgttttgattttattcttggctaactgtatttccctttagcttcctgctgatttgtttgtttgtctaaagatttttttctcttacattctttgcctgtgttcttgcattgattctttctggacttgtatccccattttagttccatcacacaggacctctttgtgcccccaatgtcaggagataggcctaaggtctgttttgaaggctacttgtgttctttcaggacctgctcttcccacgagatagttgagtccatggaaacaggaaccttgcccaaactggtttttctttcctttgctaaatggttttggcatctgttccattgtattccatttctcctctttggttttctttcctttttctcattttgcataaatctagtaagcttgtaactactttctatggattaccttcaagctttaaatatccaacattgtatattctttctactggtagaaaacagcctagtgtggggtcatattctcaaaacagaacctgtgtatgagagatgagttttaggtgatacctgactgaatatcttgtctttgaatattacatacttattttaatgtttatggaaatatagctgtcacatcaaacttgtaatttcatagttgtgctataaaaacctccccctttaatacatttactgacatagcaaaagcctaatttaaaagaaattctgaaataatgctaatggattgaacacttactacagtgcatgcattacatatattaattcatttaatcctcaaaacaaccctgaggtaggtactactgtttacccccattttaaacataaggaaacaggcataggtcaagtcagttggccaaggtcacaaagctagtaagaggcagcactgggactggaacttagcaggggtgacttcagaactacgttctacccactaaaccatgatccctcttaaaaaatcctgtatgtggtacatgattttggaacaaataatgaagatagtatttgaatgattgaaatttagaaataacttatgtaatggaaagcacatgggctttgaacttagacaaaccttaaatgctagatctgttaactggtcaattatgtgtttctagacacatcacttaacctctattaaaatgcccatcccaagttgtttttttttttttttttgaaaaggaatcttgctctgtcacccaggctggagtgcattagtgcaatctcggctcactgcaacctctgcctcccaggttttagcaattctctgtctcagcctactgagtagctggggctacaggcacgtgccactgcacctggttaatttttgtattttgagtagagatggggtttcaccattttggctaggctggtctcgaactccagaactcaagtgaggctcctgcctcagcctcccaaagtactggatggttttgttttttttttttgagatggaatctcacttactctgtcacccaagtggagtgcagtggcacaatcttggctcactgcaacctctgccttgtgggttcaagcagttctcctgcctcagccttcggagtagctaggattacaggcatatgccactatgccaggctaatttttgcatttttagtggagaatgggttttaccatgttggccaggctggtcttgaactcctgacctcaagtgacccacctacctctgcctcccaaagtgctgggattataggcggagccaccgtgcccggcccctatcgtaagttttaacgcatatgaattccctcttctttctgtgaatctcagtcttttcatctgttaaaaaatcaggatccgtgactattaagaggtttagaaaaagttatggtggtcaatatatagtaggtgtctaccaaaaatacacatgaatatcttccattttgctggcctctcatagttcgtactttggcatttaggatctccaagtgctttaagaaaagatctctctctcctattcccgtgttttgtgaccaaaacagggtcagcctggtgaatttctttgatgccagtttccccactgtggggaaaagcacaaagtaccgaataagcatagccaggaagagagcacatttcttgtgtgaagctgaactgataggaagggggttgtatctctatcagaaaagaaacgggggtgggttaccttttagggttcacatggatagcttctgaattggtttggtcactatgtgggtcatcataaagaggctgtgacctgcaagatgtgactgtgggtgaggacagctgtggttcaaaatgggaaatgcctatagcagcattctagtggtaaaacatttccagattttacaactttgaacttattatcctatacaaatggctccagactgtttacccaaaagtgattacaatggcgttagataaagatatggccgtttcattcttcacaaatgattaaacctctgtgacgaatacatggacaattgcattttaaagacaggggttgattagttaagaattttgaaaatagccagatgccctgatacgataactgaaaataacatttcatgcaacttagttgaaagggcttttttataagcccgtctcctcctccatgaatgtatgtgccagttttttttttttaaataattccacattcttcttgacttcttccatgatgtagggaacgcagaattagagtccaaagctctacactcaagtttgtgcccttccatttaaggctgctgggtgactttgggtgtttatgaaaccattctggacctgagttttttaataaataaatggaaggggtgagatctgcccctgcctgccttccaggttaaggtgggggttatcaggtaagatactgtaggtgaaagtgtttttaaaaactgtgaagggccataacttgcagtgttgttattctctatgtcttctaaccagatgccaggtcattttccccttccaagttccatgcgcctttcctgatctcttccctaaagcttatctccaaaatcttacaggagtcagagtctgggagattctgctttccagtttaagccttgatggctccttgtttgtttattttttgttttgttttgtaaacacaacatgaaacctcattaattttggggcaagctagtgaaaatctacagggaaaaaagggtaattcaaaatgcgggcacactgtctcattatgtttttccattatagcaagagttttaagtgcctatcatatgtactcaccgatgttagatgaaacgcaaaagaaaccttcagcggatctttagtccactgtgtatatgtgtatgtatgttggtgggggtgggggtggggtggggaggagagatgctcaaaatgcatgaaggaaaactagaacagacactcttacctgagagttcatgggctccataaggggtccacagatggtctttcagggggtccttgaaagcatatgtccagatttatgcatatgcgcatgtgtatattttctgcagagaggactcatagctttcatcaggttctcaaaggatctgtaatttaaaacagtaacaacttaagaaccaagacagagaacacggccaagctgcagatagtctgactaaatggcatgtagattatttatatggtgagcttagtcagaaaaagcttttcaaagaataattaagtcaggtcccgagtcaagaaaagtttctgctggttctgcttgtatgtgtagatacgactaatttattaaatacgacaagtcattacagtaagaagctgtaacatctggcacttcactaattgggaaagctttataaaattgcattggaggccaggtgcagtggctcatgcctataatcccagcaccttgggaggtcaaggtgggtggatcgcttggatcgcttgagctcaggacttcagcctggacaacatcagctattatgtcttcaagtattgcttcttttccattctccttcttcttcccttctaggtatattcatatgttaaatcttctcactgtgcctttcatataccctatcacctgtttcccatctctttatctttccatgctttattttgaatattttcttatgatttatcttccaactcattactaatctttttaagtgtatgtaaaagctgttatactcaggcaccaagttttcaattttaattattttactttttagtttttcaattttcatttgtttcttcaggtacatgcatatatatttttctcagttctctgctgaagttttcatgctttcatcttcttgagcttgtgaacttatttattttgaagactgtctttgaaactataataactgaagtccttgttgatatttatttactctagttttttccttcttggtttttattcatgtcacattgtcttcttgtttgtctgcttatttttggttgtatgcttcacattgtttggcaaaatttttttgtataaataatttgaggctagactgatgttattttatcacagaaaggatatcattttgcttttcccagttatccagggggcactaacaatgctggatcatctcaatccaatgttacagactgagaggattctagctgaattgctcttctgtaaggatctatttacatctggtttacacttacttctaaatgaatcctgttaagattctaatctaatgcaagggatgtttatcaggttcacctgttggcaaactctcactccaatacctgtctccctaaaactgcaagaatttccaaagtgacacaaaacttcccaggagttcttagggacaagcaatcccaaacattgggcttactttcctgcaccttctcatcccccatctcctaaactggtaattctgcatttgcttgatagttctctattgcctctaagcagatttaaatttccacttttctagttgtcctcagcagaagagttggcctgaatgtcctggtttgcatttgccggaagcaaaggtcctctaagacatttaaattatatcttaaggcatgctccttctctcacactttccctactactggaagttagatattccctttcaaaatgttcctgaactgcagttgtccgtgaaagtgtttgctagtaatctgtttagaaaattgacttggctattcttgaatctttatactatcaaataaatttttgaatctgtttataggttttcatacacaaagatatcctgtggagttttgatagaaatggcattgaattttcataatatgaatgggagatggcagattggctttctgaaaacatggccgagacagagatcgctttgtagcaaggttctatgctgcagttgtagattttcttggaagcccagtctagggctctttcttgagcccttctattgattctatgaacagctttcactcttttttgttttgcatatttgtatatttgccttttattcttatgaaataagaaagaaataaaaattatttaaattaccatatcaatttagattaagaattcttatctgttagtataaatacacgtcacccaactattattgcttatgtggaaatcattttaattttttaaattgtagtaagaatacttaacatgacatctaccctctcaacaaatatttaagtgtacaatacagtatagataactgtaggcatgatgctgtacaacagatatccagaactcaatcatcttgcataacaaactttatacctgttgcagagcaactctatttctctctcacccagtccttgacaactgctattctgttctctgtttctatgtgtttggctatttttagatacctcatattagtggaatcgtgaagtatttgttcttttgtgactggtatatttcacttagcatatataatgtcctcagggttcatccatgttgttgcatgtggcagaatttctttcctttttaagggtgaatattacgaccttgtatgtctataccacgtttaaaaaacccattcattcatccatttacatttaggttgtttccacatcttgaccattctgaataatgctgcaataaacatgggagtgcaaatatctctttgagatctcgatttcagttcttttggataaacacccagaagtgattgctgaatcatatagtagttgtgtttttatttttttgagaaacctctatactattttccatggcagctgcatcattttatattcctaccaacaaaatgcaagggttccaatttctctatgccctcatcaatgcgtgttatttatttatttacttttaaatagccattctaatggctgtgaggtgatacctactgtgatttgaatttctctgatgattagtgatgttgcgtatcctttcatataagtattggccatttgtatgtctttttttgagaaatgttcatttttaaattgagcgtttttttttctttttgctagaattgaaggagttccttatatattttgaatattaacccctcatcagatatatggcttgcaaatattttctcccattctgtagattgtatttcactctgttaatgtcccctttgctgtgcagaaactttttagttcgatgtaactcatcttgtctatttttgcttttgttgtgtgtacttttaatgtcacatccaagaaattattgccaagaccactgccatgaggttttcccctatattttcttataggggttttactcttttagatattacatttaattttttaatctactttgaattgattcttgtgtatggtgtaaattaaggttccaattttattcttttgcatgtggatatttggttttcccaacaccgtttatttatttgagacaggctcttgctctatcacccagactgaagtgcggtggtgcaaacatggctcagtgcagcctttacttcccaggctcaagccagtcctcctatctcagcctcctgagtagcttggatcacaggcgtgtgccaccacatttggctaacttttgcattttttgtagagacagggtctcgccatgttgcccaggctggtcttgaactcttgggctcaagtgatccatcagcctcagcctcccaaagtcctgggaatacaggtgtgaaccactgtgcctggccccgaaaccgtttgttgaagatactattctttccccattgtgtattcttggcatggtcaattgatcacaaatgaatggatttatttctaggctctgtgtttatttctaggctctgtattctgtttcattggcctatgttcctgtgtttatgccactatcatactttttaaattaccgtagctttataatatatttttgaaataaaaaccacgatgcttccagctttgctctttttcaagattgttttggctatctggagtcctttgtggttccatatgagttaggattgttgtttctatttcaaaatgccactggcattttgatagggattgcattgaatctgtaggtcactttggatagtatgaccattttaacaatcttaagtttccagtccatgaactaggcatgtttttccatttatttgtgtcttcttttatttcttttatcgttgttttgtagttttcagtgtacaaatctttcactttctttgttaagcttgtaagcttattttactctttttgatgctattacaaataggattattttcttaatttcctttttacatagttcattattagtgtgtagaatgcaactgacttttatatgttgatattgtatcttgcaactttactgaatttgtcttaattcttttttttctcatagaattttttttattatactttaagttttagggtacatgtgcacaacatgcaggttagttacatatgtatacatgtgccatgttgctgtgctgcacccattaacttgtcttttaacattcggtatatctcctaatgctacccctccccactcccccaaccccacaacaggccccggtgtgtgatgttccccttcctgtgtccatgtgttctcattgttcagttcccacctatgagtgagaacatgcagtgtttggttttttgtccttgcaatagtttgctcagaatgatggtttccagcttcattcatgtccctgcaaaggacatgaactcatccttttttatgggtgcatagtattccacagtgtatatgtgccacattttcttaatccagtctatcattgttggacatttgggttggttcccagtctttgctattgtgaatagtgccacaataaacatatatgtgcatgtgtctttatagcagcatgatttataatcctttgggtatatacccagtaatgggatggctgggtcaaatggtatttctagttctagatccttgaggaatcgccacattgtcttccacaacggttgaactagtttacagtcccaccaacagtgtaaaaatgttcctatttctccacatcctctccagcacctgttgtttcctgactttttaatgatcgccattctaactggtgtgagatggtacctcattgtggttgtgatttgcatttctctgatggccagtgatgatgagcattttttcgtgtgtgttttggctgcctaaatgtcttcttttgagaagtgtctgttcatatccttcgcccactttttgatggggttgtttgtttttttcttgtaaatttgagttctttgtagattctggatattaaccctttgtccgatgagtagattgcaaaaattttctcccattctgtaggctgcctgttcactctgatagtggtttcttctgctgtgcagaagctctttagtttgattacattccatttgtcaattttggtttttgttgccattgcttttggtgttttagacatgaagtccttgcccatgcccatgtcctgaatggtattgcctaggttttcctctagggtttttatgggtttaggtctaacatttaagtctttaatccatcttgaattaatttttgtataaggtgtaaggaagggatccagtttcagctttctacatatggctagccagttttcccagcaccatttattaatatggaatcctttccccattgcttgttttagtcaggtttgtcaaagatcagatggttgtagatgtgtggcattatttctgagggctctgttctgttccattgttctatatctctgttttggtaccagtaccatgctgttttggttactgtaccttgtagtatagtttgaagtcaggtagcatgatgcctccagctttgttcttttggcttaggattgtcttggcaatgcgggctctttttggttccatatgaaatttaaagtagttttttccaattctgtgaagaaagtcattggtagcttgatggggatagcattgaatctataaattaccttgggcagtatggccattttcatgatattgattcttcctacccatgagcatggaatgttcttccatttgtttgtatcctcttttacttcattaagcagtggtttgtagttctccttgaagaggtccttcatgtcccttgtaagttggattcctggtatcttattctctttgaagaaattgtgaatgggagttcactcatgatttggctctctgtttgtctgttattggtgtataagaatgcttgtgatttttgcacattgattttgtatcctgagactttgctgaagttgcctatcagcttaaggagattttgggctgagacgatgggtttttctagatatacaatcatgtcatctgcaaacagggaccatttgacttcctcttttcgtaattgaataccctttatttccttctcctgcctgattgccctggccagaacttccaaactatgttgaataggagtggtgagagagggcatccctgtcttgtgccagttttcaaagggaatgcttccagtttttgcccattcagtatgatattggctgtgggtttgtcatagatagctcttattatttttagatatgtcccatcaatacctagtttattgagagtttttatcatgaagggttgttgaattttgtcaaaggccttttctgcatctattgagataatcatgaggtttttgtcattggttctgtttatatgctggattacatttattgattttcatatgttgaaccagccttgtatcccagggatgaagcccacttgatcatggtggataagtattcgatgtgctgctgtattcggtttgccagtattttattgaggatttttgcatcaaagttcatcaaggatattggtctaaaattctcttttttggttgtgtctccgccaggctttggtatcaatatgatgctggcctcataaaatgagttagggaggattccctctttttctattgattgggatagtttcagaaggaatggtaccagctcctccttgtccctgtggtagaattcggcggtgaatctgtctggtcctggactttttttggttggtaggctattaattattacctcaatttcagagcctgttattggtctattcagagattgaacttcttcctgttttagtcttgggagggtgtatatgtcaaggaatttatccatttcttctagattttctagtttacttgtgtagacgtgtttatagtattctctgatggtagtttgtatttctgtgggatcggtggtgatatcccctttatcattttttattgcatctatttgattcttctcttttcttctttattagtctttctagcggtctatcaattttgttgatcgtttcagaaaaccagctcctggattcattgattttttgaagggtattttgtgtctctatttccttcagttttgctctgatcttagttatttcttgccttctgctagcttttgaatctgtttgctctagcttctctagttcttttaattgtgatgttagggtgtcaattttggatctttcctggtttctcttgtgggcatttagtgctatacatttccctctacacactgctttgaatgtgtcccagagattctggtatgtcgtgtctttgttctcattggtttcaaagaacatctttatttctgccttcatttcattatgtacccagtagtcattcaggagcaggttgttcagtttccatgtagttgagtggtttgagtgagtttcttaatcctgagttctagtttgattgcactgtggtctgagagtcagtttgttataatttctgttcttttacatttgctgaggactcctttacttccaactatgtggtcagttttggaataggtgtggtgtggcgctaagaagaatgtagattctgttgatttggggtggagtcctgtagatgtctattaggtccgcttgctgcagagctgagttcaattcctggatatccttgttaactttctgtctcgttggtctgtctaatgttgacagtggggtgttaaagtctcccattattaatgtgtgggagtctaagtctctttgtaggtctctaaggacttgctttatgaatctgggtgctcctgtattgggtgcatatatatttaggatagttagctcttcttgttgaattgatccctttaccattatgtaatggccttctttgtctcttttgatctttgttggtttaaagtctgttttatcagagactaggtttgcagtccctgcctttttttattttccatttgcttggtagatcttcctccatccctttattttgagcctatgtgtgtctctgcacgtgagatgggtttcctgaatacagcacactgatgggacttgactctttatccaacttgccagtctgtgtcttttaattggagcatttagcccatttacatttaaggttaatattgttatgtgtgaatttgatcctgtcaatatgatgttagctggttattttgctcattagttgatgcagtttcttcgtagcctcgatggtctttacaatttggcatgattttgcagtggctggtaccggttgttcctttccatgtttagtgcttccttcaggagctcttttagggcaggcctggtggtgacaagatctctcagcatttgcttgtttgtaaaagattttatttctccttcacttatgaagattagtttggctggatatgaaattctggattgaaaattcttttaagaatgttgaatattggcccccactctcttctggcttgcggagtttctgctgagagatcaggtattagtctgatgggcttccctttgtgggtaacccaacctttctctgtggctgcccttaacattttttccttcatttcaactttggtgaatctgacaattatgtgtcttggggttggtcttcttgaggaatatctttgtggcattctctgtatttcctgatttgaatgttggcctgccttgctagattggggaagttctcctggataatatcctgaagggtgttttccagcttggttccattctccccgtcactttcaggtacaccaatcagatgtagatttggtctcttcacatagtcccatatttcttagaggctttgttcgtttctttttattcttttttctctaaacttctcttctcacttcatttcattcatttgatcttccatcactgataccctttcttccagttgatcgaattggctactgaggctcttgcatttgtcatgtagttcttgtgccttggttttcagctccatcaggtcttttaaggacttctctgcattggttattctagttagccattcgtctaattttttttcaaggtttttaacttctttgccatgggtttgaacttcctcctttagctcagagtagtttgatcatctgaagccttcttctctcagctcgtcaaagtcattctctgtccagctttgttccgttgctggtgaggagctgcattcctttggaggaggacaggtgctctgattattagagtttccagtttttctgctctgtttttcccccatctttgtggttttatctacctttgttctttgatgatggtgacgtacagatggggttttggtgtggatgtcctttctgtttgttagttttccttctaacagtcaggaccctcagctgcagatctgttggagtttatgggaggtccactccaaaccctgtttgcctgggtatcagcagcggaggctgcagaacagcagatactggtgaacagcaaatgttgctgcctgatcgttcctctggaagttttttctcagaggagtacccagccgtgtgaggtgtcagtctgcccctacttgggggtgcctcccagttaggctacttgggggtcagggacccacttgaggaggcagtctgtccgttctcagatctccggctgcatgctgggagaaccactactccctgaatttgtcttagttctaacagtttctctctctctctgtttgtgtgtgtgtgtgtgtgtgtgtgtgtgtgtgtctacagtctttagaattttctatgtataagatcatgtcatcagcaaagagagataattttacttctttctttctgatttagatacttatttctttctcctgtccaatttctctggctagaacttccagtactgtgttgaaaagaagtagctagactgggcatccttgtcttgctcctaatcttagggggagaacttttcaattttccaccactgagtataaggttaactgacttttcatatgtaatttttttatgttgaaatctccttctattcctagtttgttgagagttttcgttatgaaagggtgttgaattttgccaaatgctctttctacatctactgacatgatcgtgtgttttttgcccctcgttctgttaatgtggtatattacactaatttttgtatgttgaaatactttgcattccatggaaaaatctaaattggttatggtgtaggatccttttaatgtgctatttaatgcagtttgctaatgttttgttttgttttgttttgtttgagacagggtctttcctgtcacccaggctggagtgtaagtgtgtgatcatagctcactcttacctcaaacttctgggatcaagtgatcctcctgcctcagcctcctgagtagctgggactataggtacatgccaccatgccttgctaagttttaattttttttgtggagacagggtcttgctatgttgccagggctggtttcaaattcctggcctcaagcaatccttcagcttcagcctcccaaagtgctgggattacaggcatgagccaccacaactggcctttgctaatattttgttgaggatttttgtatttgtgtttatcaggagtattggtctgtaggttctttttttttgtaatatctttgtctggctttggcattagggtaacactggcttcaaaagagttggaaagtgttctcccctcttcaattttttttagaagagattgagaagaattgatgttaaattttctttaaatgtctggtaaaatttaccagtgaagccatctggtcttggacttttctttattgagaggtttttgattattgattcaatctccttactggttataggtctgttcagattttcaatttcttcattattcagtcttgttagggtgtgtgtttctaagaatttatcaatttcttgtaagttatccaatttgttggtgtataattgctcatagtattctcttattctttttaattctgtggcattagttgtaatgactgctcttccattttttatttaagtcttctctttttgtctcttagcctagccaaaggtttgtcaactttattgatgttttttcaaaaaagtgttgccgatttttaaaagttttctattttatttatactctaatctttatttttccctttcttctgctgaaattgggcttagtctgttctcctagttctttgaggttggtttgttaatttgagacttttcttctttgttaacataggggtttattgccataaactttgctcttggtaatgcgtttcttgctgcctcctgtaagttttggtacattttattttcatgtctatttgtttcaaggtgttttctaatttccctttcatttctcttttgacccattggttattcaagaatgtgttgcttaatttccacatatctatggagtttctagcttcccttttctgttgtttctagtttcattcattgtggttgaagaagatacttggtatgattgcagtgttcttaaatttgttctacatgtgtctgttaggtccatttttatctataatgctcttcaaatttgctgtttccttattgtttttctgtctggatgctctatccattattgaaggtggggtgtttaagtttcctattattattacatttgtgtctatttctctttcagttctgtcaatgtttgctttatatatttaggtgctgtgatgttggggatggatatatttataattgtcatatcttcctgggtgaattgacccttttattatgaaataatgtctttctatatctcttgtgatagtttttgacattatataataataaatgtcaactgagcaggaagacatgacaattataaattatagtttatgaaatatctgttgcttgagtttggttagattcatttgtaaaattgtctaggccttatacccttttggtgtgggataggagcagatttttgaatgactttttagtttccctaatggctattggtatgttcaggttttctatttctttttatttttgcgtcaattatggtaatttatattttttaggcatttgtatgtttcattttccaaatttattttagtaaacttgttcacagtgtactcctattttaaaatctctactgatgtatagttaccagcccctttgttctcatattgcttattttgtcttctcttttcccctgttgtgatttagtgcagattattttatgagacttttcaaggaataaacttctatttttattgtttgactcttttttgttgtttatttaatagttctgttttgttcatgttaaggtttgtatgcccacttgacatccaagtggagattttaagtaggcagttggatatccaagtctggagcttacagaagaggtcagagatgatgacataaattatgagaatgatcagcatagaaatattattaaaaactattgggctagatgacatcacccaggaaataatgtggatcagcgcttctcaaaactgtctgtggggaaggaccagttttatttttctaatccaatctgatgcaaaccaatactttgtaaaatacaattgtataaatcattataaaaatgaaatataaactatttaaaaaaggtattcaaattcaagcctaattttttattcttagatacaacaacagaaacatatactgtcaaattgcgattagaactttctaaaggcttagtcagtttctgtatttctgtcattgcagtctggtaacaaatagttaatggactgacactggtatgcagaccaaggctttgagtggcactgcgtgcatggaaaagagaagagaatcaaggacggagccctggggcactctgacctttggagatctggcagctgggggaggagccaacaaaaaagctggaggaagagcagccatgaggtaggaggagaaccaggcaagtttacagtcagggagggctggagaggatagtgtttctaggaggagacagtggtcagacctttcgaatgctactgagtgggttgggttgggtaatacaaggacaaagcattgatcattggctttgtcaatatttgaccaatatttgggatgaaagtccctttaaagtaacttggagagaagatgagaagggagaaagtagagccaagtacagacagctttttctaaaagttttactctggtggagatcagaaaaatagggccacgattggaaggagatatggtgtcaagagaaggcattttgtttaaaaaacacaagggataaatattgtatgattccatttatatgaggtccttagaatggtcaaattcatagagacagaaagtagcatggtggttgttgggggctgggaaaagagggaatgaagagctaatttttaaagggccttcagttttggtttgggaagatgaaaagtgaaatggatggtggtgatgattgtgcaacaatgtgaatgtgcttaatgccacagaattgtacatctaaaaatggttaaagggttaaaatggtaatatcgtaaattttatgttactacactttactacaataaaagacatattatgtatgaaatattaagtgatacttttatgtggatggaaataattcagtagaaaagaaactgatggtgcaggtgaccccaattcagaagcagttttacttcagtggctttcatgttgggaaattacagtctgagtcccagtccatgagcagggtctggtggtgggtgcgtcttcacctgttttccaaaaaagcaacttgtttctcgtggtaactccagccttcattcttgtgtgtgcaaaccaagccggtggctttatgtaaaaaacctggtttgggctagttcctttttccctgaggaagttgaaattccactacccattgtctgctgtgtctattgaagtaaggcttgagtctttgcagacttattatgcagagctcaaggtaataaaaggtaataattaatattaattgagtactgactgtataccaggtactttatgcttaccccccataagcttcgcaagagccctatgaagtaggtgttattattagtatgaccagtttacagatgtggaaactgaggcacattgatgttaagtaatttgcccatcgtcacacattcagaacataggaagtgacagctttgggatttgaactaaggcagccttacttcagaactccagtttacatagagggtagatacagaaatatgaattcatcacccagtacataataatttgggcatgctaatccagaaatttctccatcataacgtcagcaccatgtttacattgtgggcagtggattttgttttagcaaaatatgatttatcacattaaagtaatgtcattcgcttaattttttgttggcattacattttaaaatgtgtttctttttagagctataaatgatctaaaatatataacctaattttatgtttttgcatatttgcttaatattataataaaatattattttaatcaacaatggaagtcttaaaaaaattttgtccttagagtttaagtaaaaaaaaccataatggtatagtttttttaagaaaaaaaatttttctggaagaaagaggatctttgttttttttcttagctccctgagaattaaccagacttctgtttgtagagaggaattagtgtatgacttaacaggactgttctcatttgacctaaaaagactgtatttgagggactttctgagacctgttcaaaggcttcagctgcctgggtaactgagcaatgtagaagcagaattccagttttgaattgcttcccaaggcaggctttatttagttctgggagagagggaatgcactgtgattcttaaagaaactcggtgtgattttgcattgcgataacagatttgcaagacatccagcacttttccatgggcattttcttagaggaaaaaaaaaaaaaaacagtagattgcgatgatctgttctgtttcccgaaggttgcagaagatgttaaaaaccggagcacctagatgacagactgtgaagttgaccagggatctttgtattgccccattatttatccattcctattcctaaccgacttagtccaagcgtgtgccttactttttggtgcgggggtcaggagtcatagctgttactataggcctataagaactttgtaagggtagaatacaaaatgaacatcattttcataggcttttaggttgactccttggtgacaatgaaaaggtttaatctgagctcacaaaattgctcctagacactattataaagttttaccactcttataagttctgctttgaattccagtttgccctgtgaaataatgggaaatcattaaatatgtcctgaatgaattaacaaatgatactttcattcctgtctgatactttccaatattattttggaatattatttgacaggggagtatatacttttctattttgaccctttactgtcagatatttcatgccttgaaaaaccctaattccgagctggaattcttcatggcatgtgaataagataacagaaaaaaaaattacatgtcttaacagtaaccacatttgttaataagatgtctgggttaagcacttttatttttttatcataaatcatggtcatcttatctccaacccagttgctaaaagcaaaagcacaagtgagttgttccttgctggtttttcacagtaagacttaaacagttaatcagttgcaaagggaagaggaaaatctgaaagaaaagttggagctcctagttattgccttttgctgtgataaggtattaaagactagtgataacaaaggcagagtgatgatacccaacatctgcaagattgggataataaaactgctactctgataagattaagtgcaaattcacaaaaagcatgtaattttttaaaaaccagtaaacacatatagagtgcttagtacattccagacattccctgtcttaaggtgttctcacagtttaaactcatttaattcctacagtgattcaatgaggcaggtcattgaatgatgaggtcatcatcatttattcctctttgatagatgaggacaactgaaccatagggaaatgaatgtgcctgaattcatcagctagtaagtgacagagccaggacttgaacctaggtggtcttgctccagagctcacactcttgactatgaggctaacactgcttctcaaaagatggcagcaaatgtatgaaatgttgattatcctcaaatatcattgatgacctagctctcacaatctatgctttgaaaaaaaattgaaacacttttattgtgataaagtctttcttattatccttaatcccaaggggttagaaaggattcaggcaataatgccagtaaattacctttaactttctgtttggaatttaccatttaaatgtggagagacaatcattatctatacattttagcagctactattcactgtaagtgcacacagaaaagctcacataataagtcagataaaaaactggcatcagacagagagaaaagcaaaataacttaaaagggacctagagtttgtgcatgcactttttgctacattattgattaggtcattgtttcattcacgttttcttctgttaaagatcagctacagcaatagctataaagaatttcggacattaaggtaataatttttatggtacttttattctagaaagactacaaaaagtttccaagagatagactgaaatcttgagtattaaggtctcttcacgtttcagaatatagaaaatttccattcatctttaactagtccctgaacaaatataattttgtttgggacacataatttaattcacagaaaaaacaatgtgaagatgtagatgccattaaaaaatcacccaaataataaacattgtaaataaggcaggtatttcattatattagagaaaaaatgaattcattttatatggttattagtttcacagtaacagcgttgagataaatgtaattctatgtagatatttactttcgatttgcaagatggctgagaacatcaaccaaacattttgctgcagtggctaaaagaaaataaatcattgatagtggttattgcttgtaggagtatttgttaggcaaataaacttttaattacaaattttttaccgatatcataatctcattacatttcttaaaacttttagattagtcatggttgcctggcactctttaaaggaggcaattttcaatttgtagttaataaataggagactcactaatcaatttcaaacttgaaatatacttaaaagaaaacatttgattgccaaactttcaatgtactttttcagtgatttaacttttctcttgtagaaccaataacatatttggtataataataagaatgttacaaattaaatacttaacttgagcacatttatttactttcatagtatcaattttgtgtcctgtaacataacttacacatcaaattaacatgaaagtgacatggaatttgtgtgctcaatatttttttctaaatgtataaaatgaattagaaacaaattaaagaatataaaattcaatgtcttcttcttaaacaccttgtttatttccttaggaatctagtatttctcatgagaaatatcatatcatctggaataggttagcgtgacattaaaagctaaaaatatgtaatcctcagaacaattttctctcagttcaggaatggtcagttgtaatagccttgtcaacgtctctccatttacacttttcaggataattttctatgtattctgtttattcctgaagtcctgagttttttgcatcctacaaagttggatagtcctttaaaattttttgaacacattctgcattttctcatttaatgcccttaagttgaataatggagctatacttagttttgttttgaaaatgtcctagttagagcgaaatgtctttacaatgactatgactgaatggctcaacattttaaactgtgaacaacttatcagcttacctaattagttgtattgcaattcaatatttatatttccttaatatttttccctttagttgtcttccaaaaatctgaagttatttgataattttatacataaataaaataatctttctgatttctgtttagattgtaacagttataaaaacatataacacaatacattagtgtattaatgtattcagtcacaaggagttaatttttcaactcttgcaggaaaaaaatgaagaatttttaatatcaaatgctaacttttcaaattctagcctttagtaaatagaatatttctgtttttataagtggcacaagaactttgcaaattctcaagatgcagagaaacatttctggaaaagattgatttggaaggtatttttgaagagcctactccttaattaagtgccaacatagtgactacagaactctgaaatttggtctagaattacgtcccatgtgagctaatgtcatgctttctattttacaggtttgtcaaaggattaatctaagcacaactagcatttccaaggttgaatttaaaaggagtaggctattttacacatatctaagtgtggagcttgaatttgtctgagcagtcattcatgttttttaatgtgtagtgtaagaacaaagaaaggaaacatttgaatgaacaactgattagccattatcttagtaattttttgatatggaaaattttagtatatggcaatatgaaaccagctaagttgttagcataaagaaagcataagaggtgatctaaaaatcaacataaaaattgtccaagttcttctcaaattttcaatttaatggtgcttatcccccctccattaaataatttctaggaaattcttttcctagcgtttcgacagcctataattttttaaagagtttgcctattagtgtattacatttattgatatttgttaagcaccttaatttcatcttcatcaacctgaaacatcctctgcatttcacataatctctactgtaagaaaagtgtatattatatacacatacatgttgcctctatttccttaaggacgccaaagtcaaaacatggatgtgtaaattaatttctctcaacataggtagggacactcatcaatccttttatctcttgaatttgttttcatattccgttctgcattattttatgtttttatatgaagtcttatgtcataggcaaatcatattgtgtctaaaagtttagttttgtaggattgtaaatgatcagtatgagctcttccttccttgatatacagtcatggattgcattcctactggcatgacctgaccttgttcatttcactttggggatagtctatgaattttccagagttgaattaaacatttatctctctcctaggaaaataactttgtttccatttaagcatcaaagcttaaaattagcctttagtttcagaagatctgtatttaatatgttctttgcaaatttttttgtaggatcaggaaaaataaaaacagaaaaggttaagaaatgaacaccacgttcattcatctttagacactttgaaacgagaaaaatctccaatcaagagattatttgatatttttaacacataaacttgtactgaatttaatttaataataaacaatttttttgtttgtttgtttgagagagagagaatatgtatttagatatagaaggggaaatctcattggagcaacagaactgttttttacaaaaaatttttgaacaaaatttattacaaaataaattcttatttgttgtgtaatttttggcattggtggtctgagtcactccttacaattactttaaaaagtaatctattggatgtttaagataagcatctttataattttaagggactgtagattcagataaaatactataactcatcctataaattatgaagttgtttgaagtgatggccatggcaaaaataactggtagccttatcatcatcatcatcatttttctttatgactgcatagtactcaccttgtagcactatgaaagtttttataggtcctcttgaattggaggcattttttacaaatcctccatagttagataaatacacagcagctgtaaaacctataagggctgaatatatctgccgagaaaaattctacgcttttttccttggggctgcaacagagtctaatgaattttggaagttaaaaaagcagaaagtcattctaagccttatctgtggcctggaagcgcccccgtatgtccaggatctagaatgtacagcaaatgaaatcttgtttgagtatgaaaccagcaacggtggctttagtcttggacaaatcagcaacagaaagggctttaacttgctgctgccccatttgttgtaccccaaagacagagaaccagtaatccttgttttctttccagccccctcaaaatctgttttctggaaggcagttggtaggctaataaacattagcctataatgttatgacgtattatattatattatatataatttgctgagatttaatacgctgcttcctctcagaaatttgcatgttcattatagacaatgatgtaaaaagaggggcttctgaagtgtgaaatttctgggatcactaggtcggtccagaagggccagggttaggtgaggagagaggctgaatcatgcaagtgcaggctctaattcagtttttattaaaatttttgatatttccctcatcatgatttctctgtgttaattttttacttttgaaaagattgcatcaaaatgttatttatcttaattactaagtttttggacacctccttaaattctgcacgctaccctcctacccccaagttcagtgccttacttgcttcaccctagtccttgcccattctggaggaagtgatcttttcttggagtggtggaagggaggtatccaccattcccagtattctagatatcacactgcaaagttgccacccagtccaccttcccagctgaacttggtgaccaccaataaatagtttcaccatgtctatcacaagtacgctgtgcagggcaactgaactggaaacttgccaccagtccagtgatgttgggaaggtttaatgggttcatgtaacgagggaggaggaggtccatgggttcaaagatcataaaataataaagtcatataatatttttgaattactctaataaaaaataaaagacctgccgtattgcaatgatatctgtagccctggaatgatatctcattttgcatagctaaatgtgcagtagtcattatttttaacatttcaattcgctggctttttctggtaggatgaaatagatgtaaccaggttggagatgatatgtcctaaaaagcatagggtttaatattgacttcccggagagacaaatgagggcttctggtgcgtgcctcagttgccttgggtgagagctgaaggctcagtactcccaagcctggagtgtgatgaggtttcagccttcaaaggtcaacatctgaggctgctgaaatgcagtatttggagtgcttttgaggcttatgacagggaagaagaatagttgtgttcagcaaccctgaggattcataggcagtgctgttttgagttgaacttataatgtgttttgatggagtttgttttccttctgtagatcagtttcctggttttaacaaaataggaaacctaaatagggaagctcttaattgcagctgggcaagaagacaggactacagagaggataatctggataaataccaaaagtttaaattcacttataactttgcttttatatatgaaaatagatcctcatctaaagtaggcttttcatttcatttcagtatgactgagacatcttcatcattgtgtttatgaggcattaaaatcttgagggggaggtgcctaataaattcatttaagagctgcctagaactcattgtggaagaaacctggctacaaataattagccagtctcatagttgattcatgcttgattaacaatggtgatggcagccgtacatactctttatttttctacttccacaaaagtcagagaaaaggaataaactcaccctatattaggagataactttctgtcatgtttataaaaagcattaggatatattagaaattagactatgataaatgttgcttttcttgatatctttttcatgggaaatattatgtttgtgtgtttaaagattttcccctcgatacatagggttttaaaacggatttcattaatgactttctaaccttgagtatgctgaaattggatagaaattcagctaaaacccttgcattttatttaataagaccttcaaattcatattttaaaattaagaaaattatttgttttaaaacatattagctgccagacaaacacataaataacagtaactggcataattggagtgtcttcttttaaatgtatcatttaagcagcattattaggcaacacttctgtctaggaagagcaaagtcaaaactcctagagttaatatgtgtaatgaagaaacgttcattaaccttgtaatatcttgcaagtgtccagaaggttgcaaaagtgtttatacagaaaccccccatttgtctttttatttttctatatttaaactttccattattcaacaccgatttgttttttgttttcaagatggagtcttgctttgtctttcaggttgcagtgcagtggtgtgacctcggctcattgcaacttccgcatcccaggttcaagtgattctcctacctcagcctcccaagtagctggaattacaggtgcatgccaacatgcctggctaatttttgtatttttagtagaaacagggtttcaacatgttgcccaggctggtcttgaactcctgttctcaagtgatctgccctccttggccttccaaagtgctgggattacaggcgtgagataccgagcccagccatgatgtttaagatgaatagacaacatttaaaaatgaaattttatctttctcaatatatttaagtactaatatcgaaattacaatacttctttttatgacactttcctttttggggcttatcttccattaggtaggttcatgtgatctagccttggaaactagccaccatttttaacaccactactatgggaagatgaagcaaacttttggtacataacatttgcattaggaatgactatttgttataaagaatcatgaaccccaggatagtcaggttttctcactgaagtatcaaaatgagctcagtttaaggccattttccccatgagatggtaccatggttggtcggacctagatgacgtggcttgagtgtattaaattctgtttcattaaccatcaaaatacagcagagcaattgatagataaaacagttttaaaatagctcagagaaacaggggagtagggcaataatcagaattttaaaagtcaacattaccaatgagattaactttaatcatgttaggctagatgtccaattgatttataaaatgcaatgactcacttaaggtgttaattcagtatgtcaaatggattaagctggcctgagatcctgggagtcataaaggaaactatgttgttgttttttttttaatttttattttattactattatactttaagttttagggtacatgtgcacaatgtgcaggttagttacatatatatacatgggccatgcaggtgtgctgcacccattaactcgtcatttagcattaggtatatctcctaatgatatggaaactatgttttgaacaagtttagttttgtgaactttgcttgccttttgttttaaataattgaaagtgttagttagtaaaaggcgaaagatttattcggtctgaagagaaaccagtgaatagaaaggggggaaaggtggggaaaagattgagaaatcggatggttgccgtgtctgtgtagaaagaagtagacatgggagacttttcattttgttctgcactaagaaaaattcttctgccttgggatcctgttgatctgtgaccttacccccaaccctgtgctctctgaaacatgtgctgtgtccactcagggttaaatggattaagggcggtgcaagatgtgctttgttaaacagatgcttgaaggcagcatgctcgttaagagtcatcaccaatccctaatctcaagtaatcagggacacaaacactgcggaaggccgcagggtcctctgcctaggaaaaccagagacctttgttcacttgtttatctgctgaccttccctccactattgtcccatgaccctgccaaatccccctctgtgagaaacacccaagaattatcaataaaaaaataaatttaaaaaaaaaaaaaaaagaaagtgttagttagaaatatctctgtttattagccattattaatgatgagtcattgtctttacctcatatacatattgggcattgatatatttgagttatgatgaattatagtatcgaccccaaatgagactagggagacacaatttttgatttttagtaacacagattaatttggtattggtcatctataggttgattggaaagcaagagtcaactgtatgttatctataagaaatacactttaagatacagatagggtaaaaaatacaagatggaagaagacatatcatgcagacacttctaagaaagctagagtggctatattagcaccagacaaatagattttaaataaagaatataaccaggaataaaaaagaggcttcacataatagtatagggagcaattaatcaaaaagacatcacaattctaaatgtgtatgtggcaaataacagaacttcaaaatacacagaggaaaaactgacagaaatgaagcagtaagcaaacacagttgtagttggaaacctcaacatttgctttttgacaattgatagaagaaattgacagaaagtcaccaagtatatagaagacctgaacaacactgtcagccaacttgatttaattgacatttgtggaacatttcatccctccaaaaaatttatattattttcaaccacacataaatttttatcaagataaaccatatgctgggcaagaaagcaagtttctgtaaatttaaaaagcttgatttcatacacagtatgttatctgactactatgaaattaaattagacattagtagtagaaaattatctgaaaaacctctccatatttgaaaattaagcaacacagttctaaatgacccagggagggaaaaacccacattgttttgtaacctgctgtatttacttaacagtatgttttaacgtgttaatgattctgttgtatagaggtaccataatttacttagctgattcacagaggctgcccattgaggttgtttcttagtttttgcttttgtaaacaaacgttgctataaatgttgtttatactgttgactcctttcttgattatttatttaggaaaaattcttaggagtcaacccttttttttttttgccagagtctcacacactctgtcacccaggctggagtgcagtggcacgatcacagttcattgtaatctccaccttccaggctcaagtgatcctctcatctcagccccctgtgtagctgggactccaggcacatgccaccatacctggctaattttttttttttttttttttgtagagacagggtagggttttgccatgttgctcaggctggtctggaactcctgagctcaaggcatcttcctgcctcagcctcccaaagtgttaggattacaggcatgagccactgctcccagccaagtcaactattttgaccaatttctgatctaagtgtctttgatacatattgccaaatactcctttggaaattgtaccagtttcctctctcagcggcagtttattaacattcctgtttccctgtatcccgaataacactaaacattatctgtttagatgtaaggtgtgagggagcaatctaactagttagccagttcactaactgcatttcaggaaataccattttcatttgaaagaacgattgacagacaaactatggttcctcatacttcggtatttcacagatatgttcttgaaattaaaaaaagtgagtgtgtcacttcaaggaaaacaactgacagtatttattagcaatgataaaatttaacctttcaagtaaaaattagtattctgaagaacttgtttctcccatcttgagcccatatttctgtattttcctaagagtggttgggatattaatgaatttgatttgttgatgttgcatattgaaatgcatcaatatttgaaatagctgcatagctcaaagaatcaatattttccaatttattggtattcataacataggtttccctgattctcaggccttagaattcagactggaattataccactggctttcctggttcttcaacttgcaggcagcagatcatggtgcttctcagcctctacaatggcatgagccaattcctcataataaatctctttatatctatatctatatattggttctgtttctctagagagccctgattaatgcaaccaaggttattacaaaatcatacgtaggtaaaagtttcatttaaagtgcaagatgggcaaatgatttttaatatttcagaatatggagagcttattggtatggtttcagattctgcattgcaactaaccatacagaaatgatcttttattgtgttttggtatattttaccaatgaagaatattgacaattgtctgaaaagtctattaaaaaactcctcccctttccaactgcaaatctgtgtgaggccacatttttttcatacacttcagacttcaatcaaaacaacatattgaatgcagaagcagataaaagctattttctattaagccagatattaaatagatttccaaaaatgtaaaacaatgacactttctcacaaatttttttctttgtaaatatgatcatttctcttaaaatatgtttatgctaacatgtattgggtttattatatctaaagaatttaaaaaatattttaaattaccttaatttaatttctaataaggtaaatacctacaagaacagaaaatcttgggtgtttttagtcatttttgtgtgtaaagagagttctgatacctgaaaagtttgagaaacctgaaaaagatgctctatactgaagcatctttgtgccaaccatctactgtgaacgagatccagttggtataatcttatacatgtactgggtcagggcaaagttctgtgaagtgtcaagatgatcaagatccctgtagactatattatcacagaaagcaggacaattaactttaccctgaaacaagctatgtaaagataaactggttttgatccttgcttttggctattgatatgttttcatcacattgacaaacacattcaaagtgacagggtctgtgttgattgttcctgtaaagatgcagcattcaacatggcagccatggtttgggctatcatctagttatgtttatgttagtccatcattatctgtcaccatccatctcgtttttacagaggtcagataggtgaattgaatgaggctataacaaggctcaccactcttttttattttttttttaatactttaagttttagggtacatgtgcacaatgtgcaagttagttacatatgtatacatgtgccatgctggtgcaatgcacccactaactcgtcatctagcattaggtatatctcccaatgctatcccgcccccctccccacaccccacaacaggccccagagtgtgatgttccccttcctgtgtccatgtgttctcattgttcaattcccacctatgagtgagaatatgcggtgtttggttttttgttcttgcgatagtttactgagaatgatggtttccaatttcatccatgtccctacaaaggacatgaactcatcattttttatggctgcatagtattccatggtgtatatgtgccacattttcttaatccagtctatcattgttggacatttgggttggttccaagtctttgctattgtgaatagtgccacaataaacatacgtgtgcatgtgtctttatagcagcatgatttatagtcctttgggtatatacccagtaatgggatggctgggtcaaatggtatttctagttctagatccctgaggaatcgccacactgacttccacaatggttgaactagtttacagtcccaccaacagtgtaaaagtgttcctatttctccacatcctctccagcacctgttgtttcctgaccttttaatgattgccattctaactggtgtgagatggtatctcattgcggttttgatttgcatttctctgatggccagtgatggtgagcattttttcatgtgttttttggctgcataaatgtcttcttttgagaagtgtctgttcatgtccttcgcccacttttggatggggttgtttgtttttttcttgtaaatttgtttgagttcattgtagattctggatattagccctttgtcagatgagtaggttgcgaaaattttctcccattttgtaggttgcctgttcactctgatggtagtttcttttgctgtgtggaagctctttagtttaattagatcccatttgtcaattttggcttttgttgccactgcttttggtgttttagatatgaagtccttgcccatgcctatgtcctgaatggtaatgcctaggttttcttctagggtttttatggttttaggtgtaacgtttaagtctttaatccatcttgaattgatttttctataaggtgtaaggaagggatccagtttcagctttctacatatggctagccagttttcccagcaccatttattaaatagggaatcctttccccattgcttgtttttctcaggtttgtcaaagatcagatagttgtagatatgcggcgttatttctgagggctctgttctgttcaattgatctatatctctgttttggtaccagtaccgtgctgttttggttactgtagccttgtagtatagtttgaagtcaggtagtgtgatgcctccagctttgttcttttggcttaggattgacttggcgatgcgggctctgttttggttccatatgaactttaaagtagtttttccaattctgtgaagaaagtcattggtagcttgatggggatggcattgaatcggtaaattaccttgggcagtatggccattttcacgatattgattcttcctacccatgagcatggaatgttcttccatttgtttgtatcctcttttatttccttgagcagtggtttgtagttccccttgaagaggtccttcacatcccttgtaagttgcattcctaggtattttattctctttgaagcaactgtgaatgggagttcactcatgatttggctctctgtctgtctgttgttggtgtataagaatgcttgtgatttctgtacattgattttgtatcctgagactttgctgaagttgtttatcagcttaaggagattttgggctgagacaatggggttttctagatatacaatcatgtcgtctgcaaacagggacaatttgacttcctcttttcctaattgaataccctttatttccttctcctgcctaatcgccctggccagaacttccaacactatgttgaataggagtggtgagagagggcatccctgtcttgtgccagttttcatagggaatgcttccagtttttgcccattcagtatgatattggctgtgggtttgtcatagatagctcttattattttgaaatacgtcccatcaatacctaatttattgagagtttttagcatgaagcgttgttgaattttgtcaaaggccttttgtgcatctattgagataatcatgtggtttttgtctttggttctgtttatatgctggattacatttattgatttgtgtatattgaaccagctttgcatcccagggatgaagcccacttgatcatggtggataagctttttgatatgctgctggattcggtttgccagtattttattgaggatttttgcatcaatgttcatcaaggaggttggtctaaaattctcttttttggttgtgtctctgcccggctttggtatcaggatggtgatggcctcataaaatgagttagggaggattccctctttttctattgattggaatagtttcagaaggaatggtaccagttcctccttgtacctctggtagaattcggctgtgaatccatctggtcctggactcttttggttggtaagctgttgattattgccacaatttcagagcctgttattggtctattcagagattcaacttcttcctggtttagtcttgggagggtgtatgtgtcgaggaatttatccatttcttctagattttctagtttatttgcgtagaggtgtttgtagtattctctgatggtagtttgtatttctgtgggatcggtggtgatatcccctttatcattttttattgtgtctatttgattcttctctctttttttctttattagtcttgctagcagtctatcaattttgttgatcctttcaaaaaaccagctcctggattcattaattttttgaagggctttttgtgtctctattccttcagttctgctctgattttagttatttcttgccttctgctagcttttgaatgtgtttgctcttgcttttctagttcttttaattgtgatgttagagtgtcaattttggatctttcctcctttctcttgtgggcatttagtgctataaatttccctctacacactgctttgaatgtgtcccagagattctggtatgttgtgtctttgttctcgttggtttcaaagaacatctttatttctgccttcatttcgttatgcacccagtagtcattcaggagcaggttgttcagtttccatgtagttgagcggttttgagtgagattcttaatcctgagttctagtttgattgcactgtgttctgagagatagtttgttataatttctgttcttttacatttgctgaggagagctttacttccaagtatgtggtcaattttggaataggtgtggtgtggtgctgaaaaaaatgtatattctgttgatttggggtggagagttctgtagatatctattaggtctgcttggtgcagagctgagttcaattcctggatatccttgttgcctttctgtcttgttgatctgtctaatgttgacagtggggtgtcaaagtctcccattattattttgtgggagtctaagtctctttgtaggtcactcaggacttgctttatgaatctgggtgctcctgtattgggtgcatatatatttaggatagttagctcttcttgttgaattgatccctttaccattatgtaatggccttctttgtctcttttgatctttgttggtttaaagtctgttttatcagagactaggattgcaacccctgcctttttttgttttccatttgcatggtagatcttcctccatccttttattttgagcctatgtgtgtctctgcatgtgagatgggtttcctgaatacagcacactgatgggtcttgactctttatccaatttgccagtctgtgtcttttaattggagcatttagtctatttacatttaaagttaatattgttatgtgtgaatttgatcctgtcattatgatgtttgctggttattttgctcgttagttgatgcagtttcttcctagccttgatggtctttacgttttggcatgattttgcagtggctggtaccggttgttcctttccatgtttagcgcttccttcaggagctcttttagggcaggcctggtggtgacaaaatctctcagcatttgcttgtctgtgttttatttctccttcacttatgaagcttagtttggctggatatgaaattctgggttgaaaattcttttctttaagaatgttgaatattggcccccactctcttctggcttgtagagtttctgccgagagatccactgttagtctgatgggcttccctttgagggtaaccctttctctttggctgcccttaacattttttccttcatttcaactttggtgaatctgacaattatgtgtcttggagttgctcttctcaaggagtatctttgtggcgttctctgtatttcctgaatctgaatgttggcctgccttcctagattggggaagttctcctggattatatcctgcagagtgttttccaacttggttccattctccctgtcactttcaggtacaccaatcagacgtagatttggtcttttcacatagtcccatatttcttggaggctttgctcgtttctttttattctttttttctctaaacttcccttctggcttcatttcattcatttgatcttccatcactgataccctttcttccagttgatcgcattggctcctgaggcttctgcattcttcacgtagctctcgagccttggttttcagctccatcagctcctttaagcacttctctgtattggttattctagttatacattcttctaaattttttttcaaagttttcaacttctttgcctttggtttgaatgtcctcccatagctcggagtaatttggtcgtctgaagccttcttctctcaactcgtcaaagtcattctccatccagctttgttccattgctggtgaggagctgtgttcatttagaggaggagaggcgctctgctttttagagtttccagtttttctgttctgttttttccccatctttgtggtttttatctacttttggtctttgatgatggtgatgtacagatgggtttttggtgtggatgtcctttctgtttgttagttttccttctaacagacaggaccctcagctgcaggtctgttggagtgccccgccgccgtgtgaggtgtcagtctgcccctgctgggaggtgcctcccagttaggctgctggagggtcagggatcagggacccacttgaagaggcagtctgcctgttctcagatctccagctgcctgctgggagaaccactgctctcttcaaagctgtcagacagggacatttaagtctgcagaggttactgctgtctttttgtttgtctgtgccctgccccccagaggtggagcctacagaggcaggcaggcctccttgagctgtggtgggctccacccagttcgagcttcctggctgctttgtttacctaatcaatcctgggtaatggcgggcgcccctcccccagcctcgctgccgccttgcagtttgatctcagactgctgtgctagcaatcagcgagactccgtgggcataggaccctccgagccaggtgtgggatataatctcctagtgcgccgttttttaagcccgtcggaaaagcgcagtattcggttgggagtgacccgattttccaggtgccgtctgtcacccctttctttgactaggaaagggaactccctgaccccttgcgcttcccgagtgaggcaatgcctcgccctgctttggctcgcacatggtgcacgcacccactgacctgcgcccactgtctggcactccctagtgagatccacccagtacctcagatggaaatgcagaaatcacccgtcttctgcattgctcatgctgggagctgtagacgaagctgttcctattcggccatcttcaaggctcaccactcttgcatccttcaggttttcgatggtgaggataatcttggctgtccctccaataattcaatatagcttctgatttgctgcctttcagtttcaggagctctcatgttgttcttcctgccataataactcttactctctaggtgagggaaccagtgtgaggattctgccagctgaaaattgcatagtcccagtggagtcactgtgagacagacttgggccagaactccatttattacctggcttccattaagtctatgttttttttggttgtgtgtgtgtgtgtgtgtgtgtgtgtgtgtgtgtgtgtgtttgagatggagtctcactctgttgcccaggctggagtgcagtggtgcgatctcagctcactgcaacccccccacctcgggttcaagcgattctcctgcctcagcctcctgagtagctggaactacaggcacgtgccaccacatctggctaattttttgtatttttagtagagacagggtttcagcgtgttagtcaggctggtctcgatctcctgaccttgtgatccaccctccttggcctcccaaagtgctgggattacaggcgtgagctaccgagcccagccccataagcctatgttataaccagaggaccatagtgcccaaagcagctggtagcaaaaacagctgagatcctgtgtacacttgtccttaaaaaaattctggcctttccactttgtttggaagtttgtagttactctgtcaaatgattgcaagtcttcttgggggaaggatggaaagaatatttagaacatatctgtgcagtggttacagggttgatcctcaaagggacccgtctttgtcctcaatcagtgggctctgggcctgtgaagagatttagatcaggacactggatgagcaactgtgatatttcattgtgagcaactgctatgagccttcaggttatcatctcttcatttttttcctattatataaccagaaattatccagtgtcttaggagctgtccatcaatcttgcccctaagaatactgtgatctgttactttcactctaaatccctatgtcttatggaacttgactgctgctctgagcttgctgaccattaaggtacaattatatctatcttgcttcagtagttaagtgctgctacctgggatctgctattctgaaatttcatcttctttatggatactagggaatcttatttcatatcagtatgtcctaccaccaattctggcttgcagagtcactgctgaacttctcaccagtatactccttactgtcttagcaagggaagtgtcttttgggttctcaagagaatgtggaaatatggtaggttctcaggttttaaatgacatttctacctctccaaggcttctaatctctctatttcagtgcccaagaaattctcacatttcaacttcatttactgtcagctattgtcaaattcagtctttgaagagccattccagcaagctctcaggaacaactattgttccttgctggagctttgaatcctgaagaacagatgagtggtcccatatcagagaattatccctgaaccacatttatattcttcttacccagccccctcttctccagtataacaccctcaatatccacttctgtatatgttcctcttatttctgctgatgcattttaatccaaggatcagttatttccacaataattctacataatgaaccaccaaaaaacctcagtgatatacaataataaacatgtatttttgacaacatgattatggctggctgagcagttctgcttatctgggctcactgggggcttgttcatgcactgagagtcagcagcaagtgagtgctgactctcagtgctgatggctttgctgatcttagctgggctctctcacatatctggggacttagttgcttggctgtggtccacatagcacctcatcctccagcaagccatcctaggattattctcctggcaaaggagaggtgcaagagtagaagtatggatgttgaggcctaggctcagaactggcacatgtcacttatgctgcattctgttggccaaaacaaggcatgagacaagcccagattcaacggctgtgggagtagaccacacttcatgatgtgagggtcctcaaagtcacatgcaaaggatgtagatacagggaaagtggagaatgaaggccaatttggcaatcaatcattttatatcctctagccagaattatttacatcttatccacatgcaagacacattctcaccctttcaaggttcttcaaggtcttatacaaccatagtatcaggttcaaaatccgggatgttatgatcaatatcaggtctatagtggtttcttggatgcatctccttttggtctgaagcccttagaataaaaagacatgttatcttcccctacatacccaatgtgcaatggtgaataggaacaaaacaaccacaataaagattcccattcaataagaggaggcacatagcagccactgtttcatgacagttctgaaatcccaatggagaaatgtttacaggttctcttggagtgaagagtgtgtcttgatttggccttgcttctgctctttggagtggttcctggctgtaccctctggcccttgattctgcactctgagacatccttacttttcaatatcacttggtcaattctaatgagggcaatggaaattatgtccttgatttccctaattggtctgaggcttctttctgtctgggggagaaggaatattcaacttctggcataataatgatatttctaaattcttttatatctctgcttaatttgtcaaggcccaggctcctagaattaatgtattataaagaagagacactttccccctatgatcattggcttagctataatgataatagaggacattcaggttctgggggctgtggaaagagggaagggaagagagcaaggaaggggttagacctgtgggtttttattcatcctttctggatgatgctctggaacggagaggtgtgtaagataagctaaagggaacaccagtaaatgagggggttccttcctcactctctgaaagaagaaagtctcaagggctgctcctacatcaaactttggaaaggcaatgtcagcttagtagctcagtgttgtgagacagaggagcagccttaagtcgtagctttctggagatgcccttgcttatagaggcatgaattggacccaaatgtagctgaggtgtgctggggacttgggctagaggggcttagtgtaccagggcaaggggttctgtagaaatgaactgcagggtagatggttcaggctaggacagagtgggagtcacagctagacctccagagggactgtagtggtagggagcatgtaggtgtgactaaatcatgaagggaaggtgaccctggcttccagggagcagtgcctgatgctaaactaatggaatgattatgagttcatctgttgcaaatgccagcattgtgtccaacagggcttctggcaactgcgcagaagacaaatctccctggaggtgagaggacgtggagaacatcatgccttagttctctgattctttctctctgtcaccatgctctgtgagccatacttcttcacgatgttgccttggagaagaaaggtggggatggtatggaagactaaaatctgagtgactagtcagtttttcctaaagagattgacatttacttaaagtgtttttaaatcttatggacattaagttattttattcccattaactagtagaagaggagttagaaggaaagtgcgaattacataaaaaaatgatgcttactaacagttactgacacttactatgtatgaggaatgtgccagacttaatcacagtaaccctctgcagtagttattatggctgtccctattttgcttatgaggaaattaaggcacagaaaggctaggaaatttcccccaaggcacatagctatggaatgatagaaccagaattcaaaaccaggcagtttgaaactcgagcctatgttcttaaatatttcctttgcacaatcaaattgtagaatgagataaatttgcaattccacttcatagatgatcagtaagtatttttgggataaatgaatggtgtgctgagtactggaggtggtagtagggatgtgtgtgtggacattacaatgaaccccaattactaccttcctgggtcttaaagtagggatgaactttaactgtgaatagtgaattcagccttccttaatatatataacttatattttgattgtatgtaaataatttagccttacaaccaaggtattgccaaagcaaatactgagggtaataagagaaagactcgttgaccttaagtgtgagactccagtataataacaacccataaaagctgctgaattggaattacccaggagatagggctgtcagccaatttactcagcttaaagtgttccctaaaaacaattctccagggaaggaggggtcaacctgggacaccgaggtggaagggactgataaaaaagacatactttatgtgtgtgtgtgttttttttttttttttttggttcaaagactctcaaatactttcaaagagcaatctatacgtgaacagcttcctgcataaaacccatataacagctgagcctatttgaagagggtccaagttttcttttgtatttattggagattggaggaatgaagtttgcaaacccaacctttgctccttaggatcactcatttcaggcacatgttcagcagtggaaagtttgtgatttcttggagacctcctcaaggcctctgctcctaggagcacatggcagtgtaggatagcaggactccagccgaaaaccatggcgtgagaactttgagacacatgcacaagcttcaatagccaattccatcaagtaaaagaaagggtatcagtgattgacgatcaaattaatgaaataaagtgagaagataaggttagagaaaaaagagcaaaaagaaacgaacaaagcctccaagaaatatgggactatgtgaaaagactaaatctacatttgattggtgtacatgaaagtgatggagagaatggaaccaagctggaaaacactcttcaggatattatccaggagaactttcccaacctagcgaggcagcccaagattcaaattcaggaaatacagagaacaccacaaagatattcctcaagaagagcaaccccaagacacataattgtcagattcaccaaggttgaaatgaaggaaaaattgttaagggcagccagagagaaaggttgagttacctacaaagggaagcccatcagactaacagctgatctctcggcagaaactctacaagccagaagagagtgggggccaatattcaacattcttaaagaaaagaattttcaacccagaatttcatatccagccaaactaagcttcataagtgaaggagaaataaaatcctttacagacaagcaaatgctgagaaattttgttaccaccaggcctgtcttacaagagctcctgaaggaagaactaaacatggaaagaaacaacaggtaccagccacagcaaaaaacatgccaaattgtaaagaccatcagtactatgaagaaactgcatcaattaatgagcaaagtacccagcaaacatcataatgacaggatcaaattcacacataacaatattaaccttaaacgtaaatgggctaaatgcccccaattaaaagacacagacaggcaaattggataaagagtcaagacccatcagtgtgctgtattcaggaaacccatctcaagtgcaaagacacacataggctcaaaataaagggatggaggaagatctaccaagcaaatggaaagcaaaagaaggcagaggttgtaatcctagtctctgatcaaacaggctttaaaccaacaaagatcaaaagagacaaagaaggccattacataatggtaaagggatcaattcatcaagaggagctaactatcctaaatatatattcacccaatacaggagcacccagattcataaagccagtccttagagacctacaaagagacttagactctcacacgataataatgggagactttaacaccccaccgtcaatattagacacatcaatgagacagaaatttaacaaggatatccaggacctgaactcagctctgcaacaagcagaactaatagacatctacagaactctccaccccaactcatcagaatacacattcttctcagcaccacattgcacttattctgaaattgaccacataattggaagtaaagcactcctcagcaaatgtaaaagaaaagaaatcacaacaaactgtctctcagaccacagtgcaatcaaattagaaccatgattaagaaactcactcaaaaccacacaactacatggaaactgaacaacttgctcatgaatgactactgggtaaataacgaaatgaaggcagaactaaagatgttctttgaaaccagtgagaacaaaaacacaatgtaccagaatctctggggcacatttaaagcagtgtgtagagggaaatttatagcactaaatgcccacaagagaaagcaggaaagacctaaagtcaacaccctagcatcacaattaaaagaactaaagaagcaagagcaaacacattcaaaagctagcagaaggcaagaaataactaagatcagagcagagcgtaaagagatagagacagaaaaaacccttcaaaaaaatcaatgaatccaggagctggtgttttgaaaagatcaacaaaattgatagactgctggcaagactaataaagaagaaaagaaagaagaaacaaatagacgcaatagaaaatgataaaggggatatcaccaccaatcccacagaaatacaaactaccatcagagaatataataaacacctctacacaaataaactagaaaatctagaagaaatggataaattccttgacacatacatcctcccaagactaaaccaggaagaagttgaatctctgaatagaccaataacaggctctgaaattgaggcaagaatcaatagcttaccaaccaaaaaaagtccaggaccagatggattcgcagccaaattctactagaggtagaaagaggagctagtaccattccttctgaaactattccaatcaatagaaaaagagggaatcctccctaactcattttatgaggccaacatcatcctgataccaaagcctggcagagacactacaaaaaaagagaagtttacaccaatatccctgatgaacattgatgcaaaaatcctcaagaaaatactgacaaactgaatccagcagcacatcaaaaagcttacccaccacgatcaagtcagcttcatccctgggttgcaaggctggttcaacatatgcaaatcaataaacgtaatccatcacataaacagaaccaacaacaaaaacctcatgattatctcaatagatgcagaaaaggcctttgacaaaattcaacagcccttcatgataaaaactctcaataaactaggtatcgatggaacatatctcaaaataataagagctatttatgaaaaacccacagccaatatcatactgaatgagcaaaaactggaagcattccctttgaaaaccagcacaaggcaaggatgccctctctcacgactcctattcaacatagtgttggaagttctggccagggcaatcaggcaagagaaagaaataaagggtattcaattaggaaatgaagaagtcaaactgtccctgcttgcagatgacatgattgtatatttagaaaaccccatcgtctcagtcccaaatctccttaagctgataagcaacttcagcaaagtctcaggatacaaaatcaatgtgcaaaaatcacaagcattccaatacacgattaacagacaaacagaaagccaaatcctgagtgaactcccattcacaattgctagaaagagaataaaatacctaggaatccaacttacaagggacaggaaggacctcttcaaggagaactacaaactctgctcaaaaaaataagaggacacaaacaaatggaagaatgttccatgctcttggataggaagaatccatattgtgcaaatggccatactgcccaaagttatttatagattcaatgctatccccatcaagctaccaatgactttcttcacagaattggaaaaaactactttaaagttcatatggaaccaaaaaaaagcctgcattgccaagtcaatcctaagccaaaagaacaaagctggaggcatcacactacctgacttcaaactatactacaaggctacggtaaccaaaacagcatggtactggtaccaaaacagagatatagaccaatggaacagaacagaggcctcagaaataatgtcacacatctacaaccatctgatctttgacaaaactgacaaaaacaagaaatggggaaaggatatcctatttaataaatggtgctgggaaaactggctagccatatatagaaagctgaaattggatcccttccttacaccttatacaaaaattaactgaagatggattaaagacttaaatgttaggcctaaaaccataaaaaccctggaagaaaatctaggcaataccattcaggacataggcatggccaaggacttcatgactaaaacaccaaaagcgataacaacaaaagccaaaatacacaaatgggatctaattaaactaaagagcttcttcacagcaaaagaaactatcatcagagtgaacaggcaacctacagaatatgagaaaatttttgcaacctacccgtctgacaaggggctaatattcagaatctacaaataactcaaacaaatttacaagaaagaaacaaacccatcataacatgcgcaaaggatatgaacagacacttctcaaaagaatacatttacatagccaacagacacgtgaaaaaatgctcatcatcactggtcatcagagaaatgcaaatcaaaaccataatgagatatcatctcacaccagttagaatagcaatcattaaaaaagtcaagaaacaacagatgctggaggggatgtggcgaaacaggaatgttttacactgttgatgggaggtaaattggttcaaccattgtggaagacagtgtggcgattcctcaaggatctagaactagaattaccatttgacccagcaataccattactgggaatatacccaaaagattataaatcatgctactataaagacacatgcagacatatgtttaatggggcactattcacaatagcaaagacttggaaccaacccaaatgtccatcaatgatagactggattaagaaaatgtggcacatatataccatggaatactatgcagccataaaaatggatgagttcatgtcctttgcagggacatggataaagctggaaaccatcattctaagaaaactatcacaaggacagaaaaccaaacactgtgtgttctcactcataggtgggaattgaacaatgagatcccttggacacagggtggggaacatcacaccctggggcttgtttgggggtagtgggggctggggagaaatacataatgtaaataatgagttgatgggtgcaggtaaccaacatggcacatgtatgcctatgtatcaaacctgcacgttgtgcacatgtaccctagaacttaaagtatatatatatatgatataaggagggggtcctgtttcagttttctgcatatgggtagccagttttcccagcactatttattaaatagggaatcctttccccattgcttgttcttgtcaggtttgtcaaagatcagatggttgtagatgtgtggtgttatttctgaggcctctgttctgttccattggtctatatatcagttttggtaccagtgtcatgctattttggttacggtagccttgtagtatagtttgaagtcaggtagcgtgatgcctccagctttgttctttttgcttaggatagtcttggctatatgggctctttgttggttccatatgacatttaaagtagttttttttttctaattctgtgaagaaagttcatggtagcttgatggggatagcattgaatctataaattactttgggcagtatgaccatttgcacgatattgattcttcctatccatgagcatggaatttttttccgtttgtttgtgtcctctcttagttccttgagcagtggtttgtagttctccttgaagaggtccttcctttcccttgtaagttggattcctaggtattttattgtctttgtagcaattatgaatgggagttcactcatgatttggctctctattattggtgttttggaatgcttgtgatttttgcacattgattttatattctgagactttccagttttatttatttaatttcttcccatcacttctttcttccacactctcctcaccccttaacattaatttttccaatcccatcaacactcaagaggatgtaacttaacaaacaaacaaagaaacccatgcattacttaccattatgaatgtttttggtctgcttctgaaagtatagagaaaaaatatgcattgcctctaaataaaaaacaaaaatataaagttgatccaaggtctgagtatgagtttttattttaatagtgttttggaaacaggtggtttttggttacatgggtaagttttttagcggtgatatctgagattttggcgctccccatcacccaagcagtgtatactgtaccaaatgtgtagtcttttatccctcatccacccttcacccttcccccgagtccccaaagtccattatatcattcttattcttttgtgtccttatagcttagctcccacttacaagtgagaacatacgatgtttggttttacattcctgggttgctttacttagaataagtctctgactgcatccaggttgctgcaaatgccattatgtcatttctttttatgactgagtagttttccatggtgtgtatatgtatactatatatgtgtatatatatatatatatatatatatatatatatatatatatatatatatatcacattttctttatctactcattggttgatggggatttaggctggttccatatttgtgcaattgtgaattgtgctgctataaacatgcatgtccatgtgtctttttcatatgacttcttttcctctgggtagatactcagtagtgggattgctggatcatatggtagttctactttttgttcttcaaggaatctgcatactgttttccatagtgattatattagtttacattcttaccagcagtgtaaaagtgttcctttttcaccacatccacaccaacatctattattttttgatttttaaattatggccattcttgcaggagtaaggtggtatctcaatgtgattttaatttgcatttccctgataattggtgatggtgagcattttttcttattttactgtccacttgtatatcttcttttgagaatcgtctattcatgtcatttgcccactttttgataagattattatttttttaatgctgatttgtttgagttccttataggttatagacattagtcctttgtcgggtgcatagtttgttaatattttctcccagtctgtgggttgtctgtttactctgctgattatttcttttgctgtgcagaagctttttagtttaattaggtcccatctatttatttgtttttgttgcatttgctgtctggttcttgatcataaattctttgcctaagccagtgtctacaagagtttttctggtattaccttccagaatttttatggtttcaggttttagatttaagtttttgatccatcttgagttgatttttgtataaggtgagagatgaggatacagttttattcttttacatgtggcttgccaattatcccagtaccatttgttgtataggatgttctttccccactatatgcttttgtttgctttgttgaagatcagttggttgtacgtatttggctttatttctgggttttctattctgttccattagtctacattcttatttttaatacccttgtagtatagtttgaagtgggataatgtgatgcccccagatttgtgctttttgcttagtcttgctttggctatgtaggctcttactttttgttccataggaattttatgattttttttctagttctgtgaagaatgatgatggtattttgatgggaattgcactgaatctgcagatcgctttaggcagtatagtcattttcacaatactgattctacccatccatgaatgtggtatgtgtttccatttgtttgtgtcgcctatgatttatttcagcagcattttgtagttttccttgcagagatgtttcacctccttggttaggtatattcccaaatattttattttattttcacagctgttgtaaaggggattgagttcttgatttgattctcagcttggttgctgttggtatgtagcagtgctactgatttgtgtacactgagattttatattctgaaacttttctgaattcatttatcagacccaggagctgtttgcacaaggctttagagttttctagatatgtaatcataacatctgtgaacagcgacagtttgacatcctcttaaccgatttggatgccctttatttcttcctcttgtctgtttgctctggctaggacttccagttttatgttgaatagaagtagtgaaagtgggcgttcttgttttgttctagttctcagggagaatgctttcaactttttcccattcaatataatgttggctatggatttgtaatagatggcttttattaccttgaggtatgtcccttgtttgtcaattttgctgtggattttaatcgtaaaaggatgctggattttgtcaaatgctttttttgtgtctattgagatgaccatatgatttttaaattctgcttatgtgatgtatcacatttattgacttgcatatgtaaaaccatacctgcgtccctggtatgaaacccacttgatcatggtggatattcttttcaatatgctgttggattcagttagctaatattttgttgaggatttttgcatctatgttcatgcaggatattagtctgtagttttctttttctgttatgtcgtttcctggctttggtattagggtgatactcattgcatagaatgatttagggaggattcactctttctctatcttttggaatagtttgattaagattggtactaattctttgaatgcctgatagaattcagctgtgaatccatctggtcctggactcttttatttgttggcaattttaaaaattactgtttcaatcttgctacatgttattggtctgttcagagtttttatttcttcctgactagtctaggagggttgtatatttccaggaatttatccatctcctctagattttctagtttgtgcatatgaaggtttacatagtagcattgaatgatcttttgggtttctgtgatattggttgtaatatctccctttttatttctagttgagcttatttggaacttctctcttctttttttggttaatctcattaatggtctatcaattttgtttatcttttcaaggaaccaggtttggtttcatttatcttttgtatttttgtttgtttcaatttcattcagttctgttctgacctttgttatttcttttcttctgctggatttgggtttggtttgttcttgttgctctagttccttgaggtgtgaccttagattgtatgtttgtgctctttcagactttttgctgtagatatttaatgctatgaactttcctcttagcaccatctttgctgtatcccagaggttttgtatcactattatcattcagttcaaagaattctttaatttccatcttaatttcattgttgacacaacgatcattccagagctgattatttaattttcatgtatttgtatagttttgagggttccttttggagctaatttcctgttttattccattgtggtctcagaggacacttgatataattttgatgtattgagactcgtgacctatcatatggtctatcttggaggatgtttcatgtgttgatgaaaagaatgtaaattctgaagttgttgggtagaatgttctgtaaatatctgctaagtccatttgttctagggtatagtttaagtccattgtttcttttttgactttctattttgatgacctgtctagtgctgtctgtggagtattgaagtctcctagtattattgtattgccgtctatctcatttcttaggtccagtagtaattgttttatacatttgggacctctagtgttagatcatatatatatttaagattgtgatattttcctgttggactaatccttttattagtatataaagtctctctttgtattttttttaactgttgttgttttaaagtctattttgtctgatataagaatagcttcttctgcctgcttttcatttccatttgcgtggaatatctttttcacccctttatcttaagtttgtgtgaggtcttatgtgttaggtgagcctcttgaagacagcagatacttgttggatttttatccattctgccattctgtatcttttaagtgggcatttaagccatttacattcaacattggtgttgagatgtgaggtactgttctattcatcatgctagttgttgcctaaatacctttctttaaattttcattctgttattgttttataggccatgtgagagttatgctttaaagaggttctgttttggtgcactttaagatttcatttcaagatttagaaatccttttaacatttcttatagtgctagcttggacgtggcaaaatctctcaatatttgtttgtctgaaaaagatcttatctgtgcttcatttatgaagcttagtttcactggatacaaaattcttggctgacagttattttgtttgaggaggctaaagatagaatccgaatcccttctggcttataaggtttctgctgagaaatctatcattaatctgataggttttcccttataggttacctgatgcttttgtctcacagctcttaagattctttcctccatcttgacattagataacctgtgcctagctgatgatctttttgcaatgaatttcccaggtgttctttgagcttcttgtatttggatgtctaggtcctagcaaggctggggaagttttcctcaattattccctcaaaaattttcccaaacttttagatttctctttttccttaggaacaccaattattagctttgaccatttaatataatcccaaatttcttggaggctttgattattttcaaaaagtcttttttctttgtctttgtctgattgggttaatttgaaagcctagtcttcgagttctgaagttctttcttctacttgttctagtctatttttaaacctttccagtgcattttgtatttctctaagtgtgtctttcatttccagaaattgtgattgttttttctttatgatatctatttctgtggagaatttttcatccacatcctctattgttttttaaagtttatttaaggtgtttttcacctttctctggtatctctatgaatagcttaataatcaagcatctgaattctttttctagcaattcaaagatttcttcttggtttggatttatttctggggagctagtgtgatctttcaggggtgttatagaaccctattttgtcatattagcagaattacttttctggttccttctcatttgggtagactatttcagtggaaaagtctggaacccaaggccttctgttcagattcttttgccccacgagctgatcccttaatgtgatactctcttccttcccccagggatgaggcttcctgaaagccagacagcagtgattgttactgctcttctgggtctagctaccaggctttgggctggtgctggggaatgtctgcaaagagtcctgtgatgttatccatcttcaggtttcccagctatgcataccagcacctgctctgctgtgggtggtaggggagtaaagtagactctgaaagtccttggttgtagatatgtttatatctgtgtgctggctttctctaatgctggttatgctactagtgaagtcatgtggacacactcaggaccactgttagccagggtgttgcaggcattgaacttagtcattgttttcttcttcgtgggagtagggttattctgtcatgagtcgctataatggccaaagttcgttggcctccagccaggaggtggcactttcaagagaacaccagcttcaatagtagtagagggatctaagtttgccctaagttggccagggcaagtattttgttttctcaggtgatgggtggggccataaacctcccaagagtttatgtcttatgtgtttggctaccagggcaggtagagaaataccatcaggtgggggcaggcttagatgggtctgggctcaggctctccttgggtggggcttgccatgaccactgtcagggatgggggtgtggttctcaggccaatggagttatgctccagaggggattatagctgcctctgctgtgtcatatagttttccagaaaactaggagatagctggtagttaaagacttcacccagctgccacacagttggtgggtggtcttgctcctgcagtgccctgctcagaccttgttccaggccttaagtttctctgctgagaaagcaagcatggctttcaggtcttgtccctccctgtctgcccacaatttcggcagcagctcctgtgcttgtatatgcagcagtttctgttcacacctcggattctgctcgagaaaatttgtgcccagtcaaaattattacaaatttcatttggaagcttatttcaccctgtgacctccccaccgcccagttcagctggctgtcttccccaaggacctccatgagttatagtcagggatggcttccttgggctcaggctggagactgggagtgcctacagggctcttcctgctgctgcttctacttttagattttgtgcaggcccctaaatccatttcagcactagataaggttaagtccttatcctgtgatctggattttcagattcccccatggggatgtatgtttggaggaaggttttcccctctcacactttgggaacttacagttttttgcctgtctcatgaaatttgctgtagcatgccgcttccttcaaaggatccatgaattctttcagttttcctggtgcattcctgtggtggttcttggagcaaaacgatgtgagtctccacacactgttctgttggtccaagtgggagctgcacattagccctgtctcttatttgccatcttcctcctaatcctcctgagcataacttttgtgtgatctattttttttagtcttggtcttaatttgaggcatcaagtttattttattttgttaatacttggaaaacttgggtattgaagtaccttataagtaatagtgttgcttgcaaggtctggctagtatttcagttctaaactgaatagttctgagttctatagtgaataattctattcactatagaaacctgagtgcagggaaaaagaaaaaaaaatgaaagaaagaaactaatttgggactggagtcagaaaatctggaattggaacttagcattgccaaatcagagtgacaacagcagcaaacactggttgagcacttactatatgtcaagtgccatttttctaattttctcagactgactagctgtatgattgtgggaaagtcccataatctttctgaaatctagttgtaaactaaaataatactgtgtacccatcttatttcataaggttgttatgtgactcaaatgagatattaagtaacacaaatagagctaaaatttacagttcccttattatgtatcaggtatggttttaactgctttacatgcattaattcatttatttttaaaaactatcctacaagttagacagttttattttatagacaagggaactgagggaagaagactgtaagtatctttcccagggttaaatagctagcaatgcattcagagcatgcatttgaatgaaatgatatgttaagatgatttgaatatatacaacatttcttatttttcttttttattttattttattttattattattatactttaagttttagggtacatgtgtacaatgtgcaggttagttacatatgtatacatgtgccatgctggtgtgctgcacccattaacttgtcatttagcattaggtatatctcctaatgctatccctctcccctcaccccaccccacaacagtccccagagtgtgatgttccccttcccgtgtccatgtgttctcattgttcaattcccacctatgagtgagaatatgcggtgtttggttttttgtacttgcgatagtttactgagaatgatggtttccaatttcatccatgtccctacaaaggacatgaactcatcattttttatggctgcatagtattccatggtgtatatgtgccacattttcttaatccagtctatcattgttggacatttgggttggtcccaagtctttgctattgtgaatagtgccgcaataaacatacgtgtgcatgtgtctttatagcagcatgatttatagtcctttgggtatatacccagtaatgggatggctgggtcaaatggtatttctagttctagatccctgaggaatcgccacactaacttccacaatggttgaactagtttacagtcccaccaacagtgtaaaagtgttcctatttctccacatcctctccagcacctgttgtttcctgactttttaatgattgccattctaactggtgtgagatggtatctcattgcggttttgatttgcatttctctgatggccagtgatggtaagcattttttcatgtgttttttggctgcataaatgtaaaatgccttcttttgagaagtgtccattcatgtcctttgcccactttttgatggagttgtttgattttttcttgtaaatttgtttgagttcattgtagattctggatattagccctttgtcagatgagtaggttgcgaaaattttctcccattttgtaggttgcctgttcaatctgatggtagtttcttttgctgtgcagaagctctttagtttaattagatcccatttgtcaattttggcttttgttgccattgcttttggtgttttagacatgaagcccttgcccatgcctatgtcctgaatggtaatgcctatgtcctgaatggttttcttctagggtttttatggttttaggtctaacgtttaagtctttaacccatcttgaaataatttttgtataaggtgtaaggaagggatccagtttcagctttctacatatggctagccagttttcccagcaccatttattaaatagggaatcctttccccattgcttgtttttgtcaggtttgtcaaaaatcagatagttgtagatatgcggcattatttctgagggctctgttctgttccattgatctatatctctgttttggtaccagtatcgtgctgttttggttactgtagccttgtagtatagtttgaagtcaggtagtgtgatgcctccagctttgttcttttggcttaggattgacttggtgatgcaggctcttttttggttccatatgaactttaaagtagttttttccaattctgtgaagaaagtcattggtagcttgatggggatggcattgaatctataaattaccttgggcagtatggccattttcatgatactgattcttcctacccatgagcatggaatgttcttccatttgtttgtatcctcttttatttcattgagcagtggtttgtagttctccttgaagaggtccttcacgtcccttgtaagttggattcctaggtattttattctctttgtagcaattgtgaatgggagttcactcatgatctgcctatctgtttgtctattattggtgtataagaatgcttgtgatttttgtacattgattttgtatcctgagactttgctgaagttgcttatcagcttaaggagattttgggctgagacaatggggttttctagatatacaatcatgtcatctacaaacagggaccatttgacttcctcttttcctaattgaataccctttatttccttctcctgactaatcgccctggccagaacttccaacactatgtttgaacaggagtggtgagagagggcatccctgtcttgtgccagttttcaaagggaatgcttccagtttttgcccattcagtatgatattggctgtgggtttgtcatagatagctcttactattttgagatacgtcccatcactacctaatttattgagagtttttagcatgaagggctgctgaattttgttaaaggccttttctgcatctattgagataatcatgtggtttttgtctttggttctgtttatatgctggattacatttattgatttgtgtatattgaaccagctttgcatcccagggatgaagcccacttgatcatggtggataagctttttgatgtgctgctggattcggtttaccagtattttattgaggatttttgcatcaatgttcatcaaggatgttggtctaaaattctcttttttggttgtgtctctgcccggctttggtatcaggatgatgctggcctcataaaatgagttagggaggattccctctttttctattgattggaatagtttcagaaggaatggtaccagttcctctttgtacctctggtagaattcggctgtgaatccatctggtcctggactctttttggttggtaagctaatgattattgccacaatttcagagcctgttattggtctattcagagattcaacttcttcctggtttagtcttgggagggtgtatgtgtcaaggaatttatccatttcttctagattttctagtttatttgcatagaggtgtttgtaatattctctgatggtagtttgtatttctgtgggatcggtggtgatatcccctttatcattttttattgtgtcagtttgattcttctctctttttttctttattagtctggctagcggtctatcaattttgttgatcctttcaaaaaaccagctcctggagtcattaattttttgaagggttttttgtgtctctatttccttcagttctgctctgattttagttatttcttgccttctgctagcttttgaatgtgtttgctcttgcttttccagttcttttaattgtgatgttagggtgtcaattttggatctttcctggtttctcttgtgggcatttagtgctatacatttccctctacacactgctttgaatgtgtcccagagattctggtatgttgtgtctttgttctcattggtttcaaagaacatctttatttctgccttcatttcgttatttacccggtagtcattcaggagcaggttgttcagtttccatgtagttgagcggttttgagtgagtttcttaatcctgagttctagtttgattgcactgtgttctgagagatagtttgttataatttctgatcttttacatttgatgaggagagctttacttccaagtatgtggtcaattttggaataggtgtggtgtggtgctgaaaaaaatgtatattctgttgatttggggtggagaactctgtagatgtctattcggtccacttggtgcagagctgagttcaattcctgggtatccttgttaactttctgtctcgttgatctgtctaatgttgacagtggggtgtcaaagtctcccattattaaggtgtgggagtctaagtctctttgtaggtcactcaggacttgctttatgaatctgggtgctcctgtattgggtgcatatatatttaggatagttagctcttcttgttgaattgatccctttaccattatgtaatggccttctttgtctcttttgatctttgttggtttaaagtctgttttatcagagactaggattgcaacccctgcctttttttgtttttcatttgcttggtagatcttcctccatccttttattttgagcctatgtgtgtctctgcacgtgagatgggtttcctgaatacagcacactgatgggtcttgactctttatccaatttgccagtctgtgtcttttaattggagcatttagtccacttacaatttaaagttaatattgttatgtgtgaatttgatcctgtcattatgatgttagttggttattttgctcgttagttgatgcagtttcttcctagccttgatggtctttacaatttggcatgattttgcagtggctggtaccggttgttcctttccatgtttagtgcttccttcaggagctcttttagggcaggcctggtggtgacaaaatctctcagcatctgcttatctgtaaagtattttatttccccttcacttatgaagcttagtttggctggatatgaaattctgagttgaaaattcttttctttaagaatgttgaatattggcccccactctcttctgggttgtagagtttctgccgagagatccactgttagtctgatgggcttccctttgtgggtaacccgacctttctctctggctgcccttaacattttttccttcatttcaactttggtgaatctgacaattatgtgtcttggagttgctcttcttgaggaatatctttgtggcattctctgtatttcctgaatttgaatgttggcatgccttcctagattggggaagttctcctggataatatcctgaagggtgttttccaacttgattccattctccccgtcactttcaggtacaccaatcagatgtaggtttggtcttttcacatagtcccatattccttggaggctttgctcgtttctttttattcttttttctctaaacttcccttctcgcttcatttcattcatttcatcttccatcactgataccctttcttccagttgatcgcattggctcctgaggcttctgcattcttcatgtagctctcgagccttggctttcagctccatcagctcctttaagcacttctctgtattggttattctagttatacattcgtctaaatttttttcaaagttttcaacttctttgcctttggtttgaatttcctcccgtagctcggagtggtttgatcatctgaagccttcttctctcagctcatcaaagtcattctccatctagctttgttccgttgctggtgaggagctgcattcctttggaggaggagaggcgctctgccttttagagtttccagtttttctgctctgttttttccccatctttgtgattttatctacttttgttctttgatgatggtgacgtacagatgggtttttggtgtagatgtcctttctgtttgttagttttccttctaacagacaggaccctcagctgcaggtctgttggagtttgctagaggtccactccagaccgtgtgtgcctgggtaccagcagcggtggctgcagaacagcgggttttcgtgaactgtgaatgctgctgtctgatcattcctctggcagttttgtctcagaggagtacccggccgtgtgaggtgtcagtctgcccctactgcggggtgcctcccagttaggctgctcaagggtcaggggtcagggacccacttgaggaggcagtctgcccgttctcagatctccagctgcgtgctgggagaaccactgctctcttcaaagctgtcagacagggacatttaaggctgcagaggttactgctgtctttttgtttgtctgtgccctgcccccagaggtgtagcctagagatgcaggcaggcctccttgagctgtggtgggctccacccagttcgagcttcccgctgctttgtttacctaatcaatcctgggcaatggcgggcgcccctccctcagcctcgctgccggcttgcagtttgatctcagactgctgtgctagcaatcagcgagattccgtgggcatagaaccctccaagccaggtgcgggatataatctcgtggtgctccattttttaagcctgtcggaaaagcgcggtattagggtgggagtgacccgattttccaggtgccgtctgtcacccctttctttgactaggaaagggaactccctgaccccttgcgctacccgagcgaggcaatgcctcgccctgcttcgtctcgcgcacggtgtgctgcacccactgtcctgcgcccactgtctggcactccctagtgagatgaacccggtacctcagatggaaatgcagaaatcacccgtcttctgtgtcgctcaagctgggagctgtagacgggagctgttcctattcagccatcttggcgccacccccccaacatttcttatttttcaacagaaagatctcaaattctgtagactgggaagtctagcatccttaggaacataccaagaatttgcattcagtagtgccgaaggaacagcagctccgtgacagttcaactcataagtggctcctctttcctttctcttactgttaggttcctataattcactctacgtcaatacattatggatttaatgtcaattagagagccttcaaagagcaaagtgacctgaacactttgcaatgagatgcacttgaaaatacaaatgaaaaaatgacaaaatacactgttacatcaaaaataaatgctatgcactagatttttcccctctctacctccaacttgtccttgttcctgtaagaagtcaagatgtggctatgttaaaaaatgggtggatgggtgaacagatatggagccaacactatctcttatacacagaggaagcagtgaaggaacctttcaccttgattttaagcctgacaaacaaaggccaatttggttgtaaggaaaagatgaagtcttaggagaaaatgaccttgcctttcattttcgaccttataataaccattctgaaaagttgtaaaagggaatcccatgttgattaagatagtgaatggaccaaatgacttcattggtttaagtgaggtacaccctgtcctcaccttaaattcagggtgggaaaggccggactgtcatcttactcttttctaatcatccatttagtggatgttattgttcgatgatttgttcgatgttattgctgtttaccatgggggctgtaaaagatgaagccattttagtgtaggtcaccagagcacacactctggagcctactgcttagatatgaatctcagctcaagtccatgtatgagctgagtgactctgggcaagttactcaacctcagtttactcctctataatatgggcataataacaattcctccttcatagctttattgtgaaggttaaatagttaacattatgtaaagtgattagaacagtgcttcataataataattatgttgatattaacttattaaaaattaatattacttaaattattgttattattgttatgcattttattacttgtctatagactctggaaactcaaggcctttctgtcttttcacgcttgaacaggtcactgtcttctacatcctatcctttagttttctatcaaattaacttttccaattaatgtctttcatcattgttttttttcggctcacactgtggactgacctcacactgaatagacaataactcaaacactctttgattaccactcaaggctctccatagactggcctcaactgtattctccaaactttttagtagggaagatgaagtcgctttggtttctcagtccattttcagagacagcagcaccatctactggacgatctttattctaagtaactgagcattcacattctcgactgttagaacttgaaagagcgagaaagcagaggtggatgttggtgttgtctttggttcatttgttctaagatcacattccaaggctgaatacatgaaagaccatgaaagagttaagggaatgccaggtacagtatttcatgttgaaagactttgaaatcatgattttagaatgtaaagggaacttagaagacaatggtaaagcagcaacagttagagtaacgctgtatgtttatgtatcgctgaaaagtttttaaagaactctcacatgatttgaccctcaaagtagccctgaaaaatagacaacacagatcttattatctccattttaaatgaaaggagagttaggcaaaggaaggctaaattaggtgctttaggtttcacaccaggaattgtgactcagtgttgtggactttccattacactatacttacctgctccggactctcattctatagatgggaaaactgactcctgaagaatctaagcaacatctctcaaatccaatggtaagttgtagtagtatcagaacaagagtctcctgattaacaattggcactcattgacaattctacttcttcactttcttataaaatttgtataaatttaaagggtataggtgcagtttttttttttaacatggatatattacacaatggtaaagtctcagcttttagtgtaaccatcacccaaataacctacgtcatgcccatcaagtaattaatttctcattcctcacccctcccacctctccacccttttgagtctccagtgactattattgcacactctacgtccatgtgtacatgttatttagcacccacttttaagtgagaacatgcggtatttggctttgtttctgagatgtttttacttacggtaatgacctctaggtccatccatgttgcagcaaaagatgtgatttcgttctcttttatggcagtgtatattcttttgtgtatatatgctacattttctttatccaatcctctgtcgatggacacttaagttgaattcatgtctttgctattatgccccactttgccctaaccccaataatgacaacaccatcagtgaaaaatagagaggtgatgatgaaactctcattggaattattgctctgaattgtgaacataggcaggtgaagcatgaaaaggtgaagcatgaaaataaattgattctgatacctgccattggtacagtcactccagggtagagcctggtcctgagattgaagaaagaggctgggtaagatggctcatgcctgtaatcccagcacttcgggaggctgaagtgggaggactacttgaacccaggagttggagaccagtttgggcaacatagcgagaccacatctctacaaaaaataaaaaaattagccaggcagggtggcgcatgtctgtagtcccagctactcgggattctgaagtggaaggatcacctgagtccaagaagttgaggccccagtgggctgtgattgtgcccctgcactcagccagggtatcagagcaagaccctgcttcctgaaaccaccctcccgaccacagccccccaaaagaaggaggtggtgagaggaagggactgtaccttgaacctcagatggactctccagattttcccaggcttggctctgagccacattctcaggacaccaggttaaggaggccacttgagcagggctactccacagctaccttctgacctctggctctgggcaggtccttgcctctttctgcaggaaatggggcaggtcgctatgggggctgtgggtttttacaacacatcctttgccaggtctaagaccttttcctgagcagctctcacagtttgagctctggcactaaacacactggtggagtgagaatgtcttatttcctggtctcaattcctacttttgggagttttaatgaagatttgatcattctctaagggctgaatcctggcacaagagtttcctggaaatataaaaatgtcacctgggcttgcttgcacttaggtaacccttgctggtacaactttgaaagaaaccaggagacccttttagttaaatatttaaaacgatttaattgtcaagccttcacaaactctattggttcttttgcagttgattaaattttctaggaccacactttctagagcaatcattgtttcataaaaccaatttaaaaatgagtgttcagctagattccaaatttagcactatgtacattcaccaaatttctgtcattgccaggaattactggactcctttttcttgttgggtggacagctggagttttcaaattacactgtatagtttgctctgccttttttttttttaatctaagaagaaaactttttctttttcttgctgcataaacagtagtggtttcaaatgtcaaaatctgaactctagatccttgcatgaagcttacttcccatgctacctgtgtcctgtgtccttcaagatggtgtgttgaagtgaagcgaggacacacagtggaggaagctgtggacataaggttaagatgttacccaagatacaggtcaagctgaaagaggatggggtaagcgagaaaagatggttagaaggtaaatttgttggttgggcgctgtggctcacgcctgtaatcccagcactttgggatgccaaggcgggcagatcacgaggccaggagatcaagaccatcccggccaacaggtgaaaccccatctctacaaaaatacaaaaaaattatctgagcattgtggcatgtgcctgcagtcccagctacttgggaggctgaggcaggggaatcgcttgaacctgggaggcagaggttgcagtgagaagagattgcgccactgcactccagcctggcgacagagcaagactccgtctcaagaagaaaaaaaaaaagaaggtaaatttctaaatttctttcctcctatttgtcatatcttctcctaggacaccaaaagggcctcaggtagaaaaagttcagagattataaactgagcacaattgatgaggtcaattgactatagaaacaatgcaaagcagcatcattcatctggggtaatacccgaggttcagtgtcccacgccaaagaaatcaaagatacggacacacgagcagtgaggttaagagcagaggtttaataggtgaaagaaagagaagagctctctcctgcagagagaggggtcccgagcaggttttctggtccattgtgaaatacatcaggttttatagatgagcttgaggaggtggtattggatttacatagggcacaaaagattggttggaccaggtgtgtcatttgcatagggtgcgaaaaactggttagggctagatgtgccatttgcatagggcatgaaaaagctggccaccccaccctaatcttttattatgcagatgggttctctatctggctgatgccatgttgcctgtttccttactgtacacgtggtgacaaagaaaagggaagatagagcctccatgtggaacatgcctggctctcaggtagccctttcctattggcacagctgccagcattcacctgtgcaagcttctagcttgcttgtatctatgtctgcagctcgatttttcaggcagttgttagaaaagaaacgagtttgaggctgtttttcattaaaagggaaattctgctgaggactctcttacccatactatctgcctaaataacttctttctatctcttgtagcaaatggatttttcagatggagctcttttcctctttggagggagggcttagcctggggaggacagctaggtgccaaagagaaaagaagcacatttaacggaggcacatttgacatccaagaaacactgaaatatggtttaaatctttataaaaatttctataaaatgtgcaaaggaatgattacattgtttgacacagcaaaacattgtaatattcttaatcagtggctcagctatcacaaatctcatcttcaaggcagtttctaagttgaccaggtaatttgtagtccaaatggggacacttttgggtgcaaagagcatgcgatttataatttcactgggcacaggcatacaccaggcctgtccttgcacactcctttttcatctagttctctcaattctggcatgcactgcatcacctatgttcatgtttttctcccaactaactcatctgtgggatttattctgttttcccagaggatctagaatgtaaattactgctttggtccttactgagatcagcacaacaaaaacccagtgggtgttcaagcctcatctctcaccaccatgcctctctcgcttatggtttaaaaggaagtttcttggtctagagccagtgccaccccaggagcaatgagcacgctgaacactcagatcttgctttttctaaagattgtttttcagtgaaaggggccagggctttttggagacatggctgattctagggcaagagtgcgaaaaatacaagatgagcctggagagtcttgtagtgtcaggaaataaggaagtgctcagaaagtaaaagcatgtaggcatgcatgggacagacatactaacctgaaagagctcctgggggccaaaactggaagaatttaaacagtaatttttttttaaatgtagcattgaattataacacaagtataaaataaatgtacataagcctatgttgctatacataaataattgaataatcaaattaatgaaggatgagcaataaattttcattacagaagaatttcagatagtatgtgtgtataatctaccctctcctcactctccaaaagtgtgaactggacatagtgactgatttccagtgagtagatatagaaaggggaaaatagtaactttacagtggagaaaactggcaaacactactttaaccaaaatgatcaagtttaacatcaccagtaataagtcatgttgctaccacactacttcctgttttgctatgatgacgagaggacctcatctctgtggtattcttttccagatcccataatccatgttgaatcatgatgaaaacatatgatgaacctgtattgaggtatattctaaaaattacctgaccagtacttctcagaacttttgaggtcatgaaatacaaggcaagactgaacaactgtgagagtagagtagactaagatgacacgaggacaaaatgcaacatggcatactgccttggatcctggagcagagaaagggccttagtggaaaaagtggtaaaccttaataaagtctggagtgtagttaatagtaatgtaccactgctggttacttagttttgagaacagtgccatggtaatgtaaaatggttatagtgggagaagttgggtaaggggtatatgtgagctctctaccatctttgtaacttttctataaatataaaattattccaaaataaaaagttcattttttttgaaaaaaagaacatagtttccagcttcatccatgtccctgcaaaggacatgaacccgtctttttttatggctgcatagtattccatgttgtatacgtgccacattttctttatccagtctatcatggataggcatttgggttggttccaagtctttgttattgtgaacagtgctgcagtaaacatacgtgtgcatgtgtctttatagtagaatgatttataatcctttgggtatatacccagtaatctgattgctgggtcaaaaggtatttctggtttagatccttgaggaatcgccacactgtcttccacaatggttgaactaatttacactcccaccaacagtgtaaaagcattcctatttctccacatcctctccagcatctgttgtttcctgaccttttaatgatcgccattctaactggcatgtgatggtatctcactgtggttttgaattgcatttctctaatgaccagtgatgatgagctttttttcatatgtttgttggccgcataaatgtcttcttttgagaaatgtctgttcatatccttcacccacttttttatggggttgtttgtttttttcttgtaaattcaattaagttccttgtagattctgaatattagcccattgtcaaatggatagatcgcaaaaattttctctcccattctgtaggttgtctgttcactctgatgatagttacttttgctgtgcagaagctctttagtttaattagatcccatttgtcaatttttgcttttgttgccattgcttttggtgttttagtcatgaagtctttgcccatgcctatgtcctgaatggtattgcccaggttttcttctagggtttttatggttttaggcctatctggggttgggggtaggggagggatagcattaggagaaatacctaatgtagatgacgggttgatgggtgcagcaaaccaccatggcatgtgtgcagctatgtaacaaacctgcacgttctgcacatgtatcccagagcttaaagtataataataataacaataataataataataataaacaggacatagcaactagcttaaagaggttttatttaccaaatctggaccaattttagcataaaattgggattataaaccaataaattcagttaaggtttatgagtttgtactaaggtaaatgaatgaatgggtgaataaataaataaattggagggacaaaaatgtttctccttacattgtattgccaattcataaatgtagaagggacagtgaatttagaaaattatcaatggatgccaaaactagtgattgaaagtttgatgattgaacagttacttgcataaccttaaggtatttacctgcaaaggaagtacgggggagaaagcaggaacgtacttatggttgaagaacattgtcagatgttcataaagaatcaccattaatatgacgaaaaatagacaaactagcgttgtgtgcttctggaaaggaagcactgagggcaccacatctctttcatggtttttctgccctccagaaggcattacctgaatcctaatcatggagaaatatcagaaaaattcagactgggaagccttctccaaaataactggtttatatttttttaaataaatattcaggctaagaaacaaaaaaattggctaaggaatcatttcagattaaacgggaacaaagagccataacagataaatacacgatgtgatatagaactggatcttgcactggggtaggtgggagctattaaaggacattattgggacaatcaattacatatgactatcaactggggattagataatagtatcctatcagtgctaattttcttgattttgataattgtgctgagattatgtaaggccacgtgtttttataaaatacacacacaagtattttatttaaaaaagagatacttcttgctgctttgtggagaaaggactgcagaggagataagaaggaagcaggaagccattaggaggctatttaatactacgagcaagagacaaatgaggcctggtgtggtggcttatgcctgtaatcccagcgctttgggaggctggggcagaaagatccattgaggccaggagttcaagaccagcccaggcaatattgtgagacctagtctctacacacaaaaaataaaaatattagctgggcatggtggcacgccccgtagtcctagctactcaggaagattgcttgagcctggaagtttgaggttgcagtgaactatgattgcaccactgcactccagccgtggtgacagagtgagaccctgctcctaaaaaataaaaaaaaaaattaaaaagatgatgcttttttgtagttggtggtacttgtagaaatggtgagaaaaggctggttctatttggaaagtaaaaccaaaagggtttgctgatggatgggctgtggatgactgggaaaaagagacaaggatttcagcctgagcaactgggagaatggaggcgggaaggggctgtcacttaactgaaaggggaagatcctgagaggagcatattttgggggtgggggaagatcaggatttcagttattacacattgtaactcattgctttctctcaagtgtagctctgataatcccatttccctggctgataatttcatttcttcagtagttgagatgttaccaccaaaggacttggcattcgaggtctttctcagcttggtcccataacactttataaaggcagtatttgctcccctcctcagtgttccttttgtttcagtctaattgaaagacttgtgattgttaacttttttcctgttggtgtttcccaaaatagggtctgtatatagttgttgatctgaataattgctacaaattgtactggcagaaatatttttcttttgatagttacacactgatcttaatgtatattagaaaatgacaacactagttcatcaaacctgtgataacattagtattatcattagtacaaatcttgagtattatcattagtattatcattagtacaaatcttggtaaaatagtggatcggtttaaagtcaatagaaagaaaaatattgtataagatattacaaaataataatatgaaggtggaacatgaaaacctggagctggataaatactgtactgttaggggataattttttaaaatatgtttcattttataaaatttaaatataccaaaaatagagagaataaacctgtcattcagcttagagttgcctcatgtctaggttgaaggtccctctggctcaccagtctattccagcttagtcaaccaggagaacccacaggaattcagtgcccctaagcccctgtttaaaaatgaagggcttttgaatagccaaggcaattctaagcaaaaagaacaaagctggaggcatcacgtcacctgacttcagactacatactacagggctacagtaaccaaaacagcatggtactggtacaaaaacagacacatagaccaatggaacagaatagagagcccagaaataaggctgcacatctaggaccatctgatcttcaacaaggctgacaaaaataaacaataaggagaggactcctactcaataaatagtactgggataactgactagccatatgtggaagattgaaactggaccccttcctcatacataccacatgcaaaaatcaatgcaaggtggattaaagacttcagtgtaagacctcaaactataaaaaccctggaagacaatctaggcaatacaatcctggacacaggaatgggcaaaggtttcatgacaaagatgccaaaagcaatcacaacaaaagcgaaaattgacaaatgggatctaattaaactaaagagcttctgcacagcaaaagaaactatcaattagcagaataaacagcctacagaatgggataaaatatttgcaactacgcgtctgacaaaggtctaatatccagcatctataaggaacttaaagaaatttacaagaaaaaacaaataaccccattaaaaagtgggcaaaagacatgaaaagacacttttctaaagaagacctacatgtggtcaacaaacatatgaaaaacaatatcactgatcattagagaaattcaagtggcaaaaccacaatgagataacatcgcacaccagtcagaatatctattattaaaaagtcaaaaaataacagatgctggtgaggttgtagagaaaagggaacacttacacactgttagtgggagtgtaaattgactcaaccattgtggaaagcagtatggtgattcctcaaagagttaaaaacaaaactactattagacccagcaatcccattactggctatatactcagaggaatataaatcattctaccataaagatacacgcatgtgaatatttattgcggcactgtttaccatagcaaagacatggaatcaacctaaatgcccatcgatgacagattggataatgaaaatgtggtacgtatacaccatagaacactctgcagttatgaaaaacaacaagatcatgtctttcatgtgaacatggttggagctggaggccattatccttagcaaactaacagacacaggaaaccaaatactgcatgttcttacttataagcgggagctaaatgatgagaagtcatgaacacaaagaagagaacagcagatactggggcccacttgagggtggagggtgggagaagggtaggaggtggggggagcagcagaaaaagtaactattgggtactaggcttagtacctgggtgatgaagtaatctgtacaacaaactcccatgacacgagtttacctgcatatcaaacctgtacatgtacacccaaacctaaaagaaagtaaacaaataaaaatgaaaggcttcgaagccaggagtggtggcttacgcccataatcccagcactttgggaggccgaggcaggagaatcctgtgaggccaggtgtttgagaccagcctggacaacatattgagacactgtctctccaaaaaaaaaaattagccaggcatggtggtatgcacctgcagtcccagctactggggaggctgagatggggggattacttgagcctgggagttcaatgatgcagtgagctatgattgagccactgcattccagcctgggtgacagagtgagaccctctctctaaaaataataataataataaataaaaattaaaaaaagaagagccttaaatactcaccaaagaatatgaacttgatcatataataatgggacattacggtgaaattatttgaatagagaaatgacgaaagggttacatttcagtttagaaaggacttagtgatagagtagtatcataacatataatggctgagatggtggttgtaaatctggggtattaatttaaatggcactgattattaagagccatattttgctataatgcaaccatgggtccaatcagaacttaccaggggaaatgctcactacctctttactatggtggacacactggggagaacactgggtgtggagtcaggcagcttcaagctggtaagacaccatatccatattttgctattttctagctatatggccatggggaagtcattctaattcaatgagtttttctttaattttctaagcatggtgttttcttttctttttttttaatttttaatttaattttattattattatactttaagttttagggtacatgtgcacaatgtgcaggttagttacatatgtatacatgtgccaagcatggtgttttctatacacatctattgagataataatagttgttgtaacgatggcaatattctagaagcattctgctctctgcagatgcactactttggtgatttagtattcttttatagtgactccaacccccaactccctgcctcaagcctatgtttttttactttggtgggtgagaagatagagataactgtggggatgtactttatcatcaatgaaagaagggataaataacagaaatttaaacctttgttctgtgagcctcttgcttcaagggaatcagcaggttaccctctgtgggttcctgttatgcatttggaaagaaagaaagcctgatgagggaggggatgacattgttgaagtttctctttttagctggcaaaaataacacatttaaaggtatagcaataattctcctgccatgtttctcacagagaagcagtgggatcttgttgggaatattacgtctttggaaagggagaacttcctcaatcagaggacataaaacagtaatgagaataaacatttggtaaatttaggaaatcaacttcagcttgggaatcccaaaagggagctcgttttgtggggtggaaagatatttttccagggctgacccttagtaaaaggaaacttatgattttaagtttaaaagctccaaaggactaattcaaagtggagaagggaaagttattttcatgagaattcctgctaagacatttgcgtactgtaaaccaattgcctgttggctaataggatttgaagttttgaatctgtgcactttttttcaatttctgtggaatggatgaaagcagggaaagggacttagatagacctaggtgtgaagcgaagcattttcatcttagatcaattactgaaccattcaaactctagcttcctaatcactaaatgaagataataaaatctacacctcggatttgttgtgagaattaaatgagatatctgttaagggttcagcagggtgcctgcatgttgaagtgcttcataaatgggagctattgttgttttcatctgaatcagctggcctctccccacctctctggccttctccctcatgtatttgaaacctactggatgggcctctaatgagcaggctatctttatggttagatgcttctatggggaaagaaatgtaaaaaagcaaatttttaaaaagtaaactaaggagtagcgcatgacatcattcgtaataaaacagagttaaggagtccaactggaaaggtttatgactttgtagtaactttgtgtgtgtgtgtgtgtgaatataccagtgagattagggtgggtcaaagacatttatattttgtagaagggagtgatttcacttttcctttgtgtatgatgtccatgaagctaattatagctgagatttataacagctgatcaatttggtgaaatggaaagacactcaaaagaattaaagagtaaaaatgttattatttagcattctttcatcagataatctttaactgctcctgccaacctggtatatgagagttggtttttccaaaggtaattctgaggcccttgatgataacatttttgttttctattgtgatcagtgaaaatcttacctctccaacaaattgctttgtacttcaggacaaagattgtctcctttacttctttttttttttttttttttttttaatattccatggtgatatggtttggctgtgtccccagccaaatctcaacttgaattgtatttcccagaattcccacatgttgtgggagggaccaaaggagaggtaattgaatcaggggattggtctttcctatgctattctcgtgatagtaagactcatgagatctgatgggtttatcaggggtttctgcttttgcttcttcctcattttctctttccactgccatgtaagaagtgcctttctcctcccaccatgattctgagacctcctcagccatgtggagctgtaagcccaattaaacccctttttgtccccagtttcaggtatgtctttatcagcagcatgaaaatgaactaataatatggtaattagattatttaataattactcatttactttgtcttgtgagtcttgaatgatcaaaactagtttaaaataaggtcatggaacttttagtgttaatccttttttacatgttctttgaacataactatttaaaaattggcaatctgtgtatttactaaccagaacagtccattctcaagtcctgccatgtaacagggagttccctgcgttctttttattgttatggcccatatgagacctgatgagtaaatgggatctgtcctcatacacatcttagcatttggatttacacagattctgaaatgcagaattaatacttaatgttaaattctgatgtcgaaatatgtgcccactgagaattctactgggtttgtttatagaaaataaatattaattttgttaaattgaatgcatttgcatttctttccccaaattaccatcagcttgcttaacaaaagacatgcagaggcaaatccctcagttagtgacttttctattttccctgggatgcttttcatagacgcttgtgtgtgtgtatgcacgtgtgtgtgtgtgtatgtgtgcatgtgcgtgctatttatacatatatataatttttttttgtatcactttacagtgtcacttgaaatgagggagctcttattgatatattccttttggctagttttcattgcattgtctgtataggtgaccgacttgatgggacaattcttcaaacacacacaagatgctatataaggccaaggcttgagtgacttgacttataaagtagaacaagtcacttttacattcaggccattagttacttacatagacagcaaaaggaaaagtagctgaagatactcagctccctgaggtccttatcctacacaccagaaaggaacgacacagaaacaaaagggactggacaatggcaacacaacttaagggattcccctttgctaaggagccaattctaagctacagtacaatggatttatatcctgcatctctgcttttagggaggcagccccaaattcttcatacctcatcagaacctctgaggcaatgagaaacaaccttgtgacagcccccagaagagagagggaggtgggtgggtctcacagcagctcatcacgagcctctcctgagctcatgtttagggaggactgtgagacattcattgaagacatacatgagctgcagtccaagcctttgcctgcatgtcccatccagacacgtgcaaggccaccagggcaccatagtggagccatctcttacaccatccttctgaagcatccatctcctacgatggtcaagtgagatagactacagcaggatctctcactccattttgaagactgacttatcttgcttgcccaaatttcttgtagctgcttgaaatccacagagaagttttcttatgggcagatttcagttactaagatagcttaggcccactccatcacacgttacacttgactccaagaggatgcccaatgtattaagaaagtaaagcactttctgagtgctttggtgcagattttgccgtacaaggctttagttggtgacctcagactagtggttaagaacttagactctgcagttggatggttctgccacttactaggagggtgaacttgagccagatatttaacctctgtaagtctccattctctaatccacagaatgaagacaacagcacaagaaacttgtatgaagcagtgcaggtaacgtgctcagaatggtgtctgaaacagggtaatacccaataaacgtagccctatatgttattgggaatctattggcgctgagctctttactgagcacatggcactggggagaaagacaagggaaaagaaacccaaacattgttaacttaccatatagttgaatgaactgaacatggacagtcataaaatagcctaccgatgaatatcaaccacggtctttgcaaaggagaaatcagtagtcataaaattcatcctttggttgaactatgtttgattacagttctaagttggcccagtgacttgtggataaaggcagagagcagtgggtcactccgtaaaggccaccaccagagtgctgtccatagagtctctttgtataatggtcttggccaggcattgctcgcttacctccattttcctttcacagtccagcctgaggaatgcctgctcaactggtttgatcattttgactgaaacaagcggtcatttcatgtcctatgggatgcttgctgaggacattaaacacaggtgtgtggggatagggggtgaaagcacagctattttccaattaggagccccttggttccctgaaatccaatcacatggagtgaaccagacgcccctgtctggagctctgtgttcaactcaggatccaactctcagtggaaaattaaaaacaaagtcattattatatattagatttattaaaaatgcaactattaccaagagcctgtgggcatgtgtggaaaatgctgtaattaaattaaattaaattaaagccagcagttagaagtaacattttccactaaggaggaggaggaggaagaaaaaaataagcccatcagagaattccaaaccagaaaagtgcaagaagtggccaggattcttctaggagaaggaagatgtcataactgttattattattattattgctgccctgagataatggaaaagtaatatataaatttggaacaaggttggaactttccaggcattgggaaaagatgtttatttggaagaaggtgaataacattaaaaccagaaatggaatggctactattatagacagaaagtttatttgtagtgattatctagagtcattattccaatagtgactatcaaatcagtgggaaagcagtgctctttcaatgttgccaaggtcatggaagggtaaaattgtctgttggcagttgcagctgtcatactttgttgctagaagaattgggttgtgttaagatgataggtgatggttaaagctggagctttagtcctagctttaagacaggctacgtttcttgttttcatctccatgtggtggaaggaaggcaggaaggaaggcagagagttagtgtgatgaccctacatgtatctacacttagttttttttttttcttttttgaaatgtgttgctacaaagagagttgcatggtccctgcaaaggcctctaagcgtgtctccatgtccctttggaggcagaagctctttaattggttggattgctggattagcatgtctatagcctgatttgttggcctcttctgcaaggtcaacactggctacagttatgctgctttttcagaaataaggatagttctagggtatgtttaacaaatgaagtggtctaggcagcttgagagtgaggtcacagcatagccactacttcggggatggcagcttcctaagatgcctggtcagaggaattccctggcagcagcaccagaagcaatggctgttctcatggtccatggtcatggactgtctggctaccagaaatgttccactagtatttggtatcaaaaacttttatcttgtcccatacctggaaaatttgttatccttctggattttaccaaggatgtgtttttgctcccaactggctttttctgatttggttgaacttattgatcaatttggacatcccatttgactgatttgatttacacttgatcaaatagtctcattcatgtcagtcaaaatgattgaaccatttgcttgaaggtgactctaggttgtcaccaggccgcttagagagtttgatggaaagctctgaggtccagaaagaatcctaccctctgaatgtggcattttgggggcattctgcacaagaactggtttcactttgctcaggaagaaagcctgtgaggacttttaatgattttaggattttttttttttaatggtgagctcattgattacagttctaaaactcttgagggatgagggagatggtgaattctggcattgaggctggccaaccttgtagtcagtgaggctctttggctctggagtggggctaagtttgtctctggctgtgaataaagacttcttgagtttacataaaaggggtttgctcatcccctgaaatccccatgagaaggactggggaaatcagagccttatttaacacaatataatttaaacgccacaaaacctctaccccttttacacgcatagaactcaagtgccaattgctgagccttgagcaggtctgcttttattcttgtgcaggttttcccagggtattactgtcagggtgaggtggtctggctgcttaccgtaatccgagccctggttgcacagtaagattttaatttttcttgaattctaaccaagtggcagaagtcaaatgttggagtgcaaggggaatcagatacttaaaatcatttttatctgcttggatcagatctgcaaaaccactaaaaaagccaaccactcgttccatctgccacatagtgcagggaaaagaactggtttcacttctatagaaaaactatatcattttcagatactttggaaaattgtaaactattctcagacgtttctttgtaatatgtcctccgcttctctccacaaaaaacataggaaagataggatgatgatatcaggaagtataaatcacattcccttataatatcttttttgctgtgtgtatgtttcttttctttctttctttctttcttttttttttttgagacggagtctcgctctgtcacccaggctggagtgcagtggtgcgatctcggctcactgcaagctccgcctcctgggttcacgccattctcctgcctcagcctcccgagtagctgggactacaggcgcccaccaccacacctggcaaattttttgtatttttagtacagacggggtttcactatgtgagccaggatggtctcaatctcctgacctcatgatctgcccacctcggcctcccaaagtgctgggattaaaggcgtgagccaccgtgcccaggttttctgtgtatgtttctaatgccaatattaagaatgatgaggaagaaatgttaaagtggcatgatggctccatgtggatgatttgcactctgatggcctcatgaagtcagattgccagaagcaaactgggacatgaaatgtaggacatggagaggaatatcagaaaatttcatgctgtttctaaggaattgtaccatttgcaaaatatgctgataatattttggattgcagaatctccatgtccatgctgtgtgtgtggttgagttggagtttgtagaagcacagcttgaaaatggccaggtggctaaccactggaaaaaggacatggctcttcaaaccagcggctgagcagccttccggatgggttggaggaagggtttagggggtgcaatgtggtttgagaaaaatcgacatagctgaggaagggtgagatgaagagtaaaggagaagcccaaataacatttcatacagataatcactccatataagccctgaatgaaatgatgggaaaatatattgttgctaattcactggctttgctgtcattactggatatctaatttcagcaaaggctttggggtaaaatggtaatagaacacatatatatcaccaaccaaccttcatcctaaacatgattgcatgtgaaatggctctgacaaggcggaaggcagagctgatcaatgttagcatgaacatagtaggcttagacatttatatatggccgggcgcagtggctcacgcttgtaatcccagcactttgggaggccaaggcgggcagatcacttgagggcaggagttcaagaccagcctggccaacatggtgaaaccctgtctctactaaaaatacaaaacaattagctgggcgtggtagtgggcacctgtaatcccagctactcaggaggctgaggcaggaaaatcgcccaaacccaggaggtggaggttgcagtgagctgagatcatgccattgcaatccagcctggacaacaagagcaaaactccatctcaaacaaacaaacaaacaaacaaacaaaaatttatatacattttctttgtatcatgccatttatcaaaaagtacgaacatggctttgaatacggcttctggttttgtttttcaattctgtgaaggatatgtgaggtatgggaagaagcatggacttggacagatctagatttgagtcccaagtctaccatttgttacctgctggatcctgagcaggctgttcaaactgtttcagcctcagtttccctatcttcaaaccaaggataacagtacctaccttatgtatagtcatgaggattaaataaaatgatgaatcaagagcactaatttttatctttttaaaccataatatacagtaggacatcctttttccttttttttacatttatatttggtgttcctagatgtacacacacacacacagagatgcatatgactttaacaaaaatttcatgaaacaatgcttactctcactaatgatacactctgatagtttctgttctattctatttcacatttacagaaattctggtcatgacccactaaatttattttacaacccaccaaagggtcttgacccatagtttgaaaaacatgaatccggcacatagaacagtgtctggtacacagtcattgacctgtaaggaataaacactgctctggggaaggaatgatgtcatgtagtaggtttactgaggcataattctttggccaaaggaagttgtaataaaacgctaaaagtttcttaatgagagtagcatgaaggttgccaatatgataaaagcactttctcctcctcctccttcttctgattaaggcacaaaatggaaaaaaatgaggcaaagagactgaaaaaattagaaacaaaacatgatgatcttttccttaaaataatttaattaaaattttctagcttaaagactgatttcagaatggttaatattgcaattttgggcaataaatatttaaaggggagaaatccaaggaggttgtttacatacagttaactaaaagcagaaaaaagtagggcctgctgagtttctatcttctagatgatggtaaaacatccttttcttgtctccttctgcagaaacaagtagaacatgaattcagagtgaaggagatgttaaaggtatggttggtgtattggttttctactgctgttataacaaattgctacaagtgtagatgcttaaaacaacacaaattgattatcttatcgtttccatgggtcagaagtccgggcacatcacggcttagtggtccttctgctctgagtctcacaagactgaaatcaacattttggcagggctgctttcctttctgaagtctcaggatgaatccacttcccagctccttcaggttgatgacctgattcagttccctgcagttgtagaacagaggttcccatttccttgctggctgcccaccgggaatcaggcttttctcctagaggctgctccattcctcctcatgcttcccgtggtgctccctcccgcgactaattgagtctctcttacctctcgaatctaacttctccttctgccaacctctctctcattcccactggagaaattactctgcttttaagggcttatgtaattaattagattggaccccctagatgactcaggatagtctccctagcataaggtcagcaacctacaaagtttcttttgctatgtaatggaacatattcacaggatccagggagtagggcatgggtatttttggagggccattagtcggtctgctaaacatggttcagaaatcattttctctttaaagaagagctcttacagtcatgagattttccatgggttttaagtacctacagttactggatgaatcttaaaattaaggaattttagaggcatcttaagattcatgaggttcaacttcctcatttcacagatgaggaaatcaaatggaattacttgcctacacttacaggagactggtaaaagagtcagtggtacctcccacgtttcttgatttctggtccttcatggctcaggtactcagaaatcatgatggagtatgttattgaaagggtgaatcattaagaagaaataaatgaaaagtctcagcaattggaaaaccaggattttgttttgcctccttccatataggaaacatttgtaagatagaattctggcagttatttgttgaagggtcattttataccatcctctcatatttaaatgtgaatagtggacattttttttaaaaagacttaattctaaatgatatctgtgatatcagagatatttaaaatttttcttattcagatatttcagataaaaaagagtgtttttttcttcttaatatagaataaataacattgtttctttaatgaaacccaagaggatgaggatgaaaaggagtgcaagaggacagaaagagagcttgaaacaatcaattcttgggagttcctaaatgacagtcaatgttgtgcccttgctgtctgaggctgatattaacacacaagaccagtagtagtttcttatttgtcagtgtcaatggaagtaggaaagaggttctatcatctatctatctatctatctatctatctatctatctatctatccatctatctatctatctttccatccatccacctatgaattattctttcattcccacttcatttactctgtacttactgagaatctgttatatgcctggtgctatgctaggggctgggatacgttgagaaatgagatatggccttcgcatgagatcacaagatgtgatcttcggggagctcacagtttaatcagggagacagatattagaacagatgtaaaagcatgttgccccagaattgtaactaaaatcccaacctgaaaggaagatgctcaagtaatcctattttttaacaagaggcaaataggagccagatatctccctccagggcttacaaggaggaggtagaacttccctattagcacctgccaccctccaaacacaggatgaaggggtgggaaggggaatgatggtcccttacataagaagtcttgagaatgaatgggagacacagggaatgttttgagtcactagccttgtgaggagtgccgtattcatgataagaggtgattgccactctcccttcgggtagcacaggggttgatctccttccccatcatcaagtgaaggggttccccacaatcctgtgtagagattgggtgtgtctgtgcaaggcagggtcactggcatctcattccttaggcatcagacttgctgatctgcccctgagtaccagagaaagggaagagaattggaggaagactacagggctgcagaaagagtaccacaatcagcacagccaccagttagtctggcaggggtctgtgagtctctagtggatagagtggaacctgcagagatggctgggcttgagcccttttgatgctactccacttgagagagctacacacaggataaggggaccccatcagcaaagggctatgggagatgcagcatgaatgacaggatatgggaggatagaagaggtgaggcaagagtagcatttgccatgtcaacaaaacatgtagtcagaaggccccttcagtgctctccagtcaacatattcatgagcctcacaaaagagtcagctttggattcctccccacgtgcccagccttaatggccagtcagggttggccagagagagaactgcaatgactccagttaagtaaggagctgtttgctcttcaccaatctcccgtatctcacttccttgtttccatcaccaaagaatccagtcctgagcacagaggtggtgcggtaatgaaagagtgtcatccttcactctccaagtccctcaagccataggtctgatttgcaatgagggagaggaaaagttttgaatcaaatatgagtccagagttattaacaggatggaactgaattttaataactgaaaagttatgacacttgttcgaggtgttaaaggatttactattgagtggggaaggaagatttgacagagtgtgaatgaaaacagcgattaaaaaattttgtttgtttcccactgatatgaaattccaattcctcaatgcaatggttacaaaataaatgcaaaacagagggactgggctgtaatggtggcaagtactttttctttcttgcacaacattttgtttttttctagacttcataaacttgtcttaattatcggtttgcttcagtttctatttacatattaccaattcgacctcaaccatttttatcaattgtcaaaatcttctttcagtctgttggagtacctaatgtgttctattacatgtactttgctgaagaagtctcatttagatctctttcgacctgtttcagtttgaactggttgctctctgtgtctgcttcagagctatcagcttgtggtctcccaagaatatttttctgggaatttcctttttttttttttaaatttcacaatgatataccttattttgtgtctctttccatcttcttctattgtgctgggtgagcacttgatgaaaatgtatactttccatcagaaatttgtgccttccagtttgggacttattttttctcttttggtgaattatttagccgatgattctagtcatctgttttctgtgttctctctgaatttatctatggatactaaactccttgggttgtaccttagattttcttatgtgttttttcccctttccattgctttgaatttttgctctattttctggaagatgatcattaaggtttaaaacattgaggtgttaaaatcaattaattaggctaacaatgtattttggcaagcatccccaaattccctacactttggaagagaaggctatctgaagaagccatttaagttattctcctggttccaaccacatctgtgtccaaacaaatggaaatagcttgaaatattctctctttctttgacagcctccaaagggaagcatcatagaacctttggcttataaacatttagggttgaatggaaaattagagatttattatgatactcttttagcagttgaggggactgagacccagaatagtaaaatgcctctcacaaggtcacatggctggtttgtggcagagcaggaactaaaatccagtgttctatattttaagttcagttttctttgcaacataccacattatcactcacagtccctgtggaaatttcttccttgcatctaactgaaattcttcactgtgtgtttgaatcccagtttcctactgtctttaccaagagtgatgagtgttggccattgttcctggcaatagaaagtctttgtctctgttagctgtatgttatgttttcctctgctgggatggggcgatgtccatttcacatttgcacttctctgaagttaacaagaaagctgaataataaaagacaaaactggtagttactgctgtttgcagtaatttctcaaatacttgcattgaaaccaaggttaagatctggttcccacatgcctgtaggtttcatgcagatgtctcctctcagggaacagacttttgcttatttcataactggctgaaggcattgtttccaccctgcaaaactctcgccaggtggacaattcaactggggtccagaacttaaaatggtagctttgtctaaggcaatcctttccctaccactctgtgccttagtttttacatttattgacattctactaattttgagttgggctttctaaacctgcatgcactacctctgtgtataaaaatagaatttgatatactcatgcctcctcctcttacttcctcctacctccatttggaccttttgctgtttaaaatatgcatgatcatttaaaaccatgagtgtattctttgataaatatttttaaaagattcttggctcaagagttgttttgtgttgttttggaactgggaagggatcgggctgcaatccagcactcattattagatgttttctctctgatgtatgaagacagctcaggtggctgtagctctgcataaccacaagagggcaagagagtctaaagaatgagaagaggacccgccacggaaacaaactcctctttgttcacctagaggccaaatcatcagatgatctgcaaaacctggcaactctcaagaacaatagaggggcatgtattaagtgaccagcttgctagtcagaccatccagaggagagcagcagactgctaggtccaagatttataagctgcaatctttggctagtcggctgacctctctgaatctttttctcctctgtagaaatgggtattgcccatcaagcacctgcctgtcttccttccaacttttcccaggggttggttccaacgcctaatgccacgctttcttcaatgccaaatgtcactccgctgagaaaccttccagatcccctcatccttgctctcatactactctgcactgacctgatagtctttctctggttgtgttcttattatttgtttccaagtctgcttccctcatttgactagagctcttgcagggcagctactgtgtatctttatacctggcgttcaaggaactgtggaattctaagcatttctctcccttcttttttgctccctcccttcctttattcgtttatacaggtttttgttccaagaatcaagataggcattagggaggatgtggtccctgctctcaggattacaggttaaataatattttggctaaaactcccagtatgaaagagtaagcataagagccacatgattagtcattgcacttactgaaataagcaaatgttagcatgatgtacaaagggaagagaagacatatctcatttggcacatactggggctcagaccactcttggctgtaaatgtaaaaaagatgtttccaaagaaatataaaaatatatacacaaggaggcttgtttttcatttaattagaaatgagcaggtgaaagggatttaaagttctcataggattcaaaaatgccagagaagcgtggaactgtgcaaactcactgtgctcagtgaagaatggtgcagttagtggtcaagagtggggctttggggttagagtgagccagcttcctcacttacctacctaggagggcaggcaaggtgcctcaccttcctaagccccagctgtttatttgaaaaatgaatacgaaataggagacagttggctaaagatcaagggtaatgcctggcacatgagggacatgtcagctgttattgactgtgatcatccttcttttttgtaattgacttcaccacattcaataactttccacagtgaggatgagccttacaggaggtgcctgaacatcccaagaatggcagcagatttttcagggaaacaatcattcttatttggttggaggatctaacaacgcagctttgggagccccagtcctgtagtgtcctcccttgggcgtgagaatagaaccaaccagggtggcttggtgtgtcaccaaggtctgatgctgcccttcccacattctaactcattatgagtcaatcatccattaatgcatctgaacaaattagctctgatttataattttatcttgggaggtggcggagtcccataaactgctttactgcttcgctgatgatcatttgagccaagggaaacaaaggaagaaaagaatgagatttaagcacaagttttaatcacattccacatatagaaatgcaacaagtaagccagcctttggaaatggccattatcacaaatgtattgtgtgtctgaggctttgcaaatgtctctgctaggacagtatgattgcagaggtgcatggaggttaaatacaacttcagagcagcctcacagtgccttgtatggctgacatgcctttagatgccctgtggctttccaggcaggaaaggggacccagtagatgtgctgaggttttcacacctatcgcaggcttcttagtgtgaatgtggagcttaccagggctagctcttgcaggctgcaatttccagataactggaagttacacagtgatggtggccattggttattctgattattacaaagaatcaggaaagatattatttactcttttattggattttccaacatatggcagggttgggtgtgttgctctctcatctccaataacgaatcggctttctcttggccagcaactcttgtgcgtaggaggctgaatgccttgttctcttgggaaagatagacttagctgccaggatgaggaatccagctacgcctggacagggtggggtctccagagagcaatgtgagggagagggagggattgaacaagaagacctgggctctggtaaagttaactttttaatatttactagggagcctagagtttcagttgataactgcgtgatgtgtttgcaccaagtgagccaaatgacatcccagaaagctgtgtgagagaaggctttgcagtaattcaaacatagaaaaggacctggagtattcagacaccacatagtgcccagtgctacaggcttgggatagcaaaagaacctgtactgcggattcattcatgacttcatttcagcacaatgacattatcaggaacattaaattagtgtaactgatgtgaattttatttataaagtttattttcatttatagttacatgttttgattaatatatgtacctgtttaggtaaggtcatgataataataatttaagtaaacactaggaaattacaaggttttttttttttaaatgagttcatgcattactcatgtttcagaaaggctaaattaaagaatatttaaaagggtatttttctgtatcaacgttcaatcagaaatagagatccagtatgagtgacatggaatagggggtttattattcgatctcatgcaactgtgggagctggtgaagaagtctaaggaagactgttatccttttgtctggtctgatggcgaacctgaagttgctgtacctctgcagagctggcagctggggaataataagctgggcatgaaatagcacagaagacaaagaacaaacacaactgagaggacaatctggaacctacgaccatcccctaccacctccaaacctgatatgcagaacctgaagcaggaaatgcggtggcggctggtacagctgcaggtttggctgcaggcttacactgacagggtgatcccacagatttgctacaacagccactggtacctacatccaccttcagaacataatggctgctacttcacttttgccctctgaatctcaggcaaacttctcttgaggttaaccctaacctgcaccaactgtaggagggagtgttgggaatcttagctcaaggttagttaagtggatacagtacaatgccattgcaatgatttaatttcagctatttctgggatgagtgtttaagcagaatctataacacagcatatattcacttaattcttattgaatgaataaatgatttgatgaacaatattgaggttcaattagtctcacgtcttgatgatcccaatttttcagtttagcagagggtttggcatgtagttcatgctcagtgaatatttgttgactgttactgaatggtgtggcaggaagagcaatggtgcaatggttagccaatcatgaggcttcagggtggtcccagttggctactacttcactgtggggtcctagagcaaatcacgccagctctgtggccttggtttggtctaagggactgagatgaaataatctctatgtaacccttttgctcagaagtttcacagttcagagagtttatcagattgcttataaatggtgggggggtggaatatttcacaaactgagcatttggaatgagagttagagaatgtgagtgatcattaagcaaagcaggactgggcggggcccgttgggagccctggaatccatcagtctgcagggagacctacctggagggtgcttgattagaagaagaaggataggtgcagacgggagttgcaagggaactcggggccaactttgcctgttggaaaaattgtgcctcagctagctctgctccataaagcacgatctgactcgattcaagtctggcttctaaatcgtgttagtttttctgcagagctaattctctgcagagcagagatctttgtcccatagcaagtggcagtgtcttctgagattcccaggcttcctaggacacagagccttgccttgaaaagccttctttcttggtttgggcactgatttcttctatctgtcctaattctgccagttgctttcatgcatatgctatttgagctgagcttggctgatggttctaaatttttagatgaaaatggtgtagaaagtcctttttttttttttttcaaatatgtgagataatttgtagtcttttgagcatgagacaagaaaaatctccagcttaggccatggtaaatgataaaaagtcatggtaaactcattcctgttttagacggaataaccatttccttatgcataccccaccctggccacctcccaggacctcagatgcatgaggtccaattcaagctaaatttaacagtttatctagaacttaaagtcagtcaacagctatttactgagcatctacaatgttgtttggctaagtaggtgctggaagaatcctgaaacataattaaacataatactttcaaagaactaatcatcttcttggaaatagaacaaacacatgaacaattaagaaatgaatgtgcatgacaggtggctccaaacatggtggactctaggggagggctttacaaatctatgtgattcacagaagaattttcttttacatgatgggcatggaacgaggcttgtaacaattgtcaaaaaacaggagagttgttccaagctggagatgggaatgacaaagaggtgataagaagacatgaaaggaggacagaggagaagtagatagaatgttagatcgatacagagtaggacttctgtatgttttttctcttcttaacattaaaatattaagactttatttttaagagtagtttgaggctcacagcaaaactggatagaaattctactgtttccacttaccccctgtcctcacacacccatgacttcccccactattgacatgtcacaccacagtggcacaacatttgtaagtttctgtgctcatctttccttgatattgttagactctttttttaaatttattttttactttttagacagagccttgccccgttgcccaggctagggtgcagtggtgtgatctcagctcaatgcaacttctgcctcctgggttcaagcgattcttctgcttcagcctcctgagtagctgggattacaggtgcgtgacacaatgcctggctaatttttgtatttttagtagagccagggttttgccatgctggccaggctggtcttgaactcctgacctcaggtgatccacccgccttgggcttccaaaatgctgggattataggcatgagccaccgcacctggcccagatagactcttttaagacaagatgctaaactggagtttaggtattacctggcacaatcccagtttcgagatatgagcctctgtttttggaggatattttctgaagaactattgtccgagataaccagtttagattaggaatctaggctgagaaccaaattcctaaagcccattctatttttctggtgcagacccatacatcttgcctctttcccttctagcagctcaacgtctataggttagtgctctaaaagaacttcacaggtggcagaactgaaaaaaaaagccttttttccctctcataaaaatacctctttactttatgcctttccatcatctcatgtagctttccaaaaaatgaaacacgtacataaagaccaactacactcaaaatgctgagtgggtcagggagagactgggatcttgatcattaaccaaggctctgtggaggaattaagttgtttgacttgtagctccaggcttggtgaattaggtagtatttcatttcaatcctttgtaggattcaggctgccaatatctaggctttgaagtggtttccccctcctatgatgtaactggattccctttgctcggcctgaagaggcgttcttatactccttttccccaaactagtcaccagtggtttgccaggctgtgagtctgatgtgacttctcctctggtttccagcaattctcccccaaagtctatatttcctgccctagataatttaagaaatgaagattgcaatacattctgcctgtatgtgtgtgcttgtgtgcatttggtcgggggtgggtactgggctggtagcaagtgctgcaaatttcaaccctcagaatttaactcttccaactcaactgggatttaagagtgactctactaactctatttctttgttttgggccatccacaccagcacaggctttactgactcttcaatttccattagaggagcgttgccttacccattttttggttgttcattgaagaaaatgggtattttattggaatcatagaatgtcttcactccaaaatctttccagaagttaacagattgatatttcgtcgatctactcattttccatgtcgtgagaaatagtttgtattgaggcttttctgagagatagaggcaggctctctataagtcactttcactttgagtaaaggccccgccaccagaaagctgtgtgttgggatgtattttgcctcttgcatagatgtattcactgactttcaccattgtagtatgtctctagccaacactgagaggcatgtaggggcaactgtgtgaaacttactttatttactgtaagaaagcttttgaaacattgcccttcatcatacattgtctttcttaaaccaggaaaataacaaaaacaaacaagtaaataaagattctatcatgtctcaaatatggtttttctaaagtgtggtttcttaagaggaacaatttcatagcagatataaaatctcattgtatcagttcctgctgatttaaaagttatagtagtttgtacctatgattttgatctcagatcaaactggcttttaaaattttatttttattaattaattaataatttttttttttagagatagggtcttgctctgttgcccaggctggagcatagtggtgcagtctcagttcactgcagccttgaactcctgggcttaagaaatcctcctgctttggcctcccaaagcgctgggattacaggcatgagaaaccacatccagcctgattttgatcttaatgtaagcatgacatattttgtaacttaagctcatggtaccttcttttgtcaaaaagtctttggctggttcataattatggccttaatttactgcatttaacctacagatgctcgtttgtttagtggcttataaaatggtctggggaaagtaaacggtatttattggaaatgtttttgcaatttggaggttaaatcgtgtttcttctatcaactcaaattattctgtctaggtctcttcacactaggtggcagaagtggctcgtggaggagtctaatttcttgacacgtgattttgattgctcctggggggcaggggcactgaggggagaggtaagtcagttacttataatggacactgagatgtctttctctggtgaagtgagcaaatgtgtggcttgggggattgtctctgattccgaacctgtagccccacccatctttctgtctctattgttgcatccaagagacagaggtgagggcagggagagagaaagagcaccttcatttttccttatattaaagtaaccagaatcacatttaataaaccacaagagagatgagaagttacaagctgttatgcaccctgaattgacctgcctctgatgagctacaggagacagtcgtctgtcgtggcccatgggtctcttgattgtgttgatggataccaggttagcagtgttcctgcttggaattctgctcacatgttgcttttggaccatttcagttgtttagtcagcacagtgagagagcatgagaattgggtaggggggtgctgcagccttctttgatacggtcttgttttgggcaagttacttaatcttcctaataaaaaagtttcctcatctgtaaaatggagatgataatagtactttatagtgtgtctttgagaattaaaggagataatacatgtaaagtgtttagcacatggtaagtagataatatatgtttgtcattgttttttgatcaagtcaaactctataaatgaactttagtttcataacttataagatgatagttttgaataatagatctgtcatgttgttagccttcaaagtttaaaaacctgtgtacaatgtgtgcactgtctatgtcatttctatatcactcatagggcctcgcacctggatgtgcacacaatagttaatcatgctattaagtgcttattgaattctggataaatagagaacataaggaactatgcttctaacatgatttattttacatataagaagatagttagaacagaagtaatatagtccgtttgttccttcttgatcattcatttaatcattatatttaaaataatgaacattaatgcaccaaaccattactacaccctaggaactgagcaaaaggcagcaggtatagaaagcaaaggtagaacaagtttcatgtcctcaatgacctgacttctgggtagggagacagagaaatgtaatatggtgccaaaaaacctaagtctgcacagattccactggagccaagggtgaatgagcttgttgtattagcaattgcaagctgtttgatgtagctagtgtgtagggtgctttggggggtgttcagagatgaggctgcttaccaacattttctagggtctaaactgtgcacgcactgtttgaaatgtagatgtaccacatttgaaatgtagatgtacgtaaagttcagcattttaaattaatgaaaaaatattgactttaacaattgttctgaaacttctctatggtagaaatggtaacaactatactgcattgtacaactcatagaacttagacattatctcatttgattaatcataataatagtatatttcatttaatgagcctatattatttactaggtactatgtttgacacataacatatgttatctcatttattcttaattagaaccctttctatcaggagcccaagtttaccaataaagggtgtaagttaggaagaaccagcttaagctctgtgagagcagagatcatgtctattcatctatccctctatctggcatgctgcctggcacctagtaggagtttaagtgatgtttattgactgagtagataatatgactttttcaggtaaaactagtaactaatggagacaaataggaaggtactggattttgacaatttagttcgacatgatcatggttagtggaagtccactttttttgtgatgtaggagagattcaaactcagtttatgtccttttagccatagatccttgctggaaagaaatgcaatcttggtcatcaattgcttttcatttgtcaaggatgttgactctggtgagacagtccttaactgtgcaggacaggctatcagtaattacgtttttgaggagtcaaaagttatttgtgcatttttgactgcatggggcgttggtgcacctaaccccttgtgttcaagtgtcaagtgtattgtttctgagaaacctttcttttcattcttagtttgatccaatagcctctagtcaaaggtgctgtattattgtttcagcttctggtcttggggtcattttggttgaggaaaggtcaccaaattttgggaatgacttcatgactgaagaacatttttgagacttttgagtttgctccctttcaaaacaatgtttttctctttaatgaacttaactgaataattcagccaacagtttctgatagcttactctgtgttaggtcctatgatgggtgctgaggatacaaagatggtaagacacagctcttgctttcaaggataaaagggggagacaaacttgtagacagattacttttgtattcagtgtgtttgagaccctcattgggagaacatgaaaggcctatggatgcacaaaagaagcagaaatggaggccattgttggcttcccagcatcagcaacttgaggctaatgggaggtaaaggtggggaagaacttgtaggaggggcaaaaccatctactggctatgaatgggtgagaaggctcaagttgcaccagcagtaatctgatacctctgcctcatcattttgatgggccaacagctccccagattttagaaccagattaacactgcacgtattatttttgtctctttcatattcatcagctgaaagaatgcaagtcctcattgacttggatggctctcaggtggagaagctgaagcttaccctttcttcttccattcatggtccactgatgtatggcacctctaacggttgtccttggtctaggctctgagatgctgatttatctttggccattaatcttttttttttctctctctcttttgagacagagtctcacttgctctatcgctcaggctggagtgcagtagggcaatcataactcactgcagccttgaactcctgggctcaagcgatcctcccaccttagcctcctatgtagttgggactacaggtgcacaccaccatgcctggctaatttttaaactttattttaggtagagaccgggtctcactatgtttcccaggctggtctccaacttctggcctcaagtgatcctcccgtctcgccctcccaaagcactgggattactggcatgagctgctgtgcccagcctggctataaatcttcaatctgttgtattactaattcttcctttaatctccttttccccagttttctccctttgtgtttattttgttctctcagtgagtacataactgagattatctctatttattctaagaatttggtaaaaacgttaatgcaaacttaagtacaaaaactgctgggcagaactgattatctacacctgctatcagagagtgagggaatccctggagaagcaggggtgctatcacacagttaacaatctgagcaagtctcatctcttgaaccccaaatttagtttagtttaccagacagaatccatgactgctcatcaacataatagaccaatggtaagtatgaggatgccagataacaatttgtctcatgattagaagctaagggcaggtagcagccattcagcaaccctgaaatgacaaagttagggaattgggttttgaaaatgagtcacccaaacattttctttccaaacatctgcaggttgttagcctgatttattttgaattaaaaaatctttttgagctggctgacagcttattttaattcccagctgttaaaatgtttcagcaattggaattaggggccgtgccattgcttttgatgtggcgggagccagttcagcgctcaggtacacttgggggacctgccccttctcatcatggccctctatagttttatttccttctgtttaagagcttggtgctttgagttctttgtttacgatctatttgcttgggtcttatagaactggtggccaagggagtttagctcatattccaggatgtggtggcttttatccagcacacagtgctttgttgctgtcttagattccttctgtgacaagttgggggataaacaaataaataaataagtgtatatttaattaatattgccgcctcctttcccaaaatatgctgaagtaaactttctacccaaagcagtggttcttataaatgttttcaagatttttatgcagattgttgtcttggtaaaggctcattttccctggttttgaacgaatgcctctcttttttgttgtgattttggataggggatctggggacctagtctcctctatcctgatgccacttaccacaaacagctgacaccgctaccagcatctatcatgaccaccaccaaggagctggtcctggccacccctgactcctgtggaatgctgtctgatcattactattccttttaatgcctgatttccccaaggaattatctacactagctgctttccctcttcagcttctctttatgcctcagttttttcattctgtttgtggctcattctatgcttctgttgacactgggctctcaaaggtcattcatggcttttttttctttctttctttttttttttttcccgaacatgttttttagagcatgctttcaattagaaaagtagtatggcttataatataacatttagaaaacacagacaaatgtaaagaaaaaacattcatgatcctgttttctaaaaataattatttataacatctagtttacctccacttggacattttatttgcatatgggcatatattcaaaaaattgagctccatgagatttgtagtattcattctttttcaatatcatgagcactcagaccactggaaaatcctcatgaaccatgctttaagcattcatggctttttaattggatctcagtctttttgttacttgatttctttgcttatttcatgacctccatgtatctgcattaagggaaattataaaaccaaagcctagaatgacataatgggacattcaatattagagtaaagatttatgactttattcagtgggcaccaagaaatccaatcctgttttttaagctgtaaaatgaagcatcagattaatacaaagatgaaaaaatgaatagaagagaccattatgaagatggtcacaatagtctaggtggagataggtattgaaagtattaattagaataataatacagagaatctaatgtaaagcaaagtttggagaagcattgaaagagtcaaatagataagatcaggggaatgataaaatatgtagagggaaagtggaaggagagagatgcctttctctaattatgttcttcagttttgactttcatgtttctattcctgttctctctttttgtagtatccttttttggtcatctcttttcattgaaatctacactttattttaagttccggggtatacacgtgcgggatgtgcaggttttttacgaaggtaaatgtgtgtcatagtggtttgctgcacctatcaacccatcatctaggtattcagcccagcatgcattagctatttccctgatgctctcccaccctgcgcactccccgccctagcaggccccagtgtgtgttgttcccctccctgtgtccatgtgtttacatatgaaatgtatactttttatcaggattcttcctcttcatgaaatttttcttgattacctcaggcagatattatacctccaatttcttagaattctgtcatactttctatatctcaaattttatctcattattttagggcaatgatctcctcagccgtagttaggtagacagcttgtggtttaggctttagatgaaggtgtaggaataagaaaaacgcaaagaggcaattgaaaagtataagattacatgatctaatgaccaagatgaaattacaaactccatttcatgtgcggtctgaattaaaaatactttaacttgtgacaacattttcaagttagctccttgggagctttgttaggataaaatgagtaggaggaacttaccctttggtaagaaaatacatcatagtttccatgtctctcaaggaactggaagagagtgctcattcttttttctggaaatttaagaaaattattttatattaaacaattatcctctctccctccctccctccctccctcctccctcccttccttccttcctccctccctccctctctctctcctttctctctttccctctctttctctttcttttttttttctttcttttttttttttttgtaggatctccctctatcgcccaggctggagtgcagtggtgtggtctcagctcattgcaacctccgcattccaggttcaagcaattcttctgcctcagcctcctgagtggctgggattagaggtgttagccaccatgcctggctaattgtttttttgtatttttagtagagacagggttttgccatttgtccaggcttgtcttgaactcctggcctcaagtgatccacccgccttggccttccaaagtgctaggattacaggcatgagtcaccatgcccagcctactattatttcttgacaatctttcctgaagaatttatctttatgtgactgaatgtgagttaatttgttttctagaaagatgcattaatacaaaacaatattggttttccactaggcttttctttctctaaagaccttcaagtcttaagagaaatatgacattgagtgtgaaagcaatatattagagaaaataaatattccctgcctccagccttccattttaaatttggctaaactttgggaatcattttagaagagtagggtaatattttgagtgagactctctcagatgcagtttagttgggaatgagtcatatgggtgctttcttaatgatacgttatgacacatcacatgaagatgactgaattttccttttcctctttctttccattagcacattatctactttgcctctttttcaatgatgagtatccagctttgtcttttcacttcctttcacatttcaagtctggtttcacattcagaatttattaaaaatgactttgagaaatgctaatttcacaaccatcttcaaagattctgttcagagttctaggatggagtttaagacattgcattttcagtgtctaccaccatcactctctgtccctagaggatttaggtacagttggactgtggattacgctttgaaaaattctggactaaaggagctgattgaactttatctcttattacagcatctctctccaattgccttggcccattagtgagcaactactagatttaaatttgtatgtttcttccaacgcatctcttttgaaggtttattatagtgttatgtacccattcagagcttagtacctataaatggagaggattctctgaagataacctccctttatcacttctaacctcttattcttgggttgtgaccattttgcttactcagggattcctaaatagccttttcaaaaagtgctctaatgagtaaattaaagtaaaaagcatttttaatgatattcatgtatctgataacgatttggacttaacaatgctgaaattctataactcaatgaaatgcacttttataatgttatacatctatatttaaattacctattaagatttaaatcacagcaaaactttcttctctcagataatgcactgtggaagttatgaatttacctctcatttctttccagtaattctttctcccattttgtgtgagatatttgtctttataatttgacatattattttggtgttgcttaaatattgcaactattatgggtaactgagctggctattgacattgtttgccacttattataaacaagaaaataatgaagacaagtcaaaaatgtcagaacctgttaatgatgggatcgcagttatggttggatatacatcaaggatgggagtagctagctgctatttattatgacattgtaccaagtgtgttaacttttgttatttcattttttctcattttattcttattgactcatgtaagtataatcattctaatgttacagaggagaaaacagaatctcagagagtaacctgccttaaccacaacaatgtaagtaatagaagcagagcatgaatcctggcttgcttgactccagagtctcagctttccccactacactgtgctgttatgatgcttaattcatttattgtatgccaacttaataaaaatagattttattcagtggaaactctctgaatcatactatattggtggatgcatgtcattatacatttgtccaaacctgtagaatagaaaacacccagaatgaaccctaatgcaaactatggacctcaagtgacaatgatgtgtctatgtaggttcatcaattgtaacaaatattccattctgtccaggggtgtggataatggaggagactatacatgtgtgggagcaggagctatatgggacctttctgtaccttcctcctaattgtgttgcaactctaaaatggatcttaaaatatatatatgtatttctttttctttttatttcttttttttttttttttttttttttgagatagggtctcactctgttgcccaggctggagtgcagtagcacaaaatgcagcagcaggattctcttgccccagcctcctaagtagctgggactataggtatgcaccaccacgcctgactaatttaaaaatttttttgtagagacaagatctcactatgttgcccaggctggtctcaaactcctaggtaaagtgatcctccagcctctgcctcccaaaatgttaaaattacaggcataagccactgcccctggcctaaatatatatatatatatatataattattattttttgagacagagtcttgctgtgtcacccaggctggtgtgtagtggcacaatcttggctcactgcaccttctgcctcctgagttcaagtgattcttatgcctcaggctcctgagtagctgggattatacacatgtgccaccatgtccaactgattttttagtagagacagggtttcaccattttggtcaggctggtcttgaactcctgacttcaagcgatctgaccacctcagccccccaaagtgccaggattacaggtgtgagcaacaatgactggccaaaaataattttttttaaaaaagattttgttctgattctgatggggaatggactcttttctaaagttaccagcagttctttaactggttagcgctacgttaggcatagctcgtagtttttagggtggcaggtatgtaaaaaaagaggagagatggacaaaaccaagacagcagaagtagctatttgagggatttcggaacccttgactgacagtcacttcctgggacagtcctgattttgctgctctttccccacctctttcttttcaaggcttactccctacacacttaccctagctctaacccttcctgctgaggggcaccccattcacaaggcagcggataccagatgtgaggaatggaaagaaaaacgttgttacttgattgttcttatgagttatacactcaggctcttggttggagggctctgatgtgaaagcttggcttcaaatccactgaaaaactagcatgattgaagtggtgaactggagatagggtgggggtggcctaccacgaggactaatttgttctttaagtttatctaatggtttgtaagggtggaaatatctctggggaagtgtgatggattctcctaggaaactgacttcaccaaataattcttttgaaactgttttcagaaaggagacaagtggcatgaatctatttacaaagagaatcacctctgtgtctgtgacccgagagccattcccgtagtgatacaacttggacatttgttcaggaggcaagcgctcacgctgagtgattttcaaagctgttcgagggcatttatcaggcttttaactctaggtactctttcccacggtgtgaaggccaagagaagggatcctgggctctcttccccggccccaggatgggaattcagggggaaaaggtcatctactcttatcccacaaaagaaaacttattcatcagttgtcaagctaaggagcttcggagtccacaaatagggaaattgctaagagcttatcagtagtgttcaccccccaacccaacctggggccacatggagaatgatgttgggggcaccaatcttgtcctacttcaggtgaaaagcaggggtggggggttcattctgaagggctcctttgttaaaattccttccaattccaggaaaaacatgcactccaaagccattatctcttttacttcttactaggggacttccaggaaagagacagagggagcgagagaaaaaaagaggagggcagaacagctgcagtgaatttagtcgcctctccagttgctttccttgttgcagaatatttcacatcccaggattttccttcttgtcctctggactgttgatacacccaagatcttaatatcctttcgatcacaggttaaagacatggggtggggccgggggttgagggagcagaaaattgtattttaaagttttgttctatttgttttatcagcaattaaaactttttgtggtccctaccctgggccatgaggccaccctgctgtgaattcaatccagcctgaccagctaggacaatgatcatatgaattaatggatcttgatagacctcagttcccctcttctcgcctcactgagcacagcccaggcttcagtggctgcacgtgtgagcatccactcccacactctacccaaatcacatgctgaattcattgcacatgtgagccgtgctgcacctgtggtctggagataccagagtaaatgtagctgtgcacctcctctgggtgtcagaggacctgaggttgctcctctgcctcaatgaggggatcttccttcttccctcacatctctcctcctctttgaagtcggtagcatgatttggacccagcctcttgggagaggtgaaatactctttcactttggaacagctgaggtttgctcatggaatcggaggtgctgaagtcacaagatcgtggtgtgggtgacgctggcgtttcttagtaatgagccttgctgacacatcccaggagaggaagttaggttagggcaaggcaagtgaatgaaattgattaaaggctgcaacagattaaaaaaattaatgtacttcatttagggttatgatgtcttctttcctgggttaatccataggcaatgtgggattagggctccttaacctacacctggaagatttcacgtcagaggaaggtaagataggggaatctgtaggggctggtctgtgagccagcattgagagtttaaattgagccccataaggaaagccttccttatctcccataactaggaattacgatggtgtctgaggaggggaggcctctggatgcagggtttactgtaaaactgaaggacagcaaggctgatgctcacaagtgagggtggaacaggtatggtaaaagtgctttgcattcagcagtcactcaacaatgactgaattaaagctattttgtgataaactttgtttgataggctactgccccagaatgtttgcaaatatgctcatttttgaggttcacagctgtcctctccttcctgaggttctactgaggcatcatttacctcctggtagatgtgagatgtggtgatcactatagggtaggcagcttggaagcaaggattggtgagcagtcttttgttctgagttactactgcaatgtaggccaaattcctctaattttttttaaaagacagagtgtagatattgatattctcatttcctttggagctagagtaacccagagtaataaaaccccttgggcaagcaaagcaaacacaactcaagacaaaccacttgcacgagaggcttcaaatggtgatttagatttagaaagttaagtgatgggatcttgaagaccacatattccttgggaaaggcacatgatctggccagcctgaaatgcatcatcagcccctttgaggaggtcagtgacccatgttaatgtaaggtataaaattccaggttgtggaattcggtggtgcaactcatgagggttcctacattatagcaatctttaaatggtttgataaagttgagagagagaaacaaaactgaagattcttttttctctctgagtaatgagactcttggatgaaaggctttttctatatatggtttttaatcttcattttccactttctggtacccagatcggcgcaggggagatctttaacttggatagcagtttgtatttctaattcagccccagattagtctcctattgtgtatatgagatgttgaacacaaaagaaaactgcctgagagtgtgagttgtggaggtggctgggccagatgcttgcctgagtgatgagctgcagatatcggctcaagtggaatactaaaaagggctggtacatgactccaacatcattgaatttcctttttctcctgccagtggacatgacaactgaggataaggtggctgggagaccatgagggcaaatgtgacacaaggcaggagtcttgcccgagcttgtcagctggttcttatttcctcatgctgcaggagccttctctggtagggcagaaagacaatgagatctccatgcgattttatggatcagttttcacttttccagatgcaaagagaggagccataattaccttgcatatgttttgatagcatcccttgggcaagtggaaggggtaactcacaacagataaactctgcttttgctccagaaatgtctcctgcatctgcaacaggggggtgttgagtgatgctataggcagctggaagggctcatttatttgacctaattattcccagtgtagacctgactcatcataatgggctcttcttcaaaggaaatgagagccagattgtctccttggcagcaatggaaaacaaatgctatccacagaatggctgttagattaaaaaaaggtgcaacttgcctttggggccagctgatgtttaatgatgttaccaagaatagaggactggaaagagagtagtgtcaacttctgacattgtagctttctaaaaatgttcttaataaaattaacttaccattggatgccatgaacaaaagtaaccacatactcagaatccaaggaaaaatggaagccttggggtgtttttattaataatcgatgaaatctctatgggtacaatggaggacttttcacatagagaccttattatttcttaatcctcttggatgctctattgaaggattaaaatgatctttttttcctaagggatggagaaatggagaaagagagttgaaataactctcctattaccatcaagcaaatcaaacacagaatgggaccagcatgccacattccctctgtgaagccttggagtgcaactgcattagctcaatggtgcatttcacaacgtcacaacttcatctcagatcatcacaaattgtccatattgaaacctgggtgcaatgagaataatcacttaaattttctctggtcccacttttctgctttacagtggtagttgagaatgtcatacccctaaggacatggggaagatgtgtccttgactgattgatccctgtgacacagtctgacactttgcttttgttcagcaattctcaaagcactggattgcaatgatgccctgttgacagcactgttcaaaagtcgacctgttgttgctggaacctccaagaatacagtgtttgatctcagccaggatcctgtcttggaagaggagagggaatcccaaaaactacttgtgaagaagatcccattgttcaatcaaatcctcgtcactgtagcaatccatgcatgccattgcagttggcattctgacacgtgtacacagtgttttcatctcttccctggagttgcagccaaagcctgagattcctttcgacacgaccctgaaaaaactctgggtttgtgctcccctctgctctgcaataacataccagctctgtgatgtggccaatgtttacctagttggtgggaggactttttaatatcaaaaggaaaacatttcttctgcattccacataggtaagatgtggtttgctgttgtgcagggataaggatttggggtggggaagggatgaagaaaagaaaaacaatccccccacccatgtttttttttgaaattttcagggctaaagtgatgggtcagagtaggtgagcaaaaaaaaaaaaaaaatcatcaagcaatgcgggaagatgaaagatgaacagactttgttttaaagagtcacagtcatgactgagcatatgtttcctttgcattcagttccaaaaatagatgattagtagtgagaagcaactggtttctgatacttatcagaggtcagttaatatcatttccaactgttggggttagatatagggtaggctgtatatctaatggaaagagattataaaacttcatggtaccttggattatatttcacaaagctgtttctggccagacaaagcagttagctaagtaagaggaatttgcccaaggataaaaggggctggtaagttgtagtgatctttttagatactctctgttttaaatagtatgaatacactggcagtttatcagttatcatggaacagtgggggccagggagtgagggatgagcaggaggggacacactgaagaccaattgggtgaagaagcgggtccagctgggtatagaaatcagtgctctattttctccatagaccccacaaatggtagcttgcaggctagagattctctgaacctctaatgttacctagaaacctgaagaggctgagggtgccctgttcttagggaaagaacaaccttgctttaagttatgttgttaaatgttttgtcagtttgatttagtttgttaatttctccaaagcagaatctgccaaggacattcccaaagatctacttacttattagagaaaccaagagagtcccagcagcacagagggatcgagaagactgagaacagaactggaggtgagaatatggccacaggagaccccaggacttaacaaatgcactggtttgacttattttctggatattttctggatgtatatactgcctttacttctctttaaaataggggcagtgctagaggtattgacgtttcttgaaatgttcacaagtccttgacacagacttcagggacttgcagtgatctatgtagactggatatgcttcaagtggaaggttgttgactttattttggtccctagggttaacatcccaccttatggattattcaagttaaactctcaacagctgttagggctttgtacttccacagagctcaatctttcagttgactgctcattgctgagccctgtaccatgcactctgggagtaatataggaagtctcttccttaggcattgatttgcaaaggctgagtaggtgagagtatgaaggcgtgtaggggtatgggctaactttttttttttgattgggatctcactctgctctccacgctggggtgcaatggtgtgatcatagctcatgataacttcatacttgagctcaagtgatccttcaacctcaggctccccagtaactaggaccacaggtgcatgtcactacaccaggacaatttttaattttttgtagagacagggtctcgctatgttacccaggctggtctcaaactcctggcctcaagcaatcctctggccttggcctcccaaagtggtgggattacagacatgagccatcatgtccagtctgatttcttcctttctaatgtagcttttcttctgaggttgagggaaacaatatagtgcagttattagtatattctataaatacttattgggcatctatcctgtgacagtctgagattcaaaggttaattaagagacagagaagtcgtcaaataatttatgcttgatttacatttctctcctctcactagactcagcttctctagcatagcattattcttctttacttcccaatccctggcatctagcataaaccctggcctataattggtactcaacgagtattgaaatgatgtacaacaagaagtttgcattgatatttttctttccttttctctaacaactttgcttacacataacaactgaccattttccttctatcaaaatagaacatttccctctctgggctgcttatttaccattgtgtctcttacagttactatgaggaggaataaacctttcccttattggcaagactgccttgctattagtacatattatatcccatagaggcagaaactttttattcttttgttcaccactgtatcctcagcatcaagaatatacagggcttttaataattatttgttgaatgaatacataaaattgaaatcaggacaaaggttctaactatatgaggcaggttaggttaagctttgctgcagtaacaaacaaatctgaaaatctcagcacctgagcatacgtaggtttatttctcttttgcacgaagttggctctgggtcctgcagctttccaggtcagcttctttcccagtggcaacttaaggatctagtctgattgcgtcctgtatatacccaatctagaacatgcagcttttgagttgctgtattatgcgaagagagggtacaaaggttgcatacagactcataagtgctttgacttggaaatgatctgtgtttcttcagttcagactttcggtcatcaaatataggtaagcctatgagtatttggtgagcatgccacactaagtatgttattcagtgcttgctaaatggtgctgtaattccatgaaaaagtaacttggtgttccctgctcactcttgccacttcagtgcagactggtcaatttccaattgccgttttcctgaagtccatcttgataagccagagattgctttggctccaacataagaggctctcagtagcagggaactatgctatgttatgctggggttcaaattttaataagacatatagcatccacggaggagtttaagctgtttaaatttctggctcccaactggactaagcttgtcaaaggcagcattgactcaaccaatgactcagggagttggtatataaatacctcagatccctcactgctctggtgagatggccctgagatgcattttctacactggctcccagagatgtcatttggattaaattccaattatccacagtggcaactacctttattgctatctccccttccctgtctcattttcccatttcctgactcccccaacagtgtttcttggggttctctctaaaattaactatttgcacttgaatccatgtctttgggtctgtgtatgggggaaacaacaaactgaaagagaaggttagaaggttatctagatagttatcggtgtgtgtgtgtgtgtgtgtgtgtgtgtgtgagagagagagagagagagaggcaaaaaaacttcatacagattagggaggggaccctagggaggcctcttccttcactatctgcacttggagaactgcttaggtagctggaatgaaggaagtgaaagaatacaagcgaggggaaaggagaatccctgagatgccagaaagattttctcctatgctatgcatttaagcacataaagtctggatcctactgtgaaagtattggctacctgaagtcttggggagagggattcccaaaggtgttctaaagcaagcacttcctgggcagccaacatgatacctgtggtaattggagccctgtatttataagcacttcttattgggattccagaagtgtaattggacaggttgacaagtagctgtggctgcttgtaactgcaacacagggctcagagtccaggctgggtgcagtactgaaggagtaaagcatgtcgtttgtggttctccacctctccttttagtgccctctgctcctttttggcgatctgctataccccaagggtcatataatggtaaagagaccttataatttatcatctaaacaagggcacttaaaaaattaccttcccaatattccaatgagaaaaccaagaagtcatacaagtgctccaaaggccagtaagtggtggcaccaggatttaaagtaagatttgggtgatttcttactgcaccacccatgttccgcgttgactctgacaaagggcttcctggcagggagaatggggctggggcttgggagtcaggagatgcaggatgatcccaggtttgctattcactcatacgaaaaccttggcaagtcctttcttttctctgcttgttttcttatgttttgagagttctttatatgtcctagataacatgttgcttatcagatacatgttttgtaaatattttctcttagtctgtggcttcacttttcattctttagcaagcctttcacagagcaaaatcttaaagttttggtgaaatctgatttattaatttgttcttttatggctaattgaaaggttttctcccagaagctttatggttttaggtttaccctgaagtctaccatccattttgaataaagttttgcatacagtttggtgccataaatcaaagttaatttttttacatatgaatattcaatggttccagcattattttttttttaagagacagggtcttgctctgtcacccacggtggagtgcagtagcatgggcatgatcatagttcactgcaaccttgaaatcccaggctcaagcaatcctcctgcctgagcctcccaaatagctaggactacatgtgggtgccaccatgcccaactaattaagaatatatatatatttttttagaggggaggtcttgctgtgttgcctaggctggttttgaactcctggcatcaagtgatcctcccaccttggcatcccaaagcactgggattacaggtgtgagccacagcacctagtcccagcaccatttgttgaaaagattattatttctctactagatggcttttacacttttgtcaaaagtcaattgtccacatatgcatgggtctgcttctgcactttccattctgttccattgattattttggtttgtttcgtttccatcaatactacactgtgctgattactatgtttataataaatctgaaccaagatagtttcagtcttccaattttgttccttttcaaagttgcttcaggtcttcttggttcttcacatagtcatgaattttagagtcagtttgatagtttctacagaaaaacctgctgggattttgactgacattttgttgattctacagattaatttggagagagttgccatcttgacactattgagtcttctgacctgtgaacatgcaaactgggacacatttgagaatgaaaggggacactatgagtaagccagggcagttctgggcagattgggaattatggtcatcctacctggtgccctcttgtcactgcatgtgatgatatcttgctggtggcatggttcccacaactctcatttactcctgtccacctgaaaatttattatgtttccagtggttttaagtatattcctggcacaaatatatcaataaataaaaccttaaaatcacagtatcccattggacatttttcttggatgacaagagtgacaatggattagcctgataaatcaatccctagtcagaattacgtagcctatgtcttattctattactcattcttttgactttccaatgtgtccaacacatatacatagagcactcgtgtaatgggtatgatgcttggtagtattctttaacttttaaaaacaaactctgaaggcaggttagagggaaggtgcttcagactgtctttaaacattcatctctgcaaattagataacagatgtgaaatgcccagtactgtttctgattcatgctaacccccctataaattcccctccctgggagcacatcagagtcctggacagtccctgcagccagccgggaaggtccttcctggggagggagagaaggatgtgaaccctgatcttcctatatttggggtggatcaaaagcaaagctcatgtaaagttggcaaaagaaaactcaaactattgtggcaaaaaatatcgtgacaaaaaatctggatgagttcttcttagtgtccctgccagcaatcttgcaagatacttggggacatgaccttcatcgctctttgctgtcatacatcaagggtcagggtttgggtggagcaaggaaggaggtggtcactttgaagcccttgccattcttgtgggcaggaagtgaagtattaagggtgttatccaaacattctctctctgctgagttttgaatcaccatgacttcctgtgcatctcttttgtactatgttcctttcctgggacgctctgaatccattcaggtggtcaagatgataagctcagctggttaagctatggggctaaggaaatcaggctcacaggttcagtctctatatgagccagttaactcggcacacaaagcaatctgtccaagtcctcagattgcctcactaactcccaccagctggcttgaaaacacgtgctgtgtagggcctggaagacggatggctaaatcataggcccattcccagtcctggcaaactccccataaaggaggccctccagacattagaaaccgctcattagattctggaactgttcattaatctggcagcacttcattttaaggcctggtgtttatcttgaagtaatttatgagcgacagaggattttgtattgttgtaaaaattggttgttgatagtgtaccagcctacttgataaatgactccttgcttcagtctgctggaatgcagagtccactcaatgggacttgaggagggagaccgtgggccagccagtgggggcttcggaagtttagttcttcatttagaaacttctactgagtgccttccatgggccagtcacagtttagatgctaggaatttaagtattcattatttccaccaatgttttcttgcctattccatgctaggcattgtgctggaccctaaagcctcagcagagaatgagacccaatccatgccttcaaggagacctgagcgtggggcaggaaataatttattttgtgccatggacttttttggcagtttggtgaagcctgtggaagccttctcagaacaattttacaggcatacaataaagcacatgagattacaaaggaagctaattataacataatacacttgtcaaaacattaaacaaatgcatcagtgctaagtgctaactattgaacatgtaaaccatgattcatgcctgttcattgccttcttctaagggatactgccccaatctcagctcctgctgctggggtggtcctcaccttgtgtctctatacacccagacacagctgagtaaagacagggaagcactagcctgaaggctactgttcctaagcaactgagatgctctgaccaatcagaaagagctgcctcgtcagagcatcactcttaggaagtgtaattggaaagcaggaaaaattctggcaataaaagggaactgaagatgaagaaatacagaaagtggactcatgtagagttgcaagtcatgaggtgtctgagcaaagtaaggttatggggaagctaaaccaataaacaggcagaagctactaagaaagggagagaagtgagtgattcagtaacttgtagtgggagagaggtagactaacacgaagagaagcagaaaagcagagtagcaaggtggcagagtggtgaagggagagccttagaaggagaattcagaaacttttcttctgaaatcccttgaattggtttggattcagaagaatcctttattatttatttatttttgagacagggtcttgctcttttgcccaagctggagtgcagtagtgtattgcggctcactgcagcctcgacttcctaggctcaagagatcctcccacctcagcctcctgagtagctggaacacaggtgcacaaccccacacctggctaaattttaattgttttttgtagagatagagtctccctatgttgcccaggctagtctcaatatcctgggctcaaggaatcctcctgctgcaggctcccaaagtgttgggattactggcgtgagccaccaagaacaaccatttcagtttttctcatgggagcctggttgtgtgtgtgtgtgtgtgtgtgtgtgtgtgtgtttttaattgcactgaaggctagcttcctggatgacattcccattttctttattaccatgcagattctcacaataaactttcgtttcctgaggcaactagagtgaatctctgttccttgtgatcaaaagagtcaaatccaaacatggcagggtggggtgaggacaatgaggccatcctactccgcctccagcaacgggtgtggacagagactgcttcccagctcccttctaaattgattttggatttgttaaaaattacccagttagttcaaaattttggcaaaacatgtcatggtttattaaaatactgcttctttttcatgttgttgacattttaatttcattacactgtgtggtacttagggtaaaagtttatttggtattttaggagaagggtatggtaaaagagaaaagtcatatcagtaaaaaattcaaggtaattaaaagtgatattgaagtggccctgttgtctggggtaaatacccaaggttcattgcctcatgccaaggaaatcaaggacaccgatacaggtgaagtgaggttaacagcagaggtttaatcagcgaaagaaagagaaaggagaacagctttctctcctgggagagacaggggtgcccaagtgggacttccagcccacagcagattgcacaggattttatagacaagctcgaggaggtggtgtctgatttacatagggcccaaagattggttggaccaggtgtgacatttacatagcatgggggtggggtagggggcagggggaagtggggaagctggtcaccccgccataatcctattatgcaaatggggtctttgctggcctgggccatgctgtctgctcctgactgcacacctagttggcaaagagaacggaggatggagccaccatgttggtcatgtctatcccctctttcctgttggcacaactgccagcaatcacctgtgcaagcttctagcctgcgtttctatgtctgcagcttgattttagaggctcctatttgttagaaaagaaaataatttggggacttcttttcattaaaaggaaaaccttactaaggactcctgtacccttattatctgatgaaataatttctttttaactcctatatcaatgtttaataatgaaatctcattcataccttgatcacctggtaatggatagtaaggtaagaagagccaataatgacctctaaaatcagaagttgcatgtggatcacttagactagaaagtatagtccatcctataaatgaaggaagagggtattggaaccagcagggactcattcatttatctattgggtggctactatgttgtcaggcaaaaaccagacagatattcccccaaggagcttacattccagaaggggaaaataaacaggcaacaaattttaaaaaaggcaaatagatgagatatgctaagaaagctataaagggggtcatgagaagagagctactgggtctggtggggctactttagatcagataagtaaggaagacctgcttctgttaggaggtgacatttgagctgagacttgaaggatgagataagccagccataggcaaaactggaggaagtgcattccagccagagggagcctgagtgctccttggagaagagcatgggaggaagaggaagaactatatgagtgagccaggagataagtaaggaccactggcttaacagccatttatggaatgctgaaaatggaccaggctctgtgctggtctcagcaatacagcaatggacaaaatatacaaaaatctctgtctttatggcagttatcctccagagtggaccaggtcctaatgtgccctataagtcataacaaaggggtgagactttagtctgaaggtgatagggagcctttgaagtgctgaaagctggggagtgacacaatcagatttgcattttagaaataccagctctgaggtcagtgtggagaatggctgcgacagggtattctagaagcaaggagactgcccagaggcaggtggcagaaagaagatgctgttctttatgtagacagtgaagtaggctggaaataaatagagccattctagagatactaagaaagtacagtggacaagatcagatcatggacaggggaaagatctaggatacagaagtgtactgtcaggtttcatgacttcaagtatcgggtggatgttgttgccatttatttcgttgggcaatgcaggaggaggagcagatttttggagaaaaattaaattgtattattcttgtccttgatgcagtttgtactttattgaggagacaagtatgcaaataaaatcattccatcagccaacgtaccagtcaggataagctaaactttgatgtgcaaactaacaaccatcagaatagcagcttgacacagcaaagatttatttttctctcgtgctacacatctaaaacggacaggattgagtgggggtctgttttcattgtagtccctggactgaagcctataaatatacgttccatcctgacatacgcatccattgggacatggttaaaaaaagaaagagagagaagtagtgaatcacacactggctcttaaatcttctgtctggaaatggtttgcatcacttctgctcacatttcattggccaaagcaagtcatagggtcatgcctaacttcaagaaaatgagggagtgccatcattctgtgtactgaaacgagggagactattcgttcttgctattgcaatctattaggtggtgcacaatttcaatttgtcctttattgacaatagtagttttgatagcttgattaaagtggtgtctgctagacttcctcactgtatggttattttcccctttgtaattaataaatacattgtagagagttactttgaaatgatgtaaacttcccatttcttatcagacttttaattaattaatatgtaaggagatttatgatttctgtttaattaatatctaaacagactcatggctacaatttctagtctactaagtgattcatatgcaacttcagattttaaaggtcatggtttccatcgaatactcatggtattcaatgagttatcattattgctgtcgttatttactcgatgctcaaattatcccagatttgatttggccattgggaacctttcaatctggcttctatgtctttttgtcatggccctgcattcttcgagcacttccttgctccagaatcatcttatacttttcttgctccagctctggccatgggtccagtcctttctccaaggagccctgattgtttatagtggagaacggtatttagaagtgaagattggggtgcttggtgtgttatttgctattgggatgttgctgcttccatgctctttcgggggacagagctgtaggatagaggcatgtatgcacacgtacacagacatacagatttacatctatacttgtatctatctttatctattatgtacattaaaaaccgtgaactcacattgatgcctccaattcaaattcaaattcaaaatcatacggtatattctggttttctctctctctttttttttcctatttacaaatcctttctctccattgagaaagttggtcctcatatccaaacttattccataagcttcccctttactcccttaccctgtgtaactaaactttcattgtcactgctgtcccctccctcacgtcagagccctcctcccacactggctactcccctcaggtggggaccctcctcattgtgcctggactccaacaaccaggccccctctcctgtctggaccttctcactctgatgtccccttaggtggaagctcctcactttgcctgggctctgacttttcattccaggttaatgaggatgttgcagcagcaaagaagttagcctggtgacatacctgtatcctactaggtatctgtgtgcagaccatttataaacctgagaatgggttacagccaactgagagttagaaacccaagttttctgattcccagtttttttctctctctcaagttcctggcatcgatagcaattaatggaatccatggaggctttctgtggttctctttctcagtttgggccccaaatggatttattttggaaaccaaatgtaagtccatttactcatttaagggttatctaaaggtgaaaaaatgctacttttttttagcagttcagaaatttttcaaatgcttttttgcgtttgaatttctcaaaagcaactttgtttggaaattttaaacttggcattcctggtacataaccctgagtgaggaatgtgtgctttgccttgtttgaagaaatttggttttgaaataacaaagttatggatgtttaaaaatactgcacggaacagacactgtgagttattttccttcgcctttgaaacatactctatattgtgaagctggtaactttcatgggtgggggaatttaatagcatatacttgactgatgcaaatgtgagatcattttataagccacatggggatctagttgaggcatcttttcaatttttactcagtaaattcacttgatctctgaataacttagaatcctggggcatagtgcctgtgtccatatcacgtactcaatgattgttgagctgatgtgaattgaacatgcttgttctcatttggctgctcatttcccctccagctccaagtggctaactatggtctgggagggtggttaacaaattacagttcgtgggccaaatacagcctgccactgtttttttttttttaatggcctgcaggctgagagtggtttttacatttttaaattcttgaacaacaataaaaagaagactaacgtatcatgacatacgaaaattacatgaaattcaaatttcagcatccataaaagatgttttatcagaacacagccattctcattcatttatgtattatctaagactgctttcacactacaatggcagagatgagtagttgcaacagagactgtatgacctgccaagcctaaaggatttactatctggacctttacagaaagagtttgctcacccctaatctaagagacagaacacacatcgtcagttcctttttaagattacttgctataaaattaaaagccaagcctttttttttttttttggtttttagtatatttactgtattgtggggcatgtggaattcagtgttttctagtgtattcactatgtactatatacactaccactgtctaattccagagcatttctatcatcccaaaaagaaatgctgtacgtattacagtcagtcccaatcctctcttccctcacattccctaatctactttctgtctgaatggattcacctattctagacttcatataaatatacataccatataagtatttcatatgaaaatttcattaaaatgttcatacaatatgtagacttttgtgttgtttttttttttcaaagttcattcattttctcacatatagtagtacttcattcctttttacaaggctttcttttaattttctactttaatacttctggcctgcctcctctttgacatttgattgaattccaattcaatatcaataacaaaaattattgtgataataataaaagtataaatcatcaagccaaatataaattttttaaactctgtccattttgttaattgcactatttccacatttgatgactaataaagatatcatgagtgaagagatttggatgataacatctattttatacatctctaggtttatgtctaattggtgcatttgttttgctttctctagctctttataagctccagaaagataacttctttcggatttcatatgcatagtgtattagtccattctcgtgctgctatgaagaaatacctgagactcggtaatttacaaaggaaagaggcttaattgactcacagttccacagggctggggagaccttgggaaacttacaatcatggctgaaggggaagcaaacatgtccttctttaaatggtggcagcacattgattttgtatcctgagactttgctgaagttgcttatcagcttcaggagattttgggctgagacaatggggttttctagatatacaatcatgttgtctgcaaacagggacaatttgacttcctcttttcctaattgaataccctttatttccttctcctgcctaattgccctggccagaacttccaacactatgttgaacaggagtggtgagagagggcatccctgtcttgtgccagttttcaaagggaatgcttccagtttttgcccattcagtatgatataggctgtgggtttgtcatagatagctcttattattttgagctacatcccatcactacctaatttattgagagtttttagcatgaaggttgttgaattttgtcaaaggccttttctgcatctattgagataatcatgtggtttttgtctttggttctgtttatatgctgcattagatttattgatttgcgtatattgaaccagccttgcatcccagggatgaagcccacttgatcatggtggataagctttttgatgtgctgctggattcggtttgctagtattttattgaggatttttgcatcaaatcacaagcattcttatacaccaataacagacaaacagagagccaaatcatgagtgaattcccattcacaattgcttcaaagagaataaaatacttaggaatccaacttacaagggacgtgaaggacctcttcaaggagaactacaaaccactgctcaaggaaataaaagaggatacaaacaaatggaagaacattccatgctcatgggtaggaagaatcaatattgtgaaaatggccatactgcccaaggtaatttatagattcaatgccatccccatcaagctaccaatgaccttcttcacagaattggaaaaaactactttaaagttcatatggaaccaaaaaagagcctgcatcaccaagtcaatcctaagccaaaagaacaaagctggaggcatcacgctacgtgacttcaaactatactacaaggctacagtaaccaaaacagcatggtactggtaccaaaacagagatatagatcaatggaacagaacagagccctcagaaataacaccgcatatctacaactatctgatctttgacaaacctgagaaaaacaagcaatggggaaaggattccctatttaacaaatggtgctgggaaaactggctagccatatgtagaaagctgaaactggatcccttccttacaccttatacaaaaattatttcaagatggattaaagacttaaacgttagacctaaaaccgtaaaaaccctagaagaaaacctaggcattaccattcaggacataggcatgagcaaggacttcatgtctaaaacaccaaaagcaatggcaacaaaagccaaaattgacaaatgggatctaattaaactaaagagcttctgcacagcaaaagaaactaccatcagagtgaacaggcaacctacaaaatgggagaaaattttcacaacctactcatctgacaaagggctaatatccagaatctacaatgaactcaaacaaatttacaagaaaaaaacaaacaatcccatcaaaaagtgggcaaaggatatgaacagacacttctcaaaagaagacatttatgcagccaaaagacacatgaaaaaatgctcaccatcactggccatcagagaaatgcaaatcaaaaaaccacaatgagataccatctcacaccagttagaatggcaatcattacaaagtcaggaaacaacagctgctggaggggatgtggagaaataggaacacttttgcactgttggtgggactgtaaactagttcaaccattgtgaaagtcagtgtggcgattcctcagggatctagaactagaaataccaattgacccagccatcccattactgggtatgtacccaaagggctgtaaatcatgctgctataaagacacatgcacacgtatgtttattgcggcactattcacaatagcaaagacttggaaccaacccaaatgtccaacaatgatagactggattaagaaaatgtggcacatatacaccatggaatattatgcagccataaaaaatgatgagttcatgtcctttgtagggacatggatgaaattggaaatcatcattctcagtaaactatcgcaagaacaaaaaaccaaacaccgcatgttctcactcatagatgggaattgaacaatgagaacacatggacagaggaaggggaacatcacactctgtggactgtcatggggtggggggaggggggagggatagcattaggagatatacctaatgctaaatgacgagttaatgggtgcagcacaccagcgtggcacatgtatacatatgtaactaacctgcacattgtgcacatgtactctgaaacttaaagtataattaaaaaaaaaatggtggcagcaaggagaagtgcagaacaaaagggggaaaagccccttataaaaccatcagatctcaaaagaagtcactcactatcaagagaacagagggtaactgcccccatgattaaattacctcccactgggtccctcctatgacacgtggggattatgggaactacaattcaagatgggatttgggtggggacacagagccaaaccatatctcatggtgtagggcacaggacttagaatcacaagggtctgatggcattcttcctgaatcatgttattggagatactcataatgcgtaatgatgacaaatctcaattggatactccaccctgcctgattatcctacaaacatccctagtcagttcactttctcattcttgctgtgagttggttgcctcatctcatacttcccagagaatatggaaagaacaagatgagagttaggtccataagtatgccccatgtacttgcatgtgtatctagatgatgatacagatcatcacctaacaatgggccttttcaccagaggtaatattccctttatttctctcctggatcacattgcttcttgccttctacaggacttggctccttatttaccatttccttgtttccactaccagttttcctcctcttctgcatcattccaatcagcacatgagctagttctaataagattcatcttttaaaacctgccctttccccagcactcttctctaattactgctgcaagtctttgctacttttaagagacctgctaaaaccattgtctatgtacttgttatcttcactttctcatgtccttttctattctccatttattctaaacagattctatttaccaccacttgtgacacttgttaaggtccctagagactccatctgaccacatctatttgattatgttttttccctactttgcctaccagtcacacacactgtggtgtttcactttccttttaaaacactttcttatctggtcttcgtgggtaccacactcttccgattttcctcccacatgattggtgatttttcttcttagacgaatctttgcagggattggacatcccagtcagaaaatcaaaaatctgaaatgctttaaaatgtgatgtttttgagcactgatatgatgctcaaaggaaatgctcattggagtatttcagatataatgcatgtattctaatgtcctccaaaaattgaaatccaaaatacttctagtcccaaacattttgtctatgggatactcaacttctacctagtctctgctttatcctcaatagctgcaacagtgcttggcatagagttggtctcaaagatgacttgtggaatgaatgaactcaccgaccttgttcccgcattgacatctttgtatttgctgatttgcttggaagattttccctccaggcctccacttggcttcctttttgtcattgttcagctttcaattcgagtcacttctttggagcaggcagcccttgccagccttctgcttcccattcccacccctgtgactctctaggacagaagtaagcaaaccttttcttcacagagtcagatagtaaatacttatgacttctcagttcatccaggacctgtcacaacaacctaactttgtcactgtagtgtgaaagcagctgtagataattcctacatgggtgagtatggctatattccaatacaattttatttacagatactgagacttgaattttgtacatgtcatgaagtattaatcttttgattttttttcaatcatttaaaatgttactttgtgagctgcaccaaaataggcagtgggctggatttgacccagaggctatggtttgctaatttctgctctagtgcattaccctcttttatctttgtggtgctgaaaattatgttatttattcatttgctattgtaatttgttttccctttcttagaacatggttaccttgaaggcaggaattctgccttattccttattctattctcagagcctacaacactgcctagatgcctcctgcccaggctagagctacccctaccagaccttgcccctccccatagccctttctctttaaaggcttattctctttcctctcccatattgatagcttccctcttaggaattcagggttcatttcaagagagggagtcagtaaatttgtcatctggttggaacaggaacctcagattttagtggggaggggcccacttaacgtgattatagctgattcccggcatctaactgttctgattacatcctatttatcccagtggtaaaggagggatccccctccacatagtgtgagatagtcatgcacgagacacttgacactgggcagataagggtgacagcagtttaatagtcacatctattcactctggaggtagaggacactgcctgccatgcagggccaatggggttgcactcaggaagaatgagctggcagggactgtgggaggcaggctttgtagtatcaacagggtgaggtgacccctggttaccaagcgaggatgtgattggcttgtttgaataatttcatgtgctgttagggagataaaatccactaagttgaaaactgaatggggttaagatgattgggctggtgggaaactagcagaatggggtctgtttcctgctgggttgggtatatctggtgagagcaagagaactcatgggtaggccttttgggacctggctcagacctaaaatttaaagggccaccttaacatctcggctcaaagatgttaaggtggcactctaaattttaggtctgatatactagcaccaagcttagagtaataaatatttgttgaatgagtgaaggattttacttaacctttattcagtatctgtatgtaacagcttcatatttgctactgaggacaaaaagaggattgggaggccgggcgcggtggctcatgcctgtaatcccagcagtttgggaggccgaggtgggcggatcacgaggtcaggagatcgagaccatcctggctaacacggtgaaaccctgtctctaccaaaaatacaaaaaaaaaaagaaaaaattagccgggtgtggtggcgggtgcctgtagtcccagctacttgggaggctgaggcaggaggatggtgtgaacccggggggtggagcttacagtgagccgagatcgcgcgactgcactccagcctggtcgacagagtgagactccgtctcaaaaaaaaaaaaaaaagagggttgggttacaattacatttacattataaggctctgtacaattacaacagagagcaataaatgttctaatggaatgtaggttccagggtttgtcagaatgctgatgataagtcaatgtatgggtaggatgggaacaaaaagagggagttgcattgaatcagttccatgtttttgttctcatctgttcatccagtatttattgagggtctatcatgggccaggctaggcaactaagcttttgttgtttctaactgaacccaggagacaagctacaatggttgaacacagaggatgaattggaattagcatatgaacaagggcacactaatgtggtctaaatagtcttcccgagaactgtaggaatgtggccagcacatgttctcatgtgagtgtggtgagtcagggacaccttggaggggcgtttggagttcaaggcagtgatggacgtggattggcaggaaggagaggtaaggcaatccaggcatgagtcattctatggttggtttccttgctaaatagattctttcacagggaagagtcatctcttgtccaactactttcctctgttggatttgcacagccatagactacaccacgtctttgtttatggggattataaggctgtatttgcagctgaattttagtcaggcagaacctctcatcatccagatcctggtcttcaccataaaatgtgggcaggaaatgggagccataaactccttgctctcctgaatcaacttattttgataagactctttagtcctcatttcactcttcgtgtggtggaaattcgtgtctgtattaatttgtcacacgtttattgagcaagtgctttgtgcaagacaaagggcctgggtctgggtaaaacagcaataacaacaaaaaataaagatccctgtttttgaaaaacttgcaagataacagggagtaatagcaacaacaagatagcaaataaaatcccacgtaaataaagtataagacactgactctcaaacaagaaaactgtggctgagttttgattcagccttctattagctgttacaccatagaaagtagcttagtctgtctcttggctcttctctaaaatgggactaatagttcaaacacctcataatgttcgtgtgaggatgaagtagtataagattaaatgttgttagagcagagtctgaacatagaagtcaataaatgctagcccttattattattgttattattattatcattatgacagagacatgttcagtatgcagtgtgtatacataggatagacaaccaatagggaggaaaggattcgtgaacgttttcccataagtggtgacacttgaactgaatctggaaagaagggtaatgaccgttgctaaaatgtgtcgagtacttatgagaggtcagatactgttctgagaacataacatggataatctctcttaattctcacattaccctctgaggtatatgctaatattaccttcattattacagaggaaagacaagtaggacttaaccaggcagagaaaggaccttggggaaggcattttggatagtggtacagatccaaaggtctagagatatgaaagattaccagattaatggaactcaaagcagtgcaatatggctagaacaacaatttaaaaaagatgggaaatggtgtgaggtgaagctggagaaataagaaggccagattattgctgtcatcccagagactcattggataccccaactgaatatggcccagcattctctctaacaaagctctggccatccacttttttatttttattttttaaatttttccataagttattggggtacaggtggtatttggttacatgagtacatgagtaagttctttagtggtgatttgtgagattttggtgcacccatcacctgggcagtatacactcaccatatttgcagtgttttatccctcgcccccctcccactctttcccccaagtccccaaagtccattgtatcattcatatccatttgcatcctcatagctttgctcccacatatcagggagaacatacgatgtttggttttctattcctgagttatttcacttagaataatagtctccaatctcatccaggtcactgcaaatgctgttaattcattcctttttatggctgtgtagtattccattgcatataaataccacagtttctttatcctctcgttgattgatgggcatttgggttggtttcatgattttgcaattgtgtactgtgctgctatagacatgtgtgtgcaagtatctttttcagttaatgacttattttcctctggatagatacccagcagtgggattgcgggataaaatggtagttctacttttaattctttaaggaatctccacacggttttccatagtggctgtactagtttacgctccctccagcagtgtagaagggtttcctggtccccacatccacgccaacatctaccgttttttgattttttgattatggccattcttgcaggagtaagatggtatcgcattgtggtttcaatttgcatgtccctgatcattagtgatgctgaacatttttcatatgtttgttggccatttgtatatcttcttttgagaattgtctgtttatgtccttagcccactttttgatgggattgtttgtttttttcttactgatttatttgagttcattgtagattctggatattagtcctttgtcagatgtacagattgtgaagattttctcccactctgtgagttgtctgtttactctgctgactgttccttttgccatgaaaaagctctttagtttgattaggtcccagctatttatctttgtttttattgcatttgtttttgggttcttggtggggaaatccttgcctaagccaatgtctacaagggtttttccaatgttatcctctagaatttttctcgtttcaggtctcagtttaagtctttaattcatcttgagtggatttttgtataaggttagagatgaagatacagttttattctcctatatgtggctagccaattatcccagcaccatttgttgaaaagggtatcctttccccactttatatttttgtttgctttgtcgaagatcagttggctgtaagtatttgggtttatttctggattctctattctgttccattggtctatgtgcctatttttacaccagtaccatgctgttttggtgactatggcctcatagtgtagtttgaaatcaggtagtgtgatgtttccagatttgtcctttttgcttagtcttgctttggctgtgcaggctctttgttggttccatatgaattttagaatggttttttctaattctgtaaggaatgatggtggctggtattcaaatgaggattgtgctgaatttgtagattgcttttggcagtatggtcattttcacaatattgattctacccatccatgagcatgggatgtgtttccatttgtttgtgtcgtgtatgatttctttcaacagtgtttcatagttttccttgcagaggcctttcgactcctttgttaggtatattcctaagtatcttattttatttttattttttgtagctgttgtaaaaggggttagttcttgacttgattctctgcttggtcactgttggtgtatagaagagctactgatttgtgtacattaatcttgtatctggaaacttttctgaattcttttatcagttctaggagctttccggagtccttagggttttcaaggtaaatgatcatattgtcagcaaacagtgacagtttgacttcctctttaccggtttggatgccctttatttctttctcttgtctaattgctctggctaggacttccagtactatgttgaagaggactggtgagagcaggcatccttgtcttgttccagttctcagagggaatgctttcaacttttccccatccagtgttatgttggttgtgggtttgtcatagatggcttttttacattaagatatgtcccttgtatgccgattttgctgagagttttaatcataaagtgatgctggattttgtcaaatgcttttctgcatctattgagatgatcatgtgatttttaaaaattttgtttatgtggtgtatcacatttattgacttgcatatgttaaaccatccctgcatctccggtatgaaacccactaggtcatggttgattatctttttgatacgttgttggatttagttagctagtattttgttaaggattttagcatctatgttcatcaaggatatcagtctgtagtttccttttttggttatgtcctttcctggttttggtaatgccaccttcatagaatgaattagagagggttccttctttctctatcttgtggaatagagtcaaaaggattggtaacaattcttctttgactgtctggtagaattctgctgtgaatctatctggtcctggacttcttttttgttggtaatttttaaattaccatttcagtcacactgctcattattggtctgttcagggtatctaattcttgctgatttaagctaggagggttttatttttccaggaatttacccatctcttctaagttttctagtttatatggataaaggtgttcccagtagccttgaatgatcttttgtatttcagtggtgtcagttgtaatatctcctgttttgtttcttagtgaggttatttggattttctctcttctttttttggttaatcttgctaatggtctatcaattttatttatcttttcaaagaaccagctttttgtttcatttatcttttatatatttttttgtttcaatttcatttagttctgctctgatcttagttatgtcccttcttcttctgggtttgggtttggtttgttcttgtttctctagttccttgaggttgaccttagattgtctgtttgtgctctttcagactttttgatgtaggtgtttagggctatgaactttcctcttagcactgcctttgctgtatcccagaggttttgataggttgtgtcattattgtcattgagttcaaaggattttttaatttccatcttgatttcatttttgacccaatgctcattcaggagcaggttattttccatgcatttgcatggttttgaaggttccttttggagttgatttccagttttatttcactgtagtctgagagagtgcttgatataatttcaattttcttgcatttattgaggctcattttatgtcatatcatatggtctatcttggagaaatgtgctgttgaatataatgtatattctgtggttgttggataaaatgttctatatatatctgttaagtccatttgttccaaggtaacaaatggacttaaatccattgtttatttgttgactttctgttttgatgacctgtctagtgctgtcagtggagtattgaagtcccccactattattgtgttgctgtctatctcatttctaaggtctgtttgtaattgttttataaatttgggagctccagtgtttggtgcatttatgtttaggattgtgatattttactgttgaacaaagacttttaccattatagtgtccctctttgtctcttttaaccactgttactttaaagattgttttgcctgatataagaatagctacccctgctcacttttggtgtccatttgcatgaaatgcctgtttccacccctttactttatgtgagtcctgatgtgttagctgagtctcctgacagacagttggttggtgagttcttatccattctgctgcagggttcagtatcttttaagtggagcatttaggctgtttacattcaatgttagtattgaaatgtgaggtaccattgctttcatcgtgctcttcgttgcctgtgtactttggttttttttttgtttgttttttgttcttgctttttaacttacattttgttttataggtcctgtgtgatttaggctttaaagaggttctgttttgatgtgtttccaggatttgtttcaagatttagagctccttttaacagttcttgtagtggtttcatggtattggtgaattctgtcagcatttgtttgtctgaaaacaactgtatcttttcttcatatatgatgcttagtttccctggatacaaacaagcaccaaaaggtattttaaactaagacacattcaaagaaacatttgaaaggaaaacagataaaagcatcaaataaatgtggaagtgtaaccccaacagcccaacgcttaagtcatgtccatgatttagggcaggtacttgagaaggatgctggagccttctagctcttaggaaccctaaagccacctgaccaggtgggtgacacatttgaagacaggcctggttcaaatggcagctaacactctcctgtttgtaatccaagaaagagaagctcattagtacctctcttcccccctcccctgtccaatgcaccactggggactcttcttaacagcatatcttctattccagtgattcatgactttgattaaactttatctttttagtgccccttcttctccctgttttataagacaaatgttatttttgggggtagtgttcagggtcagagacttttcagggtgcctgtgctcagtctgatggtgagaccaggatgttgaatattttgtcatttgcctaggtgacttgatacttgtaaaagcgtatatctctctctgtacctccatgctgaccaaacttcagttcctctgagaattttatgctaagaaaaggctcatcttctaagaaaataacactaatattaaacagttgtctcttggaggtctatgataagcaagatgctttacacatctctagtcaagggactgttttcttcatttttcactagagagaactgaggcttagagcatttaattcccaggtcttcagtcatacggtatctactagacctggggttcaaaccccagtccttcagactccaaagctcatgcattctagaccacactggagctgccagcttcttgttatagaacactttggggttccctctcttgatgtgactgcaagtaaactctggcatttatttatttatttatttattttttgtttgggatgaagtctcactctgtcgcccaggctgaagtgcagtggcaccatcttggctcactacaacctctgcctcccgggttcaagcaattctcctgtctcagcttcctgagtagctgggactacaggcgcgcaccaccacacctggctaatttttgtatttttagtagagacagggtttcactatattggccaagctggtcttgaactcctgacctcaagtgatcctcccacctctgcctcccaaagtgctgggattacaggtgtgagccaccgagccagtcctaatttaatgttcatggatggtaattactgtctttatatttctcgtttaattatctctcttttttattctagattatttttcatctctctgattttgtttgtaacacttgctgaatatacattggagtctatttcaatctgcctcaaattctctactttttttgagatttggagtttagattataaataaatgactaataaagtcacccagtcttcagctctttattaatagctaataaacttcattggtgctattgaattttacggggtattcatttgccatgtattgcctcatattgcatttaaatttccatttagccagaggccagactcttaggccagacacctgaaagccaagccttctattctccctctctcactccatatgcaattagtcagtttgttctcctgaccctatttcctcatcacctctataagtctcccttccttcctctcttttataagcagttcgggactttgatatccctcttgactattgcaattactttctgactgatcttccttcctctaatcactctttacttactacagcaatcattttttaaaatttattttttatttttaaaagttttaagagacatggtttcactctgttgcccagcctgggtgcagtggcacaatcatagctgacggcacccttgacctcctggactcaagtgatcctcctgcttcagcctcccaagtagctggaactataggcatgcaccaccacaccttgctaatacagcaatttttgtaacatgcctatctgctgggtttattctacttattatttatactgcttactgtttatcatgtatttatgatcaacaggtaagagcaaccatctcagtgtagcacacagaatcatctgaaatcttgcccttacttaccagatccacgtggccttttaatactcttccacaagctctctcatagcacaagggacttcaagctattgtggtcccagaggaggccatgcattctcactccccaagttttcctgtgtgctgtcttctctgtctggactgctgttcacccccgactcacccactcaaacaattctatttgtgaaggtttttctgcacctctttctgcctcacatatatttaaccaatccctcttttatgctcattttatatgttggcttttttatttttatttatttattttttttaattttacttgaagttctgggatacatgtgcagaacatgcaggtttgttacataggtatacatgtgccatggtggtttactgcacctatcaatccatcatctaggttttaagccccacatgcattaggtgtttgtcctaatgctcaccctcctcttgcccccccaccccccaagacaggccccggtatgtgaggttcctctccctgtgtccatgtgttcttgttgttcaactcccacttatgaatgagaacatgtagtgtttggttttctgttcctgtatttgctgagaataatggcttccggcttcatccatgtcctgcaaaggacatgaactcattctattttatggctgcataatattccatggtgtatatgtgccacattttctttatccagtctatcattgatgggcatttgggttggttccaagtctttgctattgtaaatagtgctgcagtaaacatatgtgtgcatgtgtctttatagtagaatgatttataatcctttgggtatatacccagtaatgggattgctgggtcaagtgttatttctggttctagatccttgaggaattgccacactgtcttccacaatggttgaaataatttacactcccaccaacagtgtaaaagcgttcctatttcttcacagcctcaagatgttggcatttgttgatgcatctatcttctccatgaatctgtgggtttccttatgggtcgggagcaatatggggtagggcagaggctgtaaactggtggccagcaggccaggtatggtccctgaagtgtattaaaaatacctttcatagcatttaattttcttaaaaattagttgccaactttgaaaattcaattgatttcatatggaaattaaagcttctggcttttctttaaacattagaaggtcagtatcccagggaccttatttctgcacagcaaccatcagctggaataagacaagtgctctcaggtttgcttctctggttcagattccatatctggtccactggaggcactggggtatgaaaaccctgaagcagtaaggataggggtggtggagctgacctcggctctaattccagctttcctgtttattggatttgttaccttgggcaagtgtcttaacttctctgaacttgagcttattcatcctcaaaaggtaagcagtagtatactgaaggattttgcaaagtttaaaggggaagatgagcaaagaacacttggcatatagtaagcattcaatattaacggctactttgatatcattattgttgttttgaataagtatccatgaatgaacatgacccttgccatcagaacactaaccaggcctgaccctgttagtttctgagatcagatgagattgggtgcattcagggtagtatggctgtagactgaacatgaatcttattcccccaactatgctgcacactttttgaggccagagaacaggactgttctttgtaagtactttgtaggcaaaatttgatatgtggtgcccttgtgccttgggggtaggcagtataaatgaggtttaagaaacagtcaaggaagtctgtcccttcaggatttctctgtgtccctaggggcagagtctgcaatttctacgtctgtagaaaagtttaaatgtcactttctcagggaagcattagctaatgccccagaataagtaatattctcctatgacatgtgcttatacaatttcattcttctccgttgcagtgctttcaccatttcgattaataattatccttagtgtgtatttcatctatgagacagtacagtccacagggcaaggatcagcctgtttttcactgttgaactactggtgagctaagcacatagtaggcatttggtagaagccatagatggtagtagaaccatgacttggtttcctcatatgtgcaataaaggtaataatacctaccttgtagtgcagctgtgaagattaagtagggtaattaaggtaaaatctgtagaatagtacctggcacataaaagtacttagtagtatttgctgttcttattttcagcaaatatttattgaattttcataaataaatgattacatgaatatattcttccttattgagcacagaagagtaaatgatcagatagcacatacacctgtgttctggtgcagtatctatcagaggaaactcacaggggcagggctggaaacaggtatgcaggtcctctgctgcccctgtgaattagtgtacaaatctatcagggaccaatgttagactccaggagaggggctctggcccatggtcttctgcatttatgtgatattttccatgtcacatatcgtatttgtgtgcaacataccaggaactaagtccgtgggtggccaggaccactggaataggcaacctctggtgtaacaatagagcttgaacaaaaattagttggggtttcagtggcctgggcagtaaggcagggaaggaaactgggaatgggatgggctgggtctagaagcgttaaccttattgaaggcccactttcttaatgggcagatgagaacggtagtttaaagtctggtagattagaattgaatagactataagaaaataaaatttttcaggtggaacagaggaggaaggattccctaataatgatgatacttacaatctgatagtatccatatcaagattatagacaactgtcctttttgcaacaggatcccaagaggtactgaagacaagttctagcttccagaaggagcccagcaagtgcttgacaggaactcccaccgggtgagctgggggcagaaaacagctctagtgtcaggtgaaaaattgatgccaaaaaaaaaaaaaaaaatgaaaacagcagccttgtcttagtatagaaagtgggatggtgagggaatatagctggttggaaaggggtggctgatgttgagtagccatttaaggtatgctggccatcaggaacaggtcaccaagcagcaaatgccaggtcctccctctgtctacttgtcacctcacatcccccaaatgacagcagacatccagtaatgagtagtggcctaggggttggctgggattgaacctctaactttcattaccagctgctaatcactggtaaggaggggacgaactgaccacctcaactttgactcccacaaaagccacatttcaagatgtgagagtcctcatcttctcaggtctatccctgcctgtcttgtcttttattgagttatatatatatatatataattatgataataattattattttttgcacagccttggagatgacctctcctggtcatcagtacagaaggttgtcttcctggcatctgcaatgagatggagccaggaatgacctgttagctcatgatcaaacccaactccaaaaattttcagtttactttccatcctcaaaagattgagagaagcctcattaagcactcaaaatctttgatgtttgactaagctgaccctgttgatccattcaaaagttattcttagcagagcagggtgaagaaccggttgggatttatgtgggggctgcaggctgaaaaacactgagcaaggggctggccaaagttcctcttgggaattttgtcaattacagtgctcaagtcttggcccttgatttttttttttctctccccttaagggggtgagggctagttaaagcagtgtttctcaagcttgaatgtacatgagaatcactgacaatcttattgaaatgcagtttcagattaagtatgtctggggttaggaccagggtcctgatatcgtctccctcccttccttcctcccttccttcctctctctccctccctcctccctctctctctccctctctctttccttcctttctctctttcttttcttttctttctctctttccctttctttctttgtttctttgtttctttctttctttcttctccccttttgtccttccttctatccacacttccttcctcttttctttcctttctttcttttttctctccttcattccttctttccttctctctcaccctccctcctttccttttttccttccttcctttctttcctttcttcctccttccctttctttccctccctccctccctccctcctccctttcttccttccttccttccttccttccttccttccttccttccttccttccttccttccttctttctctctttctttattttctttctttatcttgctctgttgcccaggctagagtgcattggtgtgatcctagctcactgcagcctcaatcctgtgatcttcttgcctcagcctccctagtatgatactctatttcaaataagctcctaggttatggcaatgctgtgagctcaaggaccacagtgtgaaaggcaagggtttagattgtagtttatgtttatcagccaaattgtggctccagagagaagcaataaagcctaaatcaaagtggatatatttgtagagtgaacagcatgcattttaacagaatcaattgcctgaatggtagagtctcattgtaaagtggatttagatttttaagttataatgagagaaatgctttagtataatttttaaaagggggcacatcatttgacctaccataaaccaaagtagtattataatgaggcccttcagaaatgaaacttgtcagatggatttaggtttccattgcagaaactcctttggaataaatgtccccaaatttctctacttgagaaatataaatttcttgggatgcaaaaattgtgaacaaaactgttggagggaagagatgaagaagaggaacatgtgcaggatcataatgcagctttgaaggcaaaaaacaaaaacaaaaacaaaaatccaaacaaaaacacccaaacccagtgggactgccatttagatctgagccaaaagaatgggcttgagatcaatcagcctgaagcctctacattctgaaggcaggagaacggctaaagttagcatgtgcagcttcctacacactgggagtaatctaaaacagatattctccaaaggatacttccagtgtttcctggccctgggccagacacttcaaagcttcattatcagtgaattgtggtccctctgttaggaaagctgggtgatgctctgaggaaatgtcagctcctgatcacagtttcctctcatttcagtgcacagaggtcagaggcgctgagggctgcccacactctgccagccggccaagttgccgactctaactgtgcacgttggagcttgccttcttaatttcatcatgagttaagatgctatctgaagggaagcagggtttgaaatggtctctgctagcagatggatgacttctctccagaaatctgactctgccagaaaccgctcaccttttcaatgaaaagaacacagacagattccatgtcctaggcttttcaattgttcctggttgagttggtcagttgtcagcgttgggcacccctgtggtgctaagtattatacacaaggattagcaagctcacaagacagggaatcttaagaagtctattttgaaaatatgaggacgtcacatatttccatttctacagtctcttgagttctgagcagtagtacttgcaccaatagaagtgcactgtggagctgaacttcctcaaacccaagaactccttcattggagaccaaatgtcctctttgtagtttagtgactgtattagtctcttttcacattgctataaagaaagacctgagattggcaatttataaagaaaagaggtttaattggctcacagttcttcaggcagtacaggaagcatagaagcatctgtagatccccagcatctggggaggcgtcaggaaacttttactcatggtggaaggcaaagtgggcccaggtatcttacatggcaggagcaggaggaagagagagagcggggaggtgccacacaattttaaacgaccagatttcctaagaactcactcactatagtcaggacagtactaagacagatgattcgaaaccattcatgagaaatctgcctccatgatccaatcaccgctcaccaggccccacctccaacactggggattacaattcaacatgagatttggtggggatacagatccaaaccacatcagtgacacaaacatggcataaagatgagactacattcacacagcaagccagggtcctaactctggatccaggcataaagctgttcgcaagagtgttaggacttccgagttcgctatcctgaccttaaggaagtatagagagataaacatgactaattgggatccaggaaattgttctgttgtttctgggactagttgattcttgctttgggggacttgggtggagagaggagaggaataaaaaggctgggtgcacaaatggtgagaaaaattgctccaagccaggtagtacccacctttttattctacatgggcttgaatgtcagctttgagtgaaaaggaaatgtcccttagtggacttagtattatgtgccattgtaaaaacttttgtcagcattttgggctgtttagtaagtgtgtcatcagggccagttcttggaaaaattgaggtttgtccctaatacctatttctcattctctttccgcagtaagatattagttgataaagcttagggtgtgatagctcttggggatatttgcatattattagaacactcttttgtttttcaaaataaaaaagttttatgaggtataaccaatatatagtaaactacacatattaaaagtatatactttgataagttttgacacatatatatatttgtgaaaccattatcacaataaaaattatgagtgtatgcatcacccccaacattttccttatgcgcatttgtaatgtcttcctctcatccctgaatctccactgatctgttttttttttttttttttggtcactatagataagctaggatgttctagaattttgtataaatacaatatattctctattttggtctggcttctttcactgcagataatgattattagatttattcacgttgtggcatgtatcaatacttctttcatttttattgtattaatatgccacagtgtgtttatccattcacctgttgatagacatttgggcggtttccaggttttggccatgacattctgctgtgaacatactagctgctatgaacattcttgtccaacgtttgtatggacatatggtttcatttctctgaggtaagtacctagaagcggaatgcctggatcatgttgtagaagaatgcttaacttttttttttttttttttttttttgagtcggagtcttgctctgtcgcccaggctggagtgcagtggcgcgatctcggctcactgcaagctccgcctcccgggttcacaccattctcctgcctcagcctcccgaatagctgggagtacaggtacctgccaccacgcctggctaatttttttgtattttcagtagagacggggtttcaccgtgttagccaggatggtctcaatctcctgatctcgtgatccgcccgccttggccttccaaagtgctgggtttacaggcgtgagccaccgcgcccggccgaagaatgcttaactttttaaaaatattgccaaactattttccaatgtactggtactattttatagcatattcctaccagttccttcatatcctcaccaacccttggtatagtcagtctttttaaattgatccactttaatacgcatgtagtgatatcttattgtggttttaacttatgtttacttaatgactaacgatgctgagcatcttcatgtacttatttggcatctatattcctttattggtgaagtgtctgttcaaatagtttgtccattaaaaaatgtgggtgtttgctttcttcctattaagagttctttatatattgtggatacaagtactttatcaggcatatgatttgcaaatatttctctacgactatggcttgtttattcattctctaactaatgtcttttaaaaagcagaagttttaaattttgataaaattctaattatcacttactttttctttcatggattgtgcttttggtgttgtatttaagaaatttttgcctaacctgaggtcaaaaagattttcttccatgcttttttctacatgttttgtagttttagggttaacatttcagtctatgattcatttgagttacttttgtatatgttgcaagatacggatcaaagtttattttttttgcttgtaaacacccaagtgttccagcaccacttgttgaaaataatattctttgtccactgaattgtttttgcatttttgccaaaatcagctgtatatgtatgtgaggcatgtatggacattgtacgtgttccattgatgcctatttctgttgaagtcaataccatactgtcttgatcaccttagctctgatgaggcttgaaatcagatagtgttagtcctccaactttattccttttcaaagctgttctggctattctaggtccttgcgtttccagataaattttagagtcagattgtcagttcctacaaaaagagcctgcttggattttgatttggattgcactgaatctacagactggggagaattgatatcttaagaatattgagtcttccaacccatggacatattatatgttaccatttatttaaatttggtttatttttgaaaacactgcagaaatgtcgtgttttgtagatttcaggtattgcacatgttttgtgagatttacttctaagtatttcatatttttgttgctattgtaaagagtgtttaaaaacatttaattttgaatttttcttgttagtataatagaaaaacagttgacttttatacattgatcttgtattctccaaccttgccaagctcactctctactagctcttttttgttgatctcattggattttctacataaacaatcatgctgttagaacgttctttaagactaaaaagacttcaagaccaatactattttaaaagcagaatttttttatatgcatatgtaatcttaatgaaagcagctcacggagaaaggtcagtactttaacaattcatttctgacgatggttctttagagcaccagaaggtgatgagtgacacaaaagtttccttggcagacacgtggatcctatatctttggtttctcagcacaacagtggactgtctcactttcacttgctccagcccagtctggtgctgggctgtaaattccattttatagtcatattttatgtgcacttagaatacctctacaaaccatacaggaaaaacctatatacatggctaggtgctagcacacatttcaaattaattatggctttcaattcattgatagtgagttattactttttaaaacattttaagttgcctgttttatcaaaggggagataaaattgaaaacaaaagaaaaaaaaccagcaacagtacatttgcatctttatttatcctttctttgcagtcctgcagttttttctttttttaaaataaaagttcacttttttttttctcctttgggaaaggattgcagaggtagctaaaccacatggtgaaaactcatgtgaagactgagcttttgatgtgtttatttttgctggttcagggaggcatggtagttgacagtggaattgcttgcctcccagatggtgcaggcagaagcgttactgaacgtgcatgccctcacctcgttctctcacacttacacatatgcactgccttgtgttacctgcagaacctctctgacctgcacatatactccacattcctcatgccactctcctttccctcatcctccctggctcaatgtatcttgatgcacttgttgataatactgcagattgtcagcattgctcatgtgtatggttctggaagaaaacgcaagattagaggccgggcatggtggctcacgcctgtaatcccagcattttggaaggccaaggcaggcagatcatgaggtcaggagattgagaccctcttggacaacatggtgaaaccctgtctctactaagaatataaaaattaactgggtgtggtgacacgtgcctgtaatcaatcccattacttgggaggctgaggcaggagaattgcctgagccagggaatcagaggttgcagtgagccgggatcacaccactgcactccagtctggtgacagaatgagactccgtccaaaaaaaaaagggagattagaaaacccctaactcctatacatgtgttcatgacaacactttagctttagtgcccactttctccaagacaatggaaacatgaaggaaggatattgagtagttaagtagagaactaatgaccatccattgagcatattatttgtgaggcaagggtagggggagtgacaggcagaacaagaaggtctctcctagcattcacttagtcagcaaatatttttgagtgccaactatgtgctagcctttatcttaagtgcttcgcatatttaaccaaagataggggagggtggtgacagagaataaataataagtgtaataaataagcaaattatgtagtacattaggtgaaaattatatggagaagagaaagagcaaggctggctctattgcttttctccaaataattggacacaaaatggaatccagagaggaatctggagaggagtgaaaaatgattataattttgaataaggattgcagaatgatatttaagcttgaaggaggtaagagagtcagccatacagaagtgccattttacccactgtgactggtttaaatgggaccatgcctggcatgtttgaaaaatagcaagtggccagcacaatgaaactgagacctggtccagtccatgtcagcctctggtagctctgaatatgagaagaaacctagctggagacaggaggatgggttagctgctttctttaggcccctcttagtctccagtattgtggtttttgacagcttctgccaggagggcaccagctggtgtttggtcacactctatgctgccttccaatctctagctatttcattaaaaaaatttgggtaagagtgaacaataatagaagcttcagatgtgaaaataaggttgagttttgttagaaaggtatttggggctgtgttggatggggtggtgtgggcagtgtgtgtgtgtgtgtgtgtgtgtctgtgtttgtgtgtgtgtgtgtgtgtagttactgttgccagacaatgcttctgaatattctcaataatgacaaaatcttggccttttgtcaagatccaagtctggtgtatatgatgggtgggaaaaataaactgtaatgaagctgacaaccttgggtgagccataactttgatctgaaggcaatttgcaaagtgaagttccaaaatgattttagcaccagcaggactttttggatgtgtgtgtggttgcctacgggctactttaaaaggaatactcttaggaaaacaagcttgatccttaaggaaagaagatgaccttaaaaaaaaaagaaaacataagaggcaggaccatttgttctccaaacctggagtaactacagcattctgttttcctaaaatgtggaggtgttggagaaggtgttgaggtgttgaaggtcagattgcttctgcctcacgtcatctgcagggtgaggaacaatgcctccattgttgtatgtgtgtatttctcattattagaatgctatgactgtcttatatttttatgaaaatttggtgaatctgtaaaggaagtgtggttgtattctcacagagggtgaggacttttctggtatgaggaagagtcatggttcgggtcggaaaatggcacgaggaaagagtttatgaaatgacttcaggtgagaatctgttctattcatctaatgcttggtcttaagcatggatcaacatgttgagatgtttccaagtgggccaccaagtggtgggagttaacacagtggccagaatgtagaggtgagtagttgggggcaggtgggcattggggtgggggagctgtccagctgtaccagtcctgtggggcttaagacaaagcgttcagtaagacagagtctgtgaaccttgggagcaaataaaccaaggtaagatcaaaacctagattctttgtgtttcttcttttctgtagcctctcttagcatttaatgaaaagattttgaaattttgagctattctaaggggaaccaacagtgctgaaagggaagcaacttatcacaagggccagtaaagtggtggtagcagggattaaaattacagggctctggctgggtgtggtggctcaggcatgtaatcccagcactttggaaggccaaggcagatggattgcttgagttcaggagttcgagaccagcctgggcaccatggtgaaaccctgtctgtactaaaaataaaaaaaattagccaggtatggtggtgcacacctgtagtcccagctacttgagtggctgaggtgggaaaatcacctgagcctgggaggtcaaggttgcagtgagccaacatggtgccactgcactgcagcctaggtgacacgatgaggtcctgtctaaaaaaattaaaaattagagagctctaaaggaaagggcaaagtccaagatggcaaatcaaggaaacatgtccattcacctcttttcatctggtgatttgcttcttcaagctaaaaatctcaagttgcagttctggcattagtttctttaggaaaactgagattgctttacaaggtctcacatcttcagttgaaagtcagatcagtttccatatccagaaaagtagcttcctctaatctgctgttttgctttctgcagtttcagttacctgcagtcaatggtggtcagaaaatggaaaattccagaaataaacaattcatgtgtttaaaattatgtgccgtttgagtagcatgatgaaatgtagtgccatcctactctgccttccccagggaatcttccctttgtacagcatcaccatgctctaagatccaagttaagaatgagtccataggccgggcgcggtggctcacgcctgtaatcccagcactttgggaggccgaggcgggtggatcatgaggtcaggagatcgagaccatcctggctaacaaggtgaaaccccgtctctactaaaaatacaaaaaaattagccgggcgcggtggcgggcgcctgtagtcccagctactcgggaggctgaggcaggagaatggcgtgaacccgggaagcggagcttgcagtgagccgagattgcgccactgcgctccagccagggagacagagcgagactccgtctcaaaaaaaaaaaaaaaaaaaaaaagaatgagtccataaaattgtgaagaagggaaaagaaattctttccggttttgctgtcacacctcagactgcaagttacaaccacggtgtgtgatgagagttaagatgaagaaggcattaaatttgtgtgtggaagacacaaatagaaatgcattctggttgatagcaatcagatttggtactatccatggtttcagacatccactgggagtgttggaacatatcctcctggagaagggagcaactgctgttcttaaccgggtgaatctcacacccagagcttgctatttgcatatagttctctatcactgatgcatttattaacaagatataccatcaagagggtttttgattaattgtttggcagtctcagtgtgtcctggctcacaagagctaatcacgtgcatttttcccaacaccacatggtagactgtgattgcctgtgtaaggagtatgacaccacagaaactggcaaactgtacaaatcagggttttcccaccctcaaaatctgtatgttaaacatttaccagcacaacatttgtcctagtgctttttcctcttttaatagaagataaaatatgaaataaaaatatttttttacaggtccacaagggacaaaaaataaagctaccaaaagttttggttatttggatcgttgttcagttttactcacaaaacaagagaggcattcggtcacagacattaagagccatttcagaattttatgggtatttttgtctcatatttctttgggtagtgtcatgcaagatttggagtattttttttgaagttagaaaaccctggacttggatcttaacctactgtctttaagacgaatgacaatagaaaagctatttaaattctccaaggtttaaattttcttatctgtgacgttagaatgaaatattttacatgtgggggagttttgtaatttatagagctctaacactgtaatctatgattacacaaacaccttcagtaggtaatagtactgttattcaatttatactataaaagtattaaggactgccttactttttcctacaatatacagatgtgttttttctttttctttttttttttttttacagctattatggtactgtacaatagccaaacatttgactggccaagcccttccctttttgaatggtgggagaggagttctttcaagtcccagtgaataattatttagcattaacgtctgaatcatgggaacagtgcctgcttatcccactgctgattgtcaccctgtgaaatggaggataataaaatataaatacactttacaggacagtagaaacaaagaagggaagcttttccatattcacttccctctttccatacccaggcctcttctcagactgaacttccttcttcaacctttttgtagtatcagttgctgataatgacctaaaaacagaagtacactttagtgaggatggctgctattgatcaaagttgtatcacccagaccaacagttaaaagatttctgacttcctcccttatctatggaacttctctttgttcttcgtcacccccatccctcttcagctctaagtacatacttacggtagtcattccattttgtcctctctgttctctggcttcggaggttgttgatccatatattatgttctcattctaaacatcacagtgttcacttttctttgcattcactttgtatttagtgtgggcaatagattttgctgtagccttctaattatttcatttgtgtttattttgcattgaaaactgtctgcaagctctgcaatatcttctcctatataacctttccaagtgttaatttcctcatttgcaaacagaaaaaaaaagatactaatacttttctcttagaattgtgtggattaaatgagatgatgtatgagtatgtaagaacccttaacatggtgtccagcattttgtaggtgttcaacaaatattagctatttcctcttcttttgctgttctccttcatgcctaagacaaaatttatctacaagtaagcattcagaaaattgttatggggtacataattataacacccatatggatagtacctattcttccccagtcttgtggtttctttttctattgagggatttctgttagtagaacaacaccctggtttcgtctcccttgggaaggagtgatatattggataagttcgagatgaagaactttagaatggggaagaaaagaagcttgtgatgaagaacagaatgaggaaatagctcagcccctttttgctctgtgtgtgtgtgtgtgtgtgtgtgtgtgtgtgtgtgtgcatgtgtagcagggagacatggaagataaaaggagatttgactgcttataagcacagtctgacctgctcctttatgctgaaagttttacaagggcaagctcccacacgagggggtctttgttttttcagccttatacgtgcatacttctgtgattcagtaataaagggttcattgttgctgcacatggaagccacattcttcaatatgagattgatcaaaagttaaagtggtatttttatctacatatactactcttttgtgcctctcaattggatctgaaattgggtatgaaaaatagctttttaaaaaaaaaaaaaaaaaaaactcttttttttttttttttttttttgagacagaatcttgccttgtcacccaggctggagtgcagtggcatgatctcaccttactgcaacctctgccttctgtgttcaagcgattctcctgcctcagcctctcaaatagttgggattacaggtgcccaccaccatgcccagctaattttttgtatctttagtagagatagggtttcaccatgttggccaggctggtcttgaactcctgaccttgtgatctgcccgccttggcctccctaagttttgggattacaggcgtgagccatagcgcctggccaagtctttctaatatctctaacaatctattcttccagtttgtgtaatacaaaattatatcagtcccacagcatcctgtttctcttatcctactttaaaaagtctctttcatatgaattcgcaggtccagtggaattccaggaccagtggaagccatcattaatttttttttttttgtaaattatccaaagcgctctttattgctttgacttctcgatggatccttttcatttggtgtctttctgaaaataataacttgtttttgaggttttgctatttttggtgcacttctgttatattgacctgttagaatcacaattgctgtatttttcatcttaatatttattttatttaaaaattctttatgtaaaaattctcatctttatcttcttcagaggacaagatttcactatggaacatggttagaggccaaaattgctaacctctgagtgactataaaatacttgagcagattcttttatcattttcctccaattctgacttggaacctgtgtgtagggtcacagagaggagggaatgggaaggaggtgatgattaaagaacaggcagaaaagatgggctataggctgccaaataggtttatgacggggattggtagagaagtgttctctgtgctaagatgctttttcagagcccattgagccctgggacaattgatgatgttcatgtgacactagtggggaatgagtcaacatcagttgtcggaaggagggagttatcaagcacacagatgtgtcagttctgagagacagactgcattctgtggcattttaatggagagtaagattgccaatgagccaccaactacagagctctatgttaagctaaaggagaaacaccagggatttcaccctcttcagagtgctggtgagttttgtttgagagcacttctcagaactgagtttgggaaaatttatcattgactccagaacagctggagtggtttgtattgggggctactttttctttcagaaccattgttctgtccattgttcataggatccaaccactgggataataagaggtcaaaagaatgccaattacaggaactcttggcctatcctacctatatagtgagttatcagactttcacttcaccaaccctgcccataaaaaaaccaacagaagtgtattctcagggtcgtattcatttgttagctaattaacaatttattcactgaactcattttggacccttggcattgggcctgatgatggaaatataacaaatccataagctgtggctcctggtctgcttttgagggaactctgaggtttcaggggaggcagaaatctgaacagctaagccacaagctcatacgaatcaagaactaaaggttgtggaagcacagaggagaggccagtctcttacacagcatgaagacatagagggtgcagcttttccaggggaaggagtgaccagcaatgtataccatttctaaaacgtgctgatgcgttgagtatcattgaaatttgcaccacctgtttcattgagttttctcacgctgagggaacttcatggaacacatgggtgtcaagacagtcagttgtgagcagaaatgattttaatatcttactaatcatgataacatctaaataagtgtgtcataagaagatagatgcctgtgaaggaattgcctgaaaaaaaaagtgtggttgaaccagattattgcagttggctgaaggaatttcatttttcaaacatatttgtaaaccatgcagaagcttatctgggtgaccttctggcaagtagcaaagggtgatgctacctcggtgatgtctgggagtggtgaggcttgagttgtttagggccaggaggagaaatagaagatatttattctccagacacttcttatcagatgcagagttggaagtatcctgataaatctggcactagttaaacatccgctgaattatacactcccatgggaaaaacctacccttgagaacttggtctttttatttgctttgagaacctcagttgctaaactatacaattcctggaagcatcttgacagcatgaattgattatgaagacagtgttagtagcactaaggtttcagtgcattaggtcattagagttcttcatcgtgaaaagaatagttgggacatttgctgaaaggatgatgacatgaaagaaacaccatttcccaccaaatctacaaaggttaccatggcattacctgcaagcagcttgcacaatatagcagactttgggcagatcttattgtagtcagtgtttccagaagtagccactgagaatggacatgacctttcaaaatgctgctttattttttgtgattgtgaaaatggcaagtggctgggcatggtgacaaacacacataatcacagcattttgggaggctgaggcaggaggatcactcaaggccaggagtttgacaccagcctggcaacatagtgagacatcatttctacaaaaaaagaaaaaaacatttaaacattagctgggtatggtgggatgcacctgtagtcctagctacttgggaggtggaggtgggaggatagcttgagcccaggagtctggggctgcagtgagccatcatggtgccagtgcactccagcctgggtgatggagagagactttgtctctattaaaaaaaaaaaaaaaaaaaaaagaaagaaagaaaagaaaaagaaaaagaaaggtaaattattataaacatggaggccagggcatggttctgtaatcaaagtattgagtagaaggaagaaaaacaattttactaaccatatatatatgtatgaaatcatttaatcctcataatatgaaatcatttaatatgaaatcatttaatcctcacaataaccagttagacatcattgctctcattttactgagaaggaggctgaggcgccaaaaaattaatgaattgagtcagggcagaaagtggaaaagacactggaccagatcttagaacctaatacttatttctttgcaatgtgatattgtgtaagttatttagcctgtaacctctgtgtctaatgtctcagtttaatgattgaaaagataataattccaacaataatatattagtgtactactttatactttatgaatgtttttcatatttattatctcatttgttcttcacctaatgcctgtgtagtagctggcatagttgacacaaaatagtggaaagtgctagagtcctgggttcaaatcctggctctgccttcagtctgccctttcgagattcaatctcattttcactgcagtcgagataataatgcctatttgcagcgctgttgtgagatctgaaagagatagatgcgggtaagcatgtttaacaaatggtagctcctattaagggcccatttgagggatgagaagaataatacttagatactgcatgagttcctcaaagttgcacacaacattctaggcagtgaggtaaggagttagaagcataagctttggagttaggtggacttgggatttaattctagctccatttcttcttcttcttcttctttttttttttttttttttgagacggagtcttgctcatcgcccaggctggagtgcagtggcgcgatctcgggtcactgcaagctccgcctcctgggttcacgtcattctcctgcctcagcctcccgagtagctgggactacaggtgcccgccaccatgcctggctaattttttgtatttttagtagagacagggtttcaccgtgttagccaggatggtctcgatctcttgtcctcgtgatccgcccgctttggcctcccaaagtgctgggatgacaggcgtgaaccaccgcatccggcccctctagctccatttcttataagctgtgtgatcttgggcaagttattcaatctgtctgaaatttagtttccgcatatgtaaaattatctgtaaaataatcatagcttcttaagtgggtgggtgatggagatgataaaataaaaagcacctagctaaatgctggtctctttccttctttacgctccctcctttcctttcttccttctgtcctttcatttgtaatctggtacatgcccaatacatgttagaagatcaaatataatcttttttagaggaaccagcttgatgttgtaaaaagctcacaggctttgaagttgaatgtgtaatggttgaggttgaggagtcctgaactgacccctctagctcagtgattttgtgcgagtcacctcaccgtcctttaaaccgactcacctgttaatgatccttaccttaaagggccactgtaaagagtgcaggagggagatgatttggatggtgctttgtagtgtcatagagctagagaagtgttatacttatgaatatggaattttgggcattaggcaataaattagaagatgtttttgtgagtgagggcagtgggcctagataccaaagtttttagaacaaaaggaaagtcctgtctcaggcagagctgagacaggtggttcaactctcaccatgttgctgtcattgctcatctcattagcccagtccttctctgtgcctggtactgcccagacttaccaaaaggaatctgtaagtccatatgcatatgtatattcccaaccaatgaatttaaaaagtagattttctatcattattcttaccaaagttttcgttgttaaaaagaagcctaatggcagcgaaagctagaagctacttcacttgagtggggcaattctctggtggcaaggactgggtcttacttatctttgtatcctagtgcctagcacagtatgttatgaacttagtagatattcaagaaatagtgtgaataagtgaatgaataaatgtgttttttttcattgacttagcactatgcccagttcctccctttggaagcctacagagtccaggtgtggccaacttgacctctggcttcctttgccttttcatgtgagttgatctgcctctgggcttacagagcttttgtttgaagagtatcctgctcccttggagttgtttgtctgatagacttttctcctcacaggatgatgatatcacttgagaaattcagctcttaaaaattccatctcgtctaaactaggaaacaagctcatctcagtcaagctgtatacctgttattatatctcaataatatcctgccctactatcccttttgtctttagtgttaagagaaagaagaaaagcaacaacccaaaatgacctacatgaaacatctcaaaagttttcagcacttagttattatcacctctcatgggaaaaagccttaggcaaaatgtgggaaaatggtcccttaagtggaaaaaatgaagaaagggaaaaaaatgagatcagtgaaaataaatacagtacaaagctccaagtgattcagttttgttaaaagtaaagtgatgataggtagagggagtgctctgattgtgagttattttctaaaaccccaaacaagggatttggaaagctgaaaggcaaatctgtctcttaaacttccccagagagatctttcagggagagctaatatctgtagctattttgggaaggtcacctattaaacaagaaccttgtgtgctgaattcatttggggctagcactcaaggtcgtggacatccatgaatcaaaatgttcccgaatgtggattgtctgcagccagttggaatctggtggaatttcttcaggaactggaacaccatccttatccctacagcctccactgatgtcacaaaactctacaaaggagccctccaatggatctcaaatctttccatacatttgaatggcagatccattttattccaaggaatgttctcaggagcagagatgtgtggcccagaggctcacatattcttttctggttggtggttgtgaaatgcacggtgtggtggtaaaggtccaggagcctggcatttcttgaatttggacttgggccagatggtacgtgacccagtgttctgggggcagaatactggaactttggtggcatatagcaggttaaaacatagcttgagaatcagatatttctctctcagttgcctactgattaagtggcagaggacaagttaagtattttggaacttaccgccatgtttaaataagatgagtataatatttagatcacgagattatgtgatgattaaattacgcaggcaaaaagtgtcctgaactgaacttgatcagagtaagtagtaaatgttgctattgttattattctccagctagagagctgggaagagaaacaggatcacatataggatgtgagcaagaggatgttcttctattgcttttgtattttctttttatgaggaatcactgaatttgcgttgttgaaacattgtcacaaatggagtttgtaacattattacaaatagaatagcattttgttactccttgaaacattgatgcaaatggatttaggttccaaggcaaacccagaatgttgctgaaataatgtgctttagcaacaagattttgcattttctctttcttctcgttgccagtgtaagtgatttaatttgtgtgagctgctttaggagatttatcatactgtttttatgggtaaatccattcccagctacagacaactggaatataacttatttgtgtgctggaggcttccagtgctgttttaggaggattttaattgtgttggaaatcagtactcatgactcctggtgaatatttttatttttttaatcctgcaggaaatttctagtgctttggctaagcggctgggagggaatctcagcctttggccacagctacctttcccttttcttctctgtctccttttccctttggttcctctcccaggatcttgggtatttctctgggcaaatgagcctgcttgaatgacttctatgtggggctactgttttgatgctgcctttaaaaatatgtcaattcaataattttactaaagaaatatttttatagtaagcagttggttacttaaggttaaagttatttaaccagtaaccttaatctaattcatagagtaagcctataacatttcccatttccacgacatcctgttttctcctcatccctaccagtaacaggtattattgttatttttaattttttgtcagtctgttaaattttaagtgttattttcttatacttcctaataaatttatacctattttcacatgtttgatggctatttagaactgttcttctctggattgtctatatatcctttgcctgttttctattagtttgtcttcctgacaatttggaagaactttttaaaaataaataaactgtggacattagcctgaatgtgttctgtttggtgaacaaatagtctctctctctctctctgagtttccagtcttgttaaaatggcatcatccagccttatgctgatttagatgacttagaatggtttttcttgcaagattgtgttttgcacatatgtttaagccattaatccatatgaaattcagttttgtatgttgtatagaagaccacttttattttcttctggacacgtggccacttatgacagcagcattcattaaataatccacatcttccatgccttcattctattttcacctcttatttgtactgggatctatttctgtatttactattctgttgttgtgattagcgtgtctatttctaccattattaaattgatctgattatattggttttgtagtgtgctctgtgtcttgtttttccttctttttcatgttcattttggttcttcttaggcatttataaatctatataaactttaataggtatctaattacaaaataaccccatctgttgagattcaaattggaattgcattacattatatattcatttgggggagattaatttttaataacagtaagtatttttactcaagaaccaatgtaaggagaaatacaaattaaaagtaagaagcttacttctctctgtaaaaataagggaagaaacttcttccccatattccttttctttcagattttctttatgaaattctcttttcaaaagacagttagatatatgagtctggaattcaagtgagaagtctgggctagagctataaaactgggagtcattggcatatgctatttaaagccataatattgtttgagatcactaatcaagtgcagatgaaggaaaaaagggaccaatattaagatattggggaatgacaaagaatggctagattactgaggaaaattaggtgattagaatttcttggaactaagtgaagaaagtatgtatttcaaagaggagggaatgatcagccatgccaaaatgctgcttacaggcaaagtaagtggatgttggatttaggaacatgaaagtcattagtgatcttgacaagaggtcaccagtggaggagagtgttagaggtgaaagcttgattagggtatgtttaatgcagacttcgaggatgacaattaaatgtaatgtatggtcctcaattgaatcctggattaaaatgccaccatcactgtcaccatcacagatactatcatcattatcaccatcactgacaataataaaaaaatctgtaaagaacattattgggacaaatagagaaatttaaatagggactattaaataatattgtagcaatgttaaattttctgatagtgaggactgtattgcagtcctataggaaaatatttgtaggatatacatacttaagcacttaaggaatgacataatgtttgtaattgactctgaaatggttcctccaaaagaatgtgtatgtgtgtgcatatacttcacacttaaatacatacatatatgtgtatataaaacatgtatttgtatatgaagactagagagatatcatggaaatgtggcaaaatattaataattagtatatggaggtggagggtacatggatcttcattttattattcttatactttttggtgagcttggcattttctaaataaaaagttgtaaagagaaacattgagaatggaagaagaggaattagaaacagtgcatataatttatgtttttatctagtgcacaagtaaagatattaactttagatgggagcaccaattcctcctcttcagtaaaaggcagaaaagtggactacatgagtacagatttcaacagatgctgatagatatggtagtgtgggtctataccttttcttacaaaagtaaccttttgtatttattttcttttggttgttcaactttcttagtgaagtgggaaataagatcatcaactgaacataaggatgggtgaggcttaaggagagagaagcgctgaagtgggaaagtgaaggcactacggaaatgcaatttctgattagcgttaaggggccacctggggttcaacaacaagcagacttaaggtaagaccagtcggtgtagctgtgtgtttttctttagtcaaattcagatacttggttgaaggtatgaaagttgaagtggatttagtcagggttgtggtttcccaagaaaggacaatactagagaggacaagaattgttgaaggtgtatgcaaggacatgattatgatcactcatggagtaaagctgggagaggggtgaggcctggtgaaaaagttgtatgatcaatggattggagatcctgttgagggaaaatgataaaagttggataccaaggagaattatctggaacgacaggaggtggtggtcagagagtgggagatatgaaatggcatttacggaggggttacagttattgccaatagtgaactactcttgtttttctggaatatcttccttactcatagtatactattcattggctggattgctagagttctattttatttagatattttgcatttatatttaaaagtgagattattcttatttgattcttttttttttttttttttttttttttttttttgagaccgagtctcgctctgtcacccaggctggagtgcagtggcaccatctctgctcactgcaaactctgccccccgggttcacaccattctcctgcctcagcctccccagtagctgggactacaggcgcccgccaccacgcccagctaattttttgtatttttagtagagacggggtttcaccctgttagccaggatggtctcaatctcccgacttcatgatccgcctgcctcggcctcccaaagtgctgggattataggcgtgaaccacttctcccggcctattcttatttgatttttatgttctggcattagagatatattggtcttataaagtgaattgggaagcttttgataattttgggaacaggtaaagcttagctgttgacttacctgtcttgtgcccttttccatagtagacttaaatcactttccaatttatttcaatagttattagtttattcaagttttccatgtctctcaaaaattattttgatattactaccaagtcatttctttcttatgggtttcaaaacttgttgccacagggttgtatgaaatattctagttctttttatctcctgaatccgtaattttatcccttttcttattcctaattttgtctatttgtgctataatcaggtacacaatggtattatctgttttacttttttccaaaagtaaccttttgtatttattttatatatctaccaattttattttattcttcattaataaaatattttagatttattaattcctttctcctgtgtgttttttcctttattttaatgatctgttaaatgagtgaactgactgggcacagtgggtcatgcctgtaatcccagcactttgggaagccaagatgggaggatttcttgagcctagaaggagcttgaggccagcaacatgccaagacattgcctttccaaaaaaacaaaacaaaaaaaaactgtgaacaaggattctttgttttatatctatttttaaattacgaagacatttaaaactgtgcatttaatttttgcttagtgtcaaagaatttgaaacaaactccttttcattgctcttcagatcgtttgtgattcagattgtctctttaagcattgtctagatatttgtgaataaattttcaactatttaatatttttggcaccaactttttattatttgtaattgtattatattattatcagaaaatatggcttataaaatttataatacatttagcctgtgaattttcttttgtggccaagtacataacttgcttttgtaaacgttccttcaatatatgaaagaaatatgtatttgctatttaagggatgtaaattttttttctatctgaaaatcaagtattatttaatttgcctttgacttattgtttactatatataacaaattctgtaataagtgtattaaaatagcttcttctaattgtattttagttgaattcttcttttatttctatttttatatgctttacatatttaacttatattttgtgatgtgtataggtttatcactattttatcttcttcgtaagttgtgcctttatttacataatgttcttattcattctgtttaatattcctatctttaaattctacttgtgtgacatttttcttgccacttctattttctttttcttgatatttgcctgaatttttttgccttttgctttattgtcaaccattctttattattttttaaagtgttttttataaatagaatatagctttatttttgtattttagcttaacctgtcagcctcttttcttggtttgttgttgttgtttgtttgtttgtttttgagacagggtctcgttctgtcacccaagctggagtgcagtgacatgatctcggctcactgcagccttgactttttggcctcatgtgatcctcccacctcggccttacaggcatatgcccccatgcttgtctaattttttgtatttttttgtagagatagggttttaccatgttgcacaggctggtttcaaactcctctagtctctattttttaaacaggagaatttagttattttccattggttgtaaagacttatatacatgccttgtcctcatacatcttccctccctggatgctgggcaccgtcagatagtcgttctactttgtggactccttgaggatcaggtctggttgtagtcatactatgctacaaatggttgcaattctaccagcagacaggaggctgctggaatgtcctttcttgtattctttcagcctcaggggtgcggactcactccattcctttagcttctctctagatttctttaggccaactctccagggagaaatgccagccccagttttttctgcttaattttcttcagagcccaaggtcttatttacacctgggtcatcatggacttcagcagcagtttggctcaagaactgtgtacagactggagttaggagtggagaggttttgaggtgagttgaggctgtcattttccgaatgtcttctaagacctgccactgatgtttataatgaccatttttttcttcagttttgacatatatggtttaccacacaatagggttgtattttgagaaaacgctcagtagtcttctcctctctatatactttggctcatacttagacaaagcacctaactgtaaatagcccagtagggatactgagcatcaataaaataagaaagagcaagtggtttatttttatggtcaaactgcttggcattagtttttagaaaaaacttgtcaagtactttctgccctcatactctttaaaccagtcagaggctaaggggcactgtcagaatgtcctactttggcttgggaatttcttctttctttttctatattttctaggagtccctagtacttctaccataagcctatccattctgggactctgacaatgattcttaactgtgattgttatcaagatcactcatagattttaaaaagatacatatatcagggttgcattggctctaactttgtgtctttggagctcaaacttttttttttttggtaaaggctcttaggtgactgatatattcccagggaattatcttctcatcgttgctatgctctttttctttcttattcccccttttcttaaatacaccaaatcactgactttcattactagcacacttcaaaggcttaaagagtttttcaaaaaggctggacctttctaatgtcagacatgcattgactctccacagctactgcgcttagcattatgaatttgctctctagggtgtggtctcaattgtgtaaacagattggccttcactcccttgtatattcatggctggaagtgggaacaagcatggacactgaaagttttgagcagtaaatgtccctttaagtctatgtcagatagcttctatttgtgcctctagatccattctccacccttatctccttgccctctgttccaggaagctgacctgtgtggactatagcaataagttccctttcttgatgaggctgggccaactgggagccctggtaagagagcaaggttgatatattcagttccctttttccttctttgtgaggaccttgagctggctgtggcctcagctgaaggtcactattcctttcaacgtggcttcctctatgtggtattcgtcttctggtttccaccattctctcctttctcttgcttctctggcctaggagtagtaatggctatgtggcgatcttgctctttcctgtacctgatctatgtttttggaaatagctccattgtaattaaaccctctgccttgtcttgggtgtgtcatctggctcctggtgggatgccaactgaccctccctatttcccatgataacagtgaccctgatctccctgctgcttggtaggaagttataaaaatggcaggatgatcattagtctttttagcagattctgtggtgtgttgcccagacttcctctttcaagacttaaatactcattccttcagctgctaagagtgttggtggctgagttcccttctggagattgtcctccactgaagagaactgcctctaccaagaatgcctttcctggggcagtctgcatctggagactagtcaaatgcagtgtggtgatcaaagacatggctccttatgccaatttgggatgactgtgcagggccgttccagctcctttgttgtgactgtccagcttttccctctgcccagtctttcttccttcactctcctataaatgtcgatcctgagcattctaaccattaagcttccttcacacaaacctctgagtcagagtctgaattccccagggagtccagcctatcatagtcttcaatctgcagccccaccccccccaacccagtcccccacagctgtcttcttgatctgtctccacctgtcctcatcacttacctatgggagcagacctggagggtcttcattttgaaggcagtttccaacacaaatgaaggatacacatatgagggaagtctaatgagagtgattctaggcatgaaaatatatggagaactgggtgtggggaatcccctagggtgtctcaaacttcaagatacataattaaattcctagaaccagggtggagagaggaaaggggactaggaacaacaaagtaaatacaaagaaaagtagaaagagttggtggctaaatggactatttgaaggtgtgttttaaattaaatgttattatgatttttagagatgagtctgtttcccaggctagaatgcagtggctattcacaggcacgataatagcacactatagcctccaaccggcctcaagtgatttttcccgcattggcctcccaagtagctgggactacaggcatgtaccaccatgcccaactttgggggattgcttttgaagcataaactgtcccaagatggattcaagatgttaaactaaataaagctgtgtacgctgtcccatcacctgctaaggtctgtctaatccagatttgtaggcctgccctctgcagtaaatgagacataggaatggcaagggtaaattctgttttcatattggaaatttggcctcttcctggagggtgaattctgaaaaacaaagctctttttcgttaaagagcttatggaaacttctttgaggaaatcgtacattttgccattttaaaatattgagcagaaaaaagagtacacatttttaattttaaaagggcccagaacagagccaaaaaggagcctgtgatccaaccctgcactggtttggctggattttcaagtttatgagcaaaccaccaatttgtcaccaaaggcagatgggtagcattggactcttctaacctgctggctatttctgggaaggcagacagagcccctattcactgcctgcttgggaaagctttgaaatcctcccccacagatataatcctccttgagatccttctgatgagcttgcctcccacccaggagaataaattttggtctaaaggtgatttaagccacagtgtgggcttgattaagaagaacgtctattttattaccagtcagatttaataaaaggcagtatgctctgattagtaacttgcaaaacacaaagtgttgttgaaagctagaagggaaaggttaggaccacttcccgaaggtgcttggaaagaacattgaatatatttcccctattcaattgcccttttatactgaatctgattgctggaccttatacactctaaatactacaaaacatactcgacttgcttgacagtaatttagtagggtttgggattattttcttaactaatttccatagcaggaatccagtaccctcaagtatagacaatgggttgataaggctttatctttaaactttctatggcctcattatttgtcatttacttgatttaatttttgtagtcatatatttttactatattgctttcagtttcaaaatgttaatcttttctcaaacatattcattattgacaaataacattgtttacattgataattaaataatgatctgtttaatgttcatcttccataccagactataagctccaatgattgatttgttcttatttcacaacatagtgccagcatataatatgcattataaaaatagttttgaataatagaatgtatttatataatgcattctaatttacaaaatgttttcacatacattttcttattttgattcttacaaagtactgttttgtatagttttgttatcagaaaggggtcccgattcagacttcaagagagggttcttggatctcatgcaaaaaagaagttggggtgagtccatacagtaaagtgaaagcaagtttactaagaaagtaaaggaataaagaatggctatgccataggcagagcagtgtcatgggctgctcaactaaggacacatatagttatttcttgattatatgctaaacaaggggtggattattcatgagtttcttggaaaagggtgggcaattcctggaactgagggttcctcccctttttagatcatatagggtaatttcttgacgttaccatggcacttgtaaactgtcatggtgcgggtggtagtgtcttttagcacgctaatgcattttaattagcgtgtaatgagcagtgaggatgaccagaggtcactgttgtcatcaactttgttttggtgggttttggtcagcttctttaccacatgctgttttattacctacgtctttgttacctgtatcttgtgccaacctcctatctcatcctgtgacttagaatgccctaacctactgggaatacagcccagtaggtctcagccttattttacccagtctctattcaagatggagttgctcaggttcgaatgcctctgacagtttgggtagatattgccatatgaatttcaccagcggggctgaaacttagattaagtggtgtacttatgattaagtggtgtacttatggtcacagggctactaagcagtaaagcagtggttctcaaagtgtgattcctggacaagtagcattagcatcacctgggaacttgctagaaatgtcagttctcaggctgccttccaacatgagacatactgaatcagaaactttttgggtctgggtccagcagtttgtgttttaaaaattgctccccatgattgtgatgcatacacacagtacatgttgtggtttgagaatcactggtgtaaaggaagaactttcactatacttcttaaacaaacaaacaaacaaacaaaaaaacctcaaactaaaagcatcttactttgacactatgtcttcttaatccaaaattatattatctttgccctatcattttggctccctaatattatttaaacataaaaagtttctgaaattgaggcaataattaatagcctacaaaccaaaaaaagtccaggaccagacggattcacagctgaattctaccagaggtacaaagaggagctggtaccattccttctgaaactatttcaatgaataggaaaagagggaatcctccctaactcattttatgaggctagcatcatcctgataacaaagcctggcagagacacaacaaaaaaagagaattttaggccaatatccctgatgaacatctatacgaaaatcctcaataaaatactggcaaactgaatccagcagcacatcaaaaagcctatccaccatggtcaagtccgcttcatccctgggatacaaggctggttcaacatatgcaaatcaataaacgtaatccatcacataaacagaaccaatgacaaaaaccacatgattatctcaatagatgcagaaaaggcctttgacaaaatttaacagctcttcatgctaaaaactctcaataaactaggtattgatggaacgtatcccaaaataataagagctatttatgacaaacccagtatgtgcccaatatcatactgaatgggcaaaaactggaagcatttcctttgaaaaccggcacaagaccaggatgccctctctcaccactcctattcaacatagtgttggaagttctggctagggcaatcaggcaagagaaagaaataaaggatattcaattaggaaaggaggaagtcaaattgtctctgtttgcagatgacatgattgtatatttaaaaaatcccattgtcttagcccaaaatcgccttaagctgataagcaacttcagcaaagtctcaggatacaaaatcatgtgcaaaaatcacaagcattcctatacaccaataatagacaaacagagagccaaatcatgagtgaactcccatcctcaattgctttaaagagaataaaatacccaggaatccaacttacaagggatgtgacggaccccttcaagaagaactacaaaccactgctcaatgaaataaaagaggacacaaataaatggaagaacattccatgctcatggataggaagaatcaatatcatgaaaatggccatactgcccaaagtaatttataattcaatgctatccccatcaagtgaccactgactttcttcacagaattggaaaaaactactttaaagttcatatggaatcaaaaagagcctgcattgccaagacaatcctaagccaaaagaacaaagctggaggcatcacactacctgacttcaaactatactacaaggctacagtaaccaaaacagcatggtactggtaccaaaacagagatatagaccaatggaacagaacagaggcctcagaaataatgtcacacatctacaactatctgatctttgagaaacctgagaaaaacaagcaatggggaaaggattccctatttaataaatggttctgggaaactggctaggcatatgtagaaagctgaaactggatcccttccttacaccttatacaaaaattaactcaagatggattaaagacttaaatgtaagaataacactgtaaaaaccttagaagaaaacctgggcaataccattcaggacataggcatgggcaaagacttcatgactgaaacaccaaaagcaatggcaacaaaagccaaaatagacaaatgcaatctaattaaactaaagatcttctgcacagcaaaagaaactatcatcagagtgaacaggcaacctacagaatgggagaaaatttttgcaatctactgatctgacaaagggctaatatccagaatctacaaaaacgttaaacaaatttacaagaaaaaaacaaacaacctcatcaaaaattgggcaaaggatatgaacagacacttcccaaaagaagacatttatgcagccaacagacatatgcaaaaatgctcatcatcactggtcattagagaaatgcaaatcaaaaccacaatgaaatactatgtcatgccagttagaatggtgatcatgaaaaaggaaacaacagatgctggacaggatgtggagaaataggaacacttttacactgtttgtgggagtgtaaattagttcaaccattgtggaagacagtgtggcgattcctcaaggatctagaactagaaataccatttgacccagccatcccattactgggtatatacccaaaggattataaatcatgctgctgtagagacacatgcacacatatgtttattgtggtactattcacgatagcaaagacttggaaccaacccaaatgtccaccagtgatagactggataaagaaaatgtggcacatatacaccatggaatactatgcagccataaaaaaggataagttcatgtcctttgcagggacatggatgaagctggaaaccatcattctaagcaaactatcacaaggacagaaaaccgaacattgcatgttctcactcataggtgggagttgaaaaatgagaacacatggacacagggtggggaacatcacacactggggcctgtcagggagtgggagactgggggaaggatagcattaggagaaatacctaatgtaaatgacgagttgatggatggagcaaaccaacatggcacatgtatacctatgtaacaaatctgcacgttgtgcacatgtaccctagaagttaaagtataataaaaaataagtaaataaaaataacaaaaagaatagcttttcctacttgcttgtggtttccattcacatgcaatatctctttctgtcccttcactttctgcctatttgtgtctttatgggtgaggtgagtctcttgtaggcagaatatggttgggtgttgtttttaatccactcagtcagtctgtatcttttaaatgaagaatttaatccatttatattcatggtcattattgagaggtgaggtcaattttactattttctggctgctttgcgtgttctttgttccttagtgtcttttatttatttttttgcagttgtatagttttctgtagtaataaggtttggttcctttgtctttctcctttgatataggctctaccagtgagctttatggttttgcatgttttcatgatggtagtttttatcttttcacttcagatgtaagaatcccttgaacattttttttttaaggcctgtctggtggtgattaattccttcagtttttgcttgtctatgaaagattttatttaccttcatttctgaagaattgctttgctgggtataatattcttggttgacagtttttttgttgttttccttcaggactttgaatataacatcccattgtctcctggcctgtaagatttctgctgagatatttgttgttagtctaatgaggattgccttgtatgtgacttgatgcttttctcttcctgcttttagaatgttttctttgtctttgccttttgacaatttgactataatgtaccccagagaaaaacaatttgggttaaatctactttgttggggggattctttgagctacacagacatggatgtccatctctctcccaagacttgggaaattttctgctattattttaataattatattttcctcacctttgtcttctttactccttctggaacactgataatacaaatagttgtttgcttaatggtatatcatatatcttgttgcctttcttccttccttccttcctttcttcttttcttttcttttctttctcttctcatgttatttcacaagacccatcttcaagttcagaaattctttttttctgcttggttactgtgcctttgaagctctagattgtatttttaattttatttattgaattcctcatctctaggatttctgtttggttcttttcaatgttaactatctctttgttaaatttcttattcaaataatcatttgttttcctgattttgtggaattatttatatatattcacttgtatctcactgaatttctgtaagattattctttcaaattttttttggcattttatgtatttccttatgattgggatctgttactggagaattactgtcttcctttggaggtgacatgttttcttgcttttttatggttgatgcattcatacatggatttctatgcatctggtgggaaagttgcctcttccaactttatggtgtaggtttcatagggaaaaccttattcctatgaatgaggcttgcattgtcagtttgattggtatatgttggctttggttttaggtggacatagttttgtagtgtctgtgtagtttcttcagctgtaatccacactagtggcatttgggagtttcttagtggcctaggctggaagagtatgtggtgatagtggtttagctttgccaggagtaggcttgctgagctgtttctcagattgggggcacatatgtgcacatcatggggtagccaacttggagtctagctgactgtagttggggacatagggttgttactctggctatgagcaactgccttggggatgcctgctcagggggagcctgcagggcttttcctcaggcctgttatatagttgcatggctgttcagctggcctgtgagtgtgtctattgggtttgaaccactggcctgtttatcagtcccaggacacagctgcatggctgcttagttggcctggaaacgtgtttgccaggagtggcttacaagactatttctcaggcccaggacatggtcacatgacttcttcactggtctgggtttgtttctgctggggtggcccatggggctattcttgggcctgggatgcaggcaaaggactgctcagctgatctgaggtgtgtctgccatgggtggcccatgggctgtttttcttatttttttatttatttatttttttgagacagagtctccctctgtcacctaggctagagtgcagtggcgcaaactcagctcactgcaaactctgcctcctcggttcaagtgattttcctgccttggctccccaagtagctgggattacaggtgcgcaccaccacacccagctaatttttgtatttttagtagagacagggcttcaccatgttggccaggatgtcttgatctcttgacctcgtggtctgctccccttggcctctcaaagtgctgggattacaggcgtgagccaccgcacctctccaggctgttattcaagtccaaggtgggggctcttggttggttggttggcctggaggcatgtctgtcagggatgagctgtggggctgtttctcaggcccttactggggtttcggggccattggaaaggccagggatgtgtctgcagggggtgctgtggggctatttcttaggtcctgagcatgggtatgtagctactccactggcccaggagcatatcatctgcttggacggtctagggcctctcctgcttgtgggagggcgcagcaattgggctggctcacaaatggatttcctgggcagtgctgacaaactgttccttcgcctggaagtgcaggtggtgggggttgattttcctgctgttcagaactagagtgatagccaatcctgggcccaagttctgcacagctaaggttgcagtattcagccacctgtgtgggcttggcacaatgaaggtaaatccttagagctggagaggtgcaatgactactggttccccagagcagggtacactccagaggtgtgtgtaagctgccgtagtacagcaccatcttttcccaagatggtgctgtactacagcagcttagctcacaggagttgggggatggaaatgtacaccttgtgctcctaatccaggacaatgcagccacatgaattcctggtagctctccaaactggactcagtgagtgtaaggactgttggttcatccattgtaaggactgtaggcatgaagtttggtggcagtggaggctggtggagattttttgattaccttttctctgtaactggatgtccctcctgactcttggcagatctgatcccagcaggggagatggggctgtagaggtcaggtgcctccacactgtcctcctggatttctagttgccacaggtgcatctgcactcccctgctgtactccagtgctctcccttgaacactcctgtcaaatcttagctgtttattcattgctttggtcctttcttactaagacctccttttgacccatggattatttagaagtatgttgtttactttccaagtgctaggagattttcttctttatttgttgatttctagcttgattccactatggtcagaggacacactgtataattttaaatcttttaaatttgtttttttaataaccccaaatatggtcttgtatgcttaaaaaatgtgaattcttctgttgttggatggattgtcttataaatgttaaattttgttggttgatggtacattcgtctgcttggtctgccataacagaataccacagactaggtggcttaaacaacagatgtttattttctcacagttctggatgctggaaatccaagatcaaagtgctggcatgtttggtgtctcttgatgcctctttctttggcttgcaggtggctgcctcatttctgtgtcctggattgggaaaaaccctctccaaatgtgttttttctctactctcacaccacagcattcatcaaaatagaagaagacttctgaaaccagatgtgtgtgggtttttctccacacaccaagcggtggacacccattcagtcctgacacaacctactcagagatagtgtcagattccacacattggggtctcagtccccaagactgccacccatacccacagataccagttgcaagtctgggcctccagaagttctggccaattggcttcaagttggggttctcatgacccactctgagtttaattaatttgctgaagtggctcacaactcagggaaacacttttgtttactagtttattacaaaggatattacaaaggatacagatgaagagatgcatagggtgacatatggtggaaaggtcacggagcttccctgtcctccatgggtatgctaccctccaggaaccgccatatgttcagctatccagaagttttctcaacccaggcctcttgggtttttatggaagccttctttctcccagggtataaggtgggacccacacaggggagggtcttaagacccacaatcagaaaggtaggggaagattccagtcctacattgggacaggtgaaaggaaggcaggcaagaagttccatttcctgaggcctgcctctgaagcctaacacacccaacattacaacaaaagacagtaacaagggatatgggagttatgagccaggacccatggatgaaaacacataaaaagcctacatacttatatatgtttcctatatatcataatgccacacacacacacacacacacacacacacacacacacatgtttcctatatatcttaatactacggtcctcacatggcctgttttgtgtgcacgcacatccctggtgtgtgtctcactctatatatcctagtctctccttataaggacaccaatcagattggattaaggcccaccttaacagcctcttttcaattaactctttaaaaaaccaatatccaaatatagtcacattctaaggttctggaggttaagccttcaaaatacaaatttttgggaaacacaattccatccataatagatggttttgttgaattcttatgtagttttgctgattttctgtcaattgttgagcagatggtgctgaaactttcaactgtaactttatgtgaacttgtctttttctcctttcaattccatcagttttcgcatcccatattttccagcttcattgtttgttgcatgcacatttaagattgctgtaccttcttggttcactgacccttttctaatatataatatcctgctctgtctatggtaattttctttgtttggaaatctactatctgatattaatgtagtcactcctgctttgattaatgtttgaatgatgtacagtaatctctctttatccatgagttgttattcatgagcaaccatggcctgaaaacattaagatattttgagaaagagagagagagaacacacacacacaacttttactacagtatattgttacgattgctctattgcattattagttaatattgttaatttcttattgtgcctaatttataaattaaactttatcataggtatgtacgtatgtataggaaaaaacatagtatatatgggcttcagtactatccatggtttcaggcatccactgttggaatgtataacctatggataagaaggaagtattatatctttttccacccttttactttcaacctgcctatgtcacatatttgtggtatttttttttgtagatggcacatagttgggttaagttctttaatccactttgacaatgactgtcttttatttttaattggcatatatagaccaatttatatttgatgtaactatcgatatattagggttaaaatatgcctttttattttttgttttctgtttgttcactttattgatttattatctttatagatttagggggtacaagtgcagttttgttacatggatatattgcataatgatgaagtctgggcttttagtgcagccatcaacaaaacagtgtacattgtacccattacatcatttttcatccttcagccttctcccaccctcccacacctccaagtctccagtgtctattattccactctccatgcccatgtgtatacattacttagctcccacctataaatgagaacatatggcatttaactttctgtttctgagttatttcacttcggataatggcttccagttccgtcatgtataatgccgagataaacatatgagtgccagtatctttttgatatgatggaatatctacccttctctttgggtagatattcacaggaggattgttgggttgaatattagttctgtttttagttctttgagaaatctcaatattgttttttatagagggtgtatcaatttaccttcccaccaacagtgtataagcattcccttttctccacatcctcaccaacatctgttattttttgacgttttaataagagccattctgattggtgaaagatggtatctcattgtggttttaatttgcatttctctgatgattagtgatgttgaacatcttttcatatgcttgttggccatttgtatatcttcttttgaaaaatgtctgttcatgtcctttgcctactttttaatgagattattggtattttttgttgttgttgagacatttgagttccttgtagattctgaatattagtcctttgtcagatgtatagtttgcaaatattttctctcattctgaaggttgtttgttcgctctgttgataatttattttgctgtgcagaagctttttagttcaagtcccgtttgcctatttttgtttttgttgcatttgtttttcagatcttagtcataaattatttgcctaggccaatggccaggttttcttctagcattttcatagtttcaggtctcacaattatgttcactttattttttgcttttctataatcttttttccttgacttcctgtgaattactagaacatattttttagaatctcattttgatttatctatagtgatcttaagtgtatcattttgtataaatattcaaatggtttctctgggtattacattatatatacattacttatcagagtctaatagtgccattagtttaccatttcaagtgaagtacagagactttacctcttttacatccctttaccctcttctctttataacttaattatataaagaattttctttatatacatttagaataacataagatagtgttataattattgcttcaacagtcaaatgtaatttagaaaagtcaagagcagaagaaaagctgaatgaactcactcatatttttatatgcctcatttcttaattccttcttatattccaaaattctttattttattgtttattttctgtttaaaaactttggttagccttccttttagggtatatctgctggcaatagtttctcttggttttactttatctgagaatgtcattattcctccttcattcctgaaggatattttcactgggtattaacagttattttctttcaacatttaaaaaacattgtgccacttttttctagtctccatgctttctaatcaaaaatctattttcttagaattgttttccccctattgctcaggtgtagtttttctctgactatgttcaagattttcttctttgtctttatatttggaagtttaattatgatgtgttttgatattgatttggttggatttattctgtttggccttccaagaacccataggtttatgtctcttcccaaattagggaagtttttggccattatttcttagagtactttctttagacctgccctctttctcttttctttttaggacttcaatgacagattagatcttttgttacagcctcacaggcccccaaggctctatttatttctttaaaaattctattttctctgttgttaagattgaataatttccattggtctaccttctagctcaaagattctttcctctgtttcttctgtgctgttattgagttcatctattgagtttttattttgcttattgtattctggaattctaaaatttccatttggttcttcattatgtcttctattgctttgctgatacttttatagatttggctaattttactttttcatttttttcaaacatcttcgtaaatgatcattgtagcactttcatcatggctgctttaaaatctttgtcagaaaagtctagcatctctaccatgtcagttttggcatttattgattgtcttttattaaactcagtttgagattttcctggttcttggtgtggtgagtgattttttttttttaactgagatctggatagttttgtgttatgttgtgagactagatattactcaaaccttcagttttaattggctttctctgtagcacactgccataattggtggggagtgttacctcattattgtcaggtggaggtagaagtacagattcccatttggcctttgttgacatctaaagtagggaagttccttgttattgctggctgggcggggaggtccagctccccacataatccccactgacaccattggaagggaccctgtaactggctggaagagatgtaaatgctgtctccatacttggctttctttaatgttaccttagcagagtattgggtatttcaccatagcctcataagggtggaaatctgggctctccacttgaccttttctggcacagacatggtggggccaccatttttcctgtggtgtttggctggagtaatacgattattgtctaaatttttttttttttttttttttgctgggctttctctttcttgatcctttggctagagggtggaggatttgttggagctctttttgtctgtacctgttttcatttctgggttaccagcttcttacagctccaagtctggtatacaggaggttaaaaagaaaaccaggtaactcaccactgtgtttcctcacatcatgaagtccctaggtggtctgccttctctcctccattttttcttatgtttattttacgtatatggtacaggtcttttagttgtacttagtgggagaaacagggaaagtacatctactcaaagttcctgaaaggagaagtcatctaactatgtttcttaatacagttcttttcctaaaagagagaagtaggtttttattttcagatacaatgtattttttaaagaaagtatgcctaaatggaagtgtattccatgtaatgttcccagtgctttgactgtaatatttgtgcaacgtaagtatgtcaggattttaaaagttgccttgttgatctggttgcgatttaaaagtcgacattttgccttggttctcggatttcctttttatgcctataaagcatttacatcatttagtcagttagccaggagtacctattgccaataggcctccaatctcaagtaattctgggtgggaagtatccaggaagatgtttagatttgttcatggaaaatagataagctttccgatcaactgatatagagtcggataatagaacagctgggacttctgttgggccttgagtgattggtaaaatttaattagtagtggaagaaagggaagactgttatgttccagaaggttgcttaagcaaacaaactttttgagtgataattaggtgacaggactatctgaagtgacgggaacgttctggagtgccctgtgaagaactcattaaacaaactagaagttcagtagagaccttaatagctcagccatcaagccttaggctttcataaggaccacttcaatgtggtatagtgaaacacggaaatactaatctgttcacctaatagagcaagaagcatcacccagagaaatgatagaagcaccaagggttcctgagcgcttgtgcttcaggctattcagagaatggctctttactttctccagtgatgttcagtggtgagcaagagatatttaatgccaagaagtttttgcgacccagtctgacaaagttagtttatatatctccttttttaatcactaaattttctacatgtagagttgtattctcagtttactccttagcagtgatccaagacctcagggcatgtgtgttagtatgttaactttatccatgtcttccctttctatgctaccatgattatcccttcattttggttttattgtcattgtttttatccttttgctttatatacatttccataattatttaaataaattttgaatatggtaggatacctgtgtctaatgtctaatggtgtgctggtaaatattaatcacactaaaaagatatctatatatttgtatctatatctatatacctatacgtatagtcttagttcatttcatgctgctataacagaatacctgagactaggtaatttataatgaatgaaaatttattggctcatagttctggagtctgggatgtccaacatcctggctctagcatctggtgaggaccttcttgctgtgtcatcccatgacagaaggcagtagggcaagacagagcaagagagagagagagagcaacaagggcccaaacttgtccttttataaggaaaccactcccacagtaacaaacccactctcatgataacaacattaagcaattagtgaaggcagaaccctcatggcttagtcatctcttaaaggtcccacttcttaacactgttgcattggaaattaagtttccaacacatgctttttgcgggacacattcaaactatggcgtatacacacacacacacacacacacacacaaacacacatatatatgtatgtttatatatatgctatatatacagactgtatatgtaggtgtgtgttatatacatacatgtatctatatgctttattataaatattagatatacagatgtgtagcacacatttataaataataacatatacaatacattttattgtaaattccatatatccaattgattcttaaagaatgcttttgctgatttttggtgaactcttgtgtctttagccaacttacgattgcaactgctacctgagaaatgaaatttctttccaatctgctaactcttttcctagtacaatctatcatcactacatttgttatgtgtcttataattaaactatttctcatccttatacaaattacatttattaagtaaaaatctctttcagcttcaggactatgtaggaatgtcacttatttaatgatgagtgacttctttgctgagccaaataatgattttcaaattgaggaaaaatttttaaacagatattttgtgttatttagaatgcatggctacagatatatacatttttaagtttatcttcattattaacattttatccatctctttcttaagcccaggcaatcaaaaagataaataaaaccctggtttttagcttttgttgatttccatagtattaatactcataccatgtctgatttcaagttactaacatgatgttactgaaagaggaactgggaagaggagtacagcagcacacaattttatagtattttcatcatacagataaaatgcgtgtctataacatcgatagcatagatgattgtaaaatatagtaaaataagtagtgagaattttgagtattatctttccattttgatataatgcatttcattttaagcttatataatttaatttttaaaatggctgtgtttaacatgagctcgcaaatctcttgacactttaacaagtggttcttagacagcctgagtgagccagctgctgcatcacaccactgctaatgtcactgtcagagccagagtattgggttaattttggtttataagggcatttcaattttctcaagccaaattgtcaagaataaaaaagactttaggtttttccatgttgaggtttatttacctcttcctttatactctcatagagggtagcactgggtgtatttagtttcttattcccctctacttccttcttatattttacgccttttattttttgtaaataattttcctgaagtaataagctatacataggcaagcgaacgctgtaatggtgactccagtagcaaaagacaatggtggtgtcagagaagagtccttggtcccagaactctcccagggaatgaaagccttcttatccctgcaacccctgattggagttaggatggcctgttaggtcttgtgaaatgtaaagtctcaggagggtggcaacatgtttctccggttgatgggttgtttcttctgatatcttgcaatgccaaggctttggctgtccactccatgcgagacttcaattgagttttctgaggctctccccttggaaatgcttggcatattaggtagaaactgctgatctggaccactttcttttgccgtatctatagtttgaagtcacttcctgagaggaagaggccactcttaccagtagcccttgcctcttgccttcttagcaggcatagactcccctggctactcttacagttgcaagacaacctcttctcctattgctagtggtgacatctgtgaatgacctcatggagctcaacctgaggttttctttttatgtgattacgtgacttttattccgtcagcaaaatctgttgatctgatccaatgtgaagggcaaagaaggttaccaagagtgaattgggaaatacaaaatacaattaggaatgatatagaagggatatgtaaaaatgattttttgactaagaaacaaaaactggcactataaactctttttctttaggctgtgttgaatttatggcaattaagcgaaattaaagtactttactgtttttgaaacttaaatgacaagaaaacagcctcaggagtcttttttggtcctttttgatcttagaaagaaacacaatttagatacagaaaaaaaataggcctaattaagagaattcacaaactatttttttctttcattcacatgagatgtcagtgtgtctagaaaagcagtttgatgtgttttctcttgcctattcccatggatgttatcccatactcttagaacttaacacttttctcctatagccctgaggtctagtttcagctctattgtctcagagccaaaagcaatacatactgaaaaaggagcaaacaattgcttttatttagagtgctgagtcagggacagcagctgatgtaaaactagaagtgagggctagcaagatcaagggaagcctgcgaaccacgtcccagataaagtcacatagataattcagaatgaggaatggatgaagaagatggcaaacaatttgccaagccacagaaacaatcctcacaaagagagaatgtattaacaagaaagggtcttctatagggcctgccttggacgaaaggccatctgtttagatgttctaatgattgtgtgcctcgtgagatggccagtgccaggacaacagtggggaagctgtgtcttttcctaagctctggcagtcttgacaaacagaactcagttacagcagaaccttttaggaaatggttcaatattatcaacattatgacattttctaatctgtggctgtcaatttgggggtttgcaaagtacttggtgggatcacattattaaagacaagaatgccccgttttaaagtcaatacataagccattatttttttttttcctcttcaaaacaagtcagtatgaaggatgctgagatggacctagtgaacatgtgagcgagcctgttaagacgctgcttgtgattttatcactcagctaatttatttctcagccaaacacctctttcccttgtggtagtataattacaaataatttttattcttgctcacatattttaaaatttgtacccatcataaattgttggttaaatatgagatcataatgaacattgatgctgaaacgtgggtataattgtgtaggttaatctcaagataatcttcactaaagatcaagatgataaactgtttaactttcaattatttaatggaaattcttttatgttttcagttcttaactaatgtttacagaggaactgttatgatgattttatccactttactgggaacaaagatgatatatcagcaatacattatttgtggagagggtttacaagtaaaaatctaaagcctttttttcaattagtttagaactaaaatgcaaaagttatgaagaagtctattttattgtcataatatttagttaaatttcagtctacatttacatatacatttataacttttgcacctacatatatattttcatgtataaaattatataatatatattctatggtctccaaactgtacatacgccattgtaaccttttttgtaaactgttttatattacaaaattaatgtaatggaacttaggtggaacttttcatatattatggctattattaatgataatagggcttttataacacagtcaatattattccagtttaaaataaaagtgagtctttatttaaagtgattttttaaaaataatataccactcagtagtttacaaaaatgtcttgcgagggttttggaaggtttatttctgtggaaggagttcctcgtaagttatatcatgttggaaattctgagatgcaatattgaagccgaaggaatcctttaagaacatctgggcagtcccctgagtttcataggtgaggaataatgcagctgaaacttcaggcatttgtacatgacacagaccaaatgttgtgcctgggacactgccatgcactgtgaaagtctgagataatgtgacttgttaatagcacagatggcattcgcaaaatcttgccttctgtgtttttctcttctacaaacagcatgggacaaaattcattgtttttctaagaaacactgaggaggaagcatcaacaaaattaaatattctggcttgaaaaacaggggcccacctctttgttagtggatgcgatcctgcaaacaatgaatggagagccaacttattgtcaagtggcaaaggcatacattatttgaagacaatttaaaaaaatgaatatattaaaaaattggtaagtgtaaatatcaagtaaggaaaggttagtttgaacttttactctgtagtttctacatattgcatttgcttttgggataagtattttcctcattcatttcactctaatctaatggaatagaacctgggtatcctccacccctctagcctgtgggcacttgtggaattatattaaaattatatctccagcaactatggagactttaggagtccctacgtgttgtctatgggctcacgtgcagttttctttattttacttcctgccgatatcccctgcccattggctactagtgggaaatatgtggtggccactgttacaggggctctagggagagagctgcttccaggcctggaaactgccctggtggagcccataagtacccactgttgttcctcctgggtcatctccagtgcccaaagcaacactgtgttttcctgtaaatatatcctcactccccagctggatggatttggtcccttgggtcctggagtaatcctgattgatcctgagagataaattccactggaaacagtgtttttggcttctgtctgcagcctccttgaggatagggctgacctgtcctccaggcctgggctgggataaacaaacacactaagctgtcctctccaggggccatttctcctgccttcctccaagataccacaattaaacttcctgcctcctttctggacctctttttgtttatttacatccactcctaaaggccacacttcttaatcagattgtactggggattcagtttccacatgaattttggtggggacaccatgattcaaaccatagcaaggtgcttaggtttaaagtgttctcaacacacccagactttcttgagatcgcacaattattgttcagctgtgttactctaaagaaagtttgaggctgggcacggtggctcacgcctgtaatcccagcactttgggaggccgaggcggacagatcacgaggtcagcagatcgagaccatcttggctaacacagtgaaaccccgtctctactaaaaatacaaaaaattagccgggcttggtggcgggcgcctgtagtcccagctactcggaaggctgaggcaggagaatggcgtgaacccaggaggcggagcttgcagtgagccgagatcgcgccacagcactccagcctgggctacaaagtgagactccgtctcaaaaaaaaaaaaaaagaaagaaagtttgaaacacagaagttgtattttacaggtgaaaaagtattttctgctgcagtaaagatcactatctctggaaagttttgaccgcagtgttttgagtcattagttctgttgcctgggcaacttagcaaatgtaccaactccatagtatgtgggtggccatttacttttgtttcctgcttctgaaaaggtctttgaggatgtggatcaggatgctagagtaagtattttaaagtagagaagttctttcatgtggtaactccagaagtttgtaggatgactaggatcccctctcactggtcccatctgtgttaaaggaattgagaattgcctcctttggatctgagtacattggatgactcagactgaagatcaagaatttgccttacaagtatttcttttatgatgatataaatgttactcctgatccccggctattgggaatgaaagtggatgaggtgctggtgattgtgcatttcggagtcacatgactatgacggaaactttttctatctgtgacagaggatggcacagtgcatttccttaggaagcttcctttcatttccctaagaaagttggggggaaaagtagggtgggaaggatttctactttattagtttggctcgatcagagaagcagagccacagtgaatgatctgaaataaggggagtatgatacggatcctccataactgtgggatctgataaagaattctatgggatgctgtggtctctgcacctggtgtgggcttgaagttgctgtggatggataggatgggctgtcaggaaggaaagccagatgttaagtgggaaagagcaaaacccacctggaacccatgaggttaaattaaacccctccaggacaaactggcttggacttgaggaagctgaagggagctgtctggtgggaatgagagtagctacaagcctggagggtcccgtgtcaacaaaatgagcccacagatcagtcacaacatccaggagctgcaaccatgcctcatgcccttgacataccttcagtgtgcaatggctgctacttcgttctgctttccaaaacttatgaacatttctcttgttgtcaatcctagcctcgccccatgcagggaaggaaattctgagagatgtagtccagcttatctaagagggcacaggacaaagccaccaaccacatcttcataggagccctttttcccctagtcctttagatgaagccccagagctgggttactctcccatgtttcccagtgaattcttctgtgcccctactgaaagaaagaagagcatcatcttctatttcagttgatgtttagcactagaatgtatagatcaatgatattttgtggctcttctcactattccaacaaccctgagaggtaagcattgtatcatctacactttacagtgaagagtactggagtgtttattcaccagggaagctaagtttgggaaaaaagcaagatcaataactatcacaaaaaagcgtagtttggcttttaggtcagtagcgataagttgatagtcacgtgtaaagtctgaaggaaattactgcaattgggcagtgttgcttggagccaccctttcttggatagaggtgcttgaatgagcttccttggaactggctatcagctatgatgttcactggcttctcagtgagcacatgagtgctttccgggtgaggatggacttctggccatactcattttgttgtcaagttcatctgagaaatcgaaaaattgttctggcagcctcagctttcctttttgtcttttcaccacttcaagagcattcctagtgttttaaaatatgaggttatgctcatttcaatcataacttgaaacaaaaacgttgacatttttcaatgcatttataaaatcttcaccttctggaatctctctcttcttgctgatgagaaccatctgattctggaagcatcagttgacagaaaattttctggcagcaaaaagctcaatagtctattgggcacttagaagtcgatttcacagagtagccatttttttttttctttttgggatgtttatcacttgaaatgccagcactttgcttagtcatagtagtagtttgaaagcttacctctaggaaaaaaggcttgggggaacagaaagaaaccgctttagttttagaaaaatgtctacaaatataaaaatgatgaccaagggaaattaacccaacaaccatccaggatacttggaataaagattcttggatctttctcttccttttttttagctctttatcagttcggctgggcaccatcactgtattctgagaattcgtaggtgagtaatctatgttttctgttccaaagggattttcagtctcatagaaaaaggcaggaatgtaaacaaattaagtattcagagtattactaaaaagttttccaggcagttttggggtcacgaaagtgaagaaaaaattttatagagaaagccactctccagcaagactcaaatgttgaactaatatttcctaagccaaagttccccaatctcggtgacaagctacatggattagaggtgtgttaaattattgaattcctcagctttgggctcttggagctcctctttatattctggcctgctgtataagtattattttaaaatgcatgccatgacataaaaaaattggtgatcactgctaagcgaaaacatggggtggggaaagaacaaagggaaggctcagagcaaagaaactgaggtgtgagctatttccatatttgtaggcacataaagggtttggaacaggggagggacatgctcagatttgtatttagaaagttcgctcttctcaaagtatgtatgttggattggaatataaatgtacctcaaagatattgcaggtttctattttagacaaccacagtcaaacaaatattgcaaaaaagtgattcacacacatttaaaagtgaatataaaagttatgtttatgctacattttagtctattaaatgtgcaatagcattatgtctgaaaatatacacacttcaatttaaaaagtactttattgttaaacaaatactggcagtcaacttaaacaaatttaaaagaaaaaaaaacaaccccatcaaaaagtgggcaaagggtatgaacagacacttctcaaaagaagacatttatgcagccaacagacacataaaaaatgctcatcatcactggtcattagagaaatgcaaatcaaaaccacaatgagatgccatctcacaccagttagaatgtcgatcattaaaaagtcaggaaacaacaggtgctggaaaggatgtggagaaataggaacacttttacactgttggtgggagtgtaaattagttcaaccactgtggaagacagtgtagcaattcctcaaaggtctagaatcagaaataccacctgacccagcaatcccattactgggtatatacccaaaggattataaatctataaattctactataaagacacatgcacatgcatgtttattgcagcactgttcacaatagcaaaagacttggaaccagcccaaatgtccatcaacgatagactggataaagaaaatgtggcacatatacaccatggaatactgtgcagccataacaaaggatgagttcgtatcctttgcagagacatggatgaagctggaaaccatcattctcagcaaactaacacaggaacagaaaaccaaacacggcatgttctcactcataagtgggagttgaacaatgagaacacatggacacagggaggggaccatcacacaccagcgtctgtcagagggtggggggctaggggagggatagcattaggaaaaatacctaatgtagatgacgggttgatgggtgcagcaaaccaccaatgcacttgtgtatatatgcaacaaaactgtatgttctgaacttgtatcccagaacttcaagtataataaaaaaaaaaatgctgacagtcacctgaacctttagcgagttgtaatcttttttgctgatggagggtcttgccttaatgttgatggctgctgactgatcagggtggtggttgcagaaggctgggatggctgaggcagtttcttaaaataagacaaaattgaagtttgatgcatcaattgactcttcctttcatgaaaaatttgtctgtagcttgtgatgctatttgatagcagtttgcccacagtagaactttcaaaattggagtcaatcctctggaaccctgaagctgctttatcaactaagtttatggaatattctaaatcttttgttgtcatttcaacaatgttcacagcatcttcactagaagtagactgtacctcaaaaatctactttcttttgtttcttcaacttttattttaagttctgggatacatgtgcaggatgttcaggtttgttacatatgtaaacgtgtgccatggtggtttgctgcacagatcatcccatcacctaggtataaagcccagcaaccattagcgattcttcctgatgctctccctcctctggcccccaaccctgtgacaggccccagggtgtgtttttcccctccctgtgtccatgtgttctcattgttcatctcccacttataagtgagaacatgtggtgtttgattttctgttcctgcattagtttgctggagataatggcttccagctccatccatgtccctgcaaaggacatgatctcattcctttttatagctgcatagtattccatggtatatatgtaccacagttagacaatccagttcatcattgatgggcatttgggttgattccatgtctttgctattgtgaatagtgctgcaatgaacatattcgtgcatgtatctttataatagagtgatttatattcctttgggtatatatcccataatgggattgctgggtcaaatggtatttctggttctaggtcttcaaggaattgccacactgtcttccacaatggctgaactaatttacactcctaccaaccgtgtaaaagcattccttcttctctgcaacctcacggcatctgttgtttcttgactttttaataatcgccattctgactggcatgagctggtatctcattgtggtttttatttgcatttctctaatgatcagtgatgttgagctttttttcatatgtttgttggcctcatgaatgtcttcttttgagaaatgtctgttcatgtcctttgcccactttttaatggggcttttttccttgtaaatttgtttaagttccttgtagactttaaatattagacctttgtcagacagatagattgcaagaattttctcccattctgtagattgtctgttcactctgatgatagtttcatttgctgtgcagaagctctttaatttaagtagaaccatttgtcaatttttacttttgttgcaattgcttttggcattttcatcatgaaatctttgcccatgcctatgtcccaaatggcattgcctagatcaaaaatctattttctttcctccttcataagaagtaactcctcatccattaaagttttaacataagattctagcaattcagtctcatctttaggccccgcttctaattctagttctcttgctatttccactacatctgtagtgacttcctccactgaagtcttgaacccctcaaagtcaccatgagggttggaatcaacttcttccaaactcctgctaatgttgatattttgacctcttcccatgaatcacaaatgttcctaattgcatctggagtggcgaattctttccagaggtttgcaactttctttgcccagttctagccgaggaataattatctatggcagctatacgcttacaaaatatatttcttaaataataagacttaaaagtcaaaattacttcttgatccataggcaacagaatggatgttgctagtaaacatgaaaacaacattcatctccttatacctctccatcagagctcctgagtgaccaagcacatggtcaatgagcagtaatcttttgaaaggaatgtgttttttattttttttcctgagtataggtcctaatagtgtgtttaacatatttggtaaactatgctgtaaacagatgtgctgtcatccaggccttgttccatgtatagagcacagacagagtagatttagcatattttttaagggccctaggattttcaaaatggtgaatatgctttggcttcaacttaatgtcaccagctacattagtccctaatcaaagagttagcccattatttgaagctttgaagccaggtattgactcctctttatctgtgaaagtccccagtggcatcttcttccaatagaagactgttttatctgtgttgaaaatccgttgttagtgtagctatcttccttaattacgttagctagatctggataacttgctgcagcttctccatcagcactcacacttttatgttatggagatggcttctttccttaaacctcatggaccaacctctgctagcttttcttctgcagcttccttgtctctctcagacttcatagaatctaagagagtttagaccttgctccagattaggctttggcttaagggaatgttgtggctggtttgatcttctgttcagaccactaaaactttctccatgtcagcaataaggctgttttgctttcttatcatttgtgtgttcactggagtagcacttttaatttccttacagaacttttcctttgcattcacagcttggctaactgtttgacaagaggcctagcttttggcctatggcctatctcagctttcgacatgccttcctcactaaacttaatcattcctagttttttacttaaagtgagagacgtgtgactcttccttttacttgaactttagaggccaatgcaaaataattaatcggcctaatttcaatattattgtgtctcagggaaagggaggcctgtggagagggagagaggggaatggccagttggtggagcagtcagaacacatacaacattgattgatttgtgtggtttgtggggccccaaaacaattacaatagtaacatcaaaaatgacggattacagatcaccataacagagataataataatgaaaacgtttgaaatattttgtgaattaccaaaatgtgacacagagacatgcagtgggcacatgcagttgaaaaactggtgtctatagaattgctttacacagggttgctgcaaatcttcagtttgtaaagcaaaaacaaaacaaaacaacaacaacagaacctcagtatctgggaagtgcaataaaaagagatgtacctgtatcaggagagcaggtgtacgaagcctctgggagacctctgtaatagacaggtgagaagttgttaagctgtgaatgaggagaactagggaaggagaagcagagataaatatgagggatgttaaggaggtagacttggaaaaaaaaaacttggctacatattgtttggaggaagaatacagtattcattcatttattcatcacatattttttagttagttacaatgtaccaggcactatgctatgctctggagaagtaatggtaaataaaacagaggtagtctctgttcatggatattatattttggtaggggacttaaaagtcaaataatcgcaaataaatataaaatcataagtggtctgaaatatgggggcaggatggtatggattgtgtatgtataacagagagcctcacctagtccacagttaaggggagattgctgcgaggaagagaggtttaaattgggatcctaagggtagacggaaataaaatcgatgctggaagggttgttgtggtggaggagagaattacaggcagagccagcatggacaaaggccttgtggttgtgggaagtacaagagtgaggaactgaaaaaagaacagaggagctggaatataaagaaaaagtagggagtggtgtgagggacagctggagaggaggtagaaggcagccacacagggccatgaaggctgtgcaaagtattttggcatctatcctcagggcaaatatgaggtttaagcaaagtggtgtgtgtgtgtgtgtgtgtgtgtgtgtgtgtgtgatctgaccttatttggactgtattaattttataaagatcacgttggctgcagcatagagaatggattggagagaacgagagtggagccttgtgggagatccatcaagcctgctgtggttgtcatggtgagacttgggcagctggagctagggtagtgacattaaagacggagggaagtggatagctctgagagacatctaactgtcagcattaatagggcttggtgatatgctgggaatgggaagtgagagagaaagaaaggatatgtttgtaggtatctggtttggatgatgggtagataactattttatattctctgaaactggaaaaacaggaaaatgcatgggtaagggaggaatgtcttcaagttgaacatgatatgtccagtaatcatttagagttccagagtatgatctgggtaaagatatagacttgtgagtcatcagtctataagaaatgaccacatatgtggtaatgtaatatacctgataagcaaggaagattatgcagtataagaagagaagagattgaaggcagaagcctaggcagagatccaggaagaggagccatccatggaggatggggaaaaggaaagtcatcatgggccaaagccactgatgacatcaaaggggacgaatttgtcagtctcaaggagaaaagagagaaccattgaatgttgagtcttcagaaaacatctatttctctttaaaaaccaaaggctgaaatatactgtatttttatgaaataacaaaatagcttattaaaaattgagaaagtaggtgctcaaacatcatcacatcctgctggacttgtctttgtccctgaatatactacttccttttccccctctaatgctttgggtacagcatactgaggctgaatgccggccccacccaaatatgttggactgaaatcagaagaataaaagaaacaacaacccacaagtaaacataacaaatttaatcaaacaatcaattcttatgtcttcttcttcctgcctctccacatataaagagaagatttttcactatccacgtgtacacaaactgatttggacaaaagcctctatcagaagtgattgggaatgtcagggcttccaaattcctccccagcagcttgctagatgctcaggaaggcacagtttctcactggggacatgtggggtcccaaaaccttgaaaggatgtttaatgaatgcttccactaactaaaatcttggggatgttgcccttggtaatttattgtgaagtgtatgagtcctcattagcccccttttcaatcaacacatagttattacgtatctattatttgttaaacactggggtggctccaaaggaatataaattctggcttccttccagcttggcccacattccctttacttcaaggactctcttgacgcctccagccctcagttataccaccctcctttgtactcttgttggcctcatatgctcttgtaatatccagttttagcaagatgatggctcagagatggcttggactctgcggttctgagacagcgcttggcaggttaattgtatattaatcagggccagatggatgtaatcagacttgcagaaagattttaaaaggttctggactcaccaaaatgttcaccagcctggaaacattctgataaagataacaaaggttaacaaccctcaggaggattctacatatttataggatgggacccaaagcattctgatgtaattgaataaaaatattgaccttcccaatggaatagagcatacttaggcctacatgtggagtcatatctctcctgtgttgtatcatccagttcttgctgcaggatctgaactcagttttcacagactgcctgtgttcatctatcttgtatagtcttggctcacacacagttacagaggaggtttgcctttgaggtcttcttcatgccattatgttcattctctacccaaggtgctaatgctctcctctggattctgggctgaaattcttcccctttagccattgtctgggtgcattgcgatcttcctgtagggaagtttgtacagcatctcattccctcgaagctctactctccattctaaagtgatctctagttatttttgatacaatagcctgtgtttagtttataacagctgataacgggttaatgtgctacccttctctgggatatatagacctagaatcacagggctcaaaacaaagagtgaaacaaacaagatttcagaaacttgatggggagataccacgggctataaagctgggcttgttcattgtggctgatgtctcctgaacaatggatacgttttgatatgttttcttttctcagaaccagaatgttaaaaattagttaatgacttttgaaataaatttggcaatgtgagattccaaggattagaataatacctgcttaacttctaaggacaatctgtcttgcatgctagaattttgttcttgctaatgacttgaattgctaatctagcccatcaatcagcaggctttgcatggtactatgacttaattagtatacattaattatatgtatgcattaacttgtatttaattatactaattaagtttagtttaatggcagactgtctagacttcagtgtcctgccttttctgattccaggcacctaatatagctaacatcaacacacttggtttctccttgcaccccattttcttttcaataaaaaattattatcattattattaatttttctttgtagagataaagtgtcacaatgtagcccaggctggtcttgaactccttgcctcatgtgatcctcctgtcttggcctcccaaagtgctgggattgcaggtgtgagccacagcaattggccccaattttcttttatgttctccgtttttttcttaataggctctgtctcttcctccccttacagggtgctctggccacaggctatgggttgtgtagctgctgcgttatatcagaaatcctggcaggactgggtcaaatcagggagtgggaggccctcactcagagaaggctcctttcagcagcgtgatggggatggagcacaatgggtcaagcctggagctctcctgcagggcagctgtgttcccgcttctccccttactccctgtctgtcctcaccccaagcaaaacattcaccaagttatctccttgtggtttctccacaatctgttcacatcatcatgttagtcatccttcctttggtttgctcttggacggtgtttatcagttacctcagctaatcccacggaacatgtttcctggattcctacctagatcctccatttaccctactatgtatttagaaaataggcactggcataagtgtctatatgcattttttcatttaatcctcatcacaaccctgacacttatttcatggttaagcaaactgaggccgagggagatgaaataactttcctgttgcaatgtcccactgcttcaaaaatgttgtgttcctacatattgtcctctgttttcttctttcccaatgcaatggtgcccacatcttctctccacttgcatttccacagttgcctcagacctggaagtctacaaaagccttctgtctcttcacctctcacttcctaccctcttggagcgtgagggaaagcctcagggaagggagtctggttggacttccagaatgaggatgataaaactgttcctgagccatgaaggtcctgagatgactgccaaaggcacatagtgggtgcttagtaagtgatcattgaaagaatgggcaaatgaactggacagtgatgagtacagtcttttatgtttggtgtgtgtattatgctatgatatgatacatttagcggctcctaaccatgatgtttacccacaacactgtgtagcaaaccatcctgaggctttttcacaaagagttaaaacagctttccaataatttattacaaagatagtttacagcccaattcaaggccatcactgagaattggataaacttttcttgaatgggaagaaaaggttaagataacccagaatctgtctggtgttttcacagcctgaagtgagagatttttaaatctctcagaaagtttgctgcactctttgttatacttctcttccaatttgagggtgaattttttttttcaaaatctggctctgcccataacattaagcatattgtggcaaaggcagtgtaatgtgcttatagggagtcactaaactgtttcttttccctatgtggtgcacggaaagactatgtttcccagcccttggatctagataggatcatgtgactaatgcacaccagtgaagtgtgagcaggaaatgtgtatattacttttaggagatcatgaggtatctggtgtaccttccttactctctcttctctttcctgtttgcttgggacaagaaatggagggttccaagatggcagagcagcatgatgaaaagagcctgaatctctctttcaggctgtttccatcaccactcaggggagagctgtgaaatcaaagcagattgtgattctcagattgtgatttctcattcattaagagaaatgaattgttatttattagtgttacttcccttgactaatacttatataatgtatatcatgacagaaaggtcaagaaccactggcatttattttaactctaagtttactcaaaagtatttcctgacattgacatttgagagagtttggttcacacctataatcccagcactttgggaggctgaggtgggcagatcacctgaggtcaggagtttgaaatcagcctggccaatgtggtgaaaccccatctctactaaaaatacaaaaattagccaggcgtggtggtgcatgcctgtagtcccagctactcaggaggctgaggcaggagaatagcttgaacctgggaggcagaggttgcaatgagctgagatcatgccactgtactccagcctaggtgacagagcaagactccatctcaaaaaaacaaacaaacaaaaacaaaaacgcgcgcgcgcgcgcgcgcgcgcgagagagagagagagagagagagagagagagagagtttattctattttatttctatttctaaaacatcattgtcattgtcatcgtcgtcatcatcatcatcatcattgccttaacaaattgagcacttactgtgggtcctgtagaatcctagggtactctcacatagcctgttaaatcagtacctatcatctgcctctccctactatgcccttgccacacagccagattatttgatccttggaaatgccaagcatgtttctaccttagggcttgacatttgtttcatctggctggaatattcttccccatatctttgctggttgtctcatatgaatcattcagttgcatataaattatgacctccacagcaacacattccctgatcattcaaacgaaagtatccatctggtttctctctctttgtagccctgttctattaaattcatggatcatttgaaattatcttgcttccttatgtattatttatatcttccctgggtcccttcctcctcaccactgtagcctcagccctggaaggatgcctagtacacagtaggtgctcagtaaatacttgttgagtgaataaataaataaaccttacatagtagaaactatgacttttttctttctttttaaaaatgatacctattatatagattgtgcctgtgactacagtgaaaagttcggcccaccagctaagcttttttatttaaagaaagccaagtatccagatatttacaaatggtaaatgtttagaatagtgtagattctgctatttgacagatggattcaaaccgtttagatggacttaatacctaaaagatacctaaaagtattaaaatcaatcctttgatgcatgtttgaaccatgttcactattttaaatgtctaggtcttgcaaatgcatttatttttcttcagaaatgcaaaccttttccttctgagggacagtatttcttaagttttggaattgtactcattataactctgtctctcagattcattatgctcattagcataggtaaggctttgagaagtcctgcacttaagaaacctgtttaattttatttaatccagtatttcccgaattatttgacactgggcttttttttggtccacgtaatgactattaatattttaaacaaaactcactgggaaacaccgctccagagtatgctaaaaatttatagtgattttaatggttgctacaaagaggtttgcttcccaagtttgcagctctgtctatgttacaaaaaatttgtcattttgtttcacaaacttctaacacataaaaggaaataaactatgcattgttatatatttgcagctttctgttttgttgaaaggatcttttatttatttattatttattattcttaccttcccaatagctcattgatatggtctaatcaatcttcctgtcacggataagagctttcatggctgtggggttaacatattttctttaaaaatgtagcactcatcaactatgttctcttatcttaatccaattccacaaatgtggaaatatctttttcataaattcagagatgaagcgttgactgaggaagaatatgatccagatataagatcatcctaacaaaagatgtctttttcctacaggaattttctgaattttaggttctcaattaatcaagcaatcatcaatacttatgaattcacttagtatgtgttcaattttatattttttgctgaggcatctgaagaaatatgagacaatgtacctgtcccagtgaagcttactgtctctctagagagagatcatgattactctcagagcaattacagtagagctgaatctatagactatagggtctgaaattcatagcagaggaaaatcctttaattaaacatatttcaagcttattgatgcagttatctctttgcagaactcctactcacctgcctaccatgaccaatttaagtacacgaggaattcttattgtgtaatttaaatttatgtgtgaatctgttaaggaaaaattaggacattttgtccagtcataaacattggtttggtcaatttgggggtcaatttttcccttttctttctttttttggagacagaatctcactttgtcacctcaactggagtgtagtgccttgatctcggctcactgcaacctctccctcccaggttcaagcgattttcctgcctcagcctcacaagtagctgggattacaggtgcccgccaccatgcccagataatttttgtatttttagtaaaggtagcgtttcaccatattggccaggcagatctcaaactcctgacctcaagtgatccacctgcctaggcctccaaaaatgttgcgattacaggcatgagccaccgtgcctggccaatttttcatacctaatatataaggtgaattatctctctttctctctctttagagacaggttcttgctccgtcacgtgggctggagtgcagtggtacaatcatagctcaccacagtctcaaacttttgggctcatgcaatcctcccatctcaggctcctgagtagctaagactacaggtgtgcaccaccacgcctggctaatttttaaattttctgtagagtcgagggtcttgtgacgttgctcagtctggttttgaactcttgggctcaagcagtcctcctgcctcagcctctccaagcattgggatcataggcatgggccacattgcccagcctgaattttcatttttaattctcattttccatatattaatagatttggattttcttgggtcaataactacaggaatatttttccttttgagttttacttaggctgcataaacatgtgaatgtggtttaaaaattaatgtaaagttaaatattttaaaccactacacacacacatgttattccatggacagattggaaagatgctgggcctatatccccataaagttggggagcttgagaagcaccgtggcagaaattgataagaggtaggctagttaataacctgagctccttacatggatggcaagtgtccatgagtttccttggactcagaatatgaagcaaagacattagctgtgaacaggatccaagaggccactaggcaaagtgagcacacttcatgaatgaagtctatgcaggagactgatcactggtggtgggggctgtgtccatgctaccataggatcattcaggccaggaagttgcacagagacccagttgggtggctatcgaacactacttgcctgagtctgtatcaggtatttattctttatgtacagtcaaatgcccatgtacctgagaagatgagcaaaatcataccaagaatgagaatatactaccccgctccctgtcttgttcaccatatacttacttgttgtacctgattgtccaaattttccatgccttccatagagtgtgatgtgagtgggagtgcagaataagctttgaaaactcctttaaaaaataactgagtttaaattgagttttgagttagattatgttgtactagatttttctgtttctgagccgtaatggaggaaccagagtagagatcagtggtagaaaatagagctttacttttgcaacattgtaaccaagaaatctcatatccactacacacacaatgagctcatgtattcccttctaactctcaccaaagtgaaatggaaagaaccgatccactccatttacacagattcctgtgtcaggagatatattgctcttttgtgatttttttttcatcaaagatgaatcttgatatacctttgtataaaaggaggcatacaggaagggaaacgtggaggaaaggaagggaagagatcctacagattggtttgctccagtagatactctagcaatattcatcagcaaacttccagggttgctacatacaatattcattcatttatggaattttttccataatattaccatttggagcctgatcttagggaggattttcctataagagcataaagtgttaaaaatgagttctggcttccatagatattttaataaatcccaataggcaactataattttaaatttgttaaagcattttcaaaggctaatgtcaatagcaaaaaaataaagaagaaaaaatatccacatgcagcataaatatgacatggctcactgagtcttctcatctctttgaccttttcctgtggtaatgttggcattctttctattaaggaaacaatacatggcattttaaaatgaaattagagttaaatggagttggggagatttcatctgggaagtaagatcaaagtgttgttttagaaacactcatctaattttttttagtgcagtgtctttggaaaatgttattaaaatacaaatacatttaagagcaaactggaggagggagatataggaatctggggaaaatattttgtaattatgtggtaagtctattatgtagcaaccctctttcaagattaaacaaatggtaggtggtctgttgggcacatgcaggagccgacaggatccagttatacctgagaagcagaagtttggccctggaatacatggtatggagaactatgttttgggggatgttttcgttatcctcagacgtaagaagaggtaatgcatactcaaacagctgtaatttatatagtagaaatctcagctagagaatacaagctgtttttcaccttagcatttagatgtatctggccattttttagcatatcaactgggttaactagtgttttacttgcagaagggattgtgagaaattatcacaaaatgatccctattttccatccttcccttcagccacatcctttgcaaagtgagtttgtagctcttctcatcagggatggaatctagttcctcagctctggaatttgggctggtcttttgacttgctttggccaacagaatgcagggggaataaaattatgacagtgttacgcctaggtctcaggagaccaaaatgcttctgtttttcttcttggaatctcatcactgtcatagaaatcagcttgcactggcctactagatgatgagcaacacttggcctggtcactgttgtcaccacaatggacagtcagtcaaccatcagacacgtgagaaaatctgggatcagccagcctttggccagttgaccccagatgcatgattaagcccagctggatatcaactgaattggctcaaatcagaaacattttgctgaatcatagactcattaacaacaataataattttttaaatgactacattttgggatgattaaatcccaaaatgcagccaaacatactgacagagaccagggtatcccctgggaaagccagtaccctgaaggtaagggccactaacaagcactaatttggtacaaagataatgggccatttcagagtggaggatgaaatagagcagtggttctcaaagcttgggtctaggactagtagcatctgcgtcacctaggaacttgttggaaattcagccctttagctgacaccttggactcactgaatcagaaactctgagggtagggtccaacaatctgtgctttaacaagccctccaaatgattctgattcatatgaaagtttgaaaaccactgagatatatttaaaaggcctgggataggaataaagtttcttatacttctgccctggcaattcctcaggtgatacaatttggtgattttagaaacacaaaattaagtgacccagataaatacaattatttataaaggatagggatttcaggcagtttgaaggcaaatcatttctattcaacttgatgctacctattttgttttgagtatcagaaacttagaatccgtctcaaaatctgcaataatggtgcttaaaaatcaatatccacagtagtttttgaaacactgactatgagatggatactgctggcaccatgacgatgcctattactagcacatcaccctggtgccaccgctatcgtcactatagccaactccttcctaagtgcaggcactgtgcttaatacttcacactaatcaacccagttgctgctaaaaacaattcagtgaagcaggaattattatttttatttcaaaaatgaggacgcagagggacttagagggattaagtaatttgccaaaggtagtacagtagaatctctgctaagcaggaagttaatgtttctcttttgaaacgcaataggaaacagtgatacactgcaaaatatttaacaactagctttctggaaaataacagccactgaacacccccgcccgacctttgcttttttagtgtttgctaatttccatggtataaatattgatactataactgatttcaagctaccattgtgaagaaactgtttgtggagttgggaagagatgcacacagttggctcttatgacctgatatgagccagctccacatcattgaggggaaacatgaatgaatcctacttcctggggtccatagatgtgattattttaaatttgatctttaaagtaagtaattattttcagagaggaccatttcatcactttccggtataatcaaaaaagacattaaaaccattctgtcttaagtttgaatttcagccctgactttacaaagaaaatatatttaaaaaaatcatctgctttcatgaacttttgggagatactcattttatggagttagagctgggtggtagaaccttatgaaaacattttttcttgcccccatgactttagggaaggatgcttatctagtaaaattgttttttaagagatggggtcttgttctgtcgtccagtctggagtgcagtggcagtggtgtgattatagcttactgcagcctcaaactcctgggctcaagtgatcttcctactttagcctctcaagtagctggaactacaggtgcatgtcatcatgcctggctgatttttttttatttttagtagagacagggtcttgctagttttcccagtcgattttgaacttctggtctcatgtgatcctattgccttagcctccaaccttctgggattacaggcatgagcttgcacctggccctatttaattttgttgatctctaagcataaaggctttaccacatttctcagtattctaaatgagtgctttatcaacctcaagaaggctctctcctaggttgatacgaaagcgcttcaagtgtaatttaaacctcttccctttgttttatcactacagacatgaaaagtgattgactggcattcacctcttagaaactctcctacattgacaaaagatgttaaaagattactttagtatctaattccaacttctttaaaaataacctttcatcattacataaagaggaagatttccagttaggcaggctgtcattattggttccttaagagtacattcttaagacctctcaaattacgaagcaagaatgtcctgacctatttttgacatatacccttcttcatttcatccaatgttgggatattttttattgtggtaagagcacttaacatgatatctatgctcttaacaaatttttatgtgtataatacagtattgttaactatagacatgatgatgtacagcagatctctagaacttattcatcttgcataattgagactttatgttagatttttaaagagaaaaatgcaccaggcatacacttccagttctgtaaatggcttctcatttatatttcactgggttcagcttcaagagattaatccatttggaatatcttggctgtaatgcttttagaaaaataggaaaagtaatactgcctttaagtgactgtaccttctgcaataaagagggagataacttttcctatagaagtttgatttcatgtggaaaggcataagatacactataaggtgttgaattttttcattattgctctttcccacctccaccactcaagtaagagacaatgtttaaaaatatataggtaacttctttattaaaatgtatggaaggaagttatttaaaaatgtgttcttttgatatctcttagcaggaaccctcttcctaccctctctcactgcatattggtttggctttgtatttttttttgttgttgttgctatgggaaaatctgattctgagtttttcacttcagtttgagtagaagcagaagatccttgggaaagttacagaccctgacctttatgtccctggcagtgacatcccaaggataggaaacggtggggaaatcaggtgccagttcatgagctgacaaagcatgctagaaggatgaacaataaagggcctggtagagaggaaaaaagaaattcaagagttaaaacgagcagggttaaaattatgctgaccttgccttcctaacttagctgagactttggaaaatcatgtaacttctcagtgtttttaactataaaagttaggccagtgctgtatactgcaaaggatgaaataagttaatgtacatattaccatctagtttaatgtctggtacatagtaagtgttcaaaaatgcttgtaggtcatctgcattcagactgcttaggatttccaggatacacttgagcaaattttcatatattttcctttgttggtagaatagcatcatttcatgtaattcatgggtctctttgccttctttcctggttgctgatctttgcttgtgttgctgaagttttacattggcacgcctaaacttctatatagcatagaaatggagtattaaaagtaaggttttttttcctttcttcttttatttatttttttcctacctaagctattctaactaactccctcatgacagctgagtgaaattttagtattagtttgctggacagaatttttagggaagtcagttcactatgacttctgctctctgaaaccttgaaatgcaattcaaatttaaagaggcagaatcagctcataaagtgtgatttcaggattagactagctcttcgagatagcaaaactgtggtctcctgaaattctagagccaatgcttatctacatttaagattttatttggaactgtcactttgctcaaattctaaagatcctgtaatcattttattattcatgttatctttaactcttaaactgtgcttatcaattctctcaagacatattgatactttcctcagcaaaatatgaaatacactatgtttgaggataaaaaaactacgatcaccttacgtaatatagaatttgatatcaaaagtgatgtgatagcatcaaagtcaaaatatgtgacactgacttagcatttggtttcctggcaatgggcagtagggtaattgatattggaatctggaaagataaagactcatcctatttggtggcaatgcatttggtaaagccattatcctatgagagctcggaaaacagacaaagtgaagacaaagtatacagctctaggaaaataaattggaaaatggaatattattagagtgtgttaattattgattagttattcaaagaaagatatgagctgcggcaagaactggctggttaacaagcagaaattttaaaaaaaatgtaggaacaaaatgtgggggcttaagacattgtaaaggccaattgcttctagacccggtgtctagaaatttgagagaaataggcatggtgaggagagggagggtggcaacaagtcagaaagataaagcaggtttcagaattatatctagcaaaaacaaatttgggtgtttactggcacacgaacttgtctggaacaaatagatacaaaatctactaagggccaggcacagtggctcatgcttgttatcctagcactttgggaggccaaggtgggaggatcacttcagcccaggagttagacatgagctggggcaacaaagcgagaccccgtctctacaaaatataaaaataaaaaaatcagccaggtgtggtggtgcatgcctgaagtcccagctgctcgggaggctgaggtgggagaattgcttgagaccaggagtttgaggatgcagtgagctatgattgcaccactgcactccagcctgagtgacagagcaagaccttgtctctaaggaaaaaaaaaaacccaatagcctattaagtttcaagagaattctactgttaaagaaatcataagtctgaactaaaaagccttaatgatttacatcttagaactcttgggctgccaaatgggaagtgaactgtgaaaattgtactgtctctaagaagaccaggctctcctacttcctgtgttgttttggaggatagcatgtatggaagtccctctctgaaatcagagacaaggcctacaagagcaatggaaaagggagttctctccagggagtgtctcctgggattgcagatggttgagttctggcaaatagaaagtgggtggatctgatgtatgcacatttccaggtgtggctcagaaaaaccacccatgtgcaattctctttttctttctttatctgctgatagggagtcactggccaagataaccttggaagccaataaaatatcagggtttttgttgttgttgttgttacagcagctatgaatgacctaactggtacacaaaataaacgcattaaattggccgcatttaagcaccactcccttaaataacagcatctagcctgattcttagagccaaagtctttgttagttaatttcttgctaactataaaatgttataaagtgaaaatcaactgcaaagatatctcgagagcctggcaatgttgaacaataagaatcaagagagaaagggaccttgttactcctcagtttagcaggagggttcgtgaacattctctttagagagctgccccttaacactccagggactgagggtctgtgtttcccgccattgcctttcatattcccagaagagacaaactcattgtctaaggaacaaccagtctagaattaggctgatccttttttttttcttttttgagtctgtccacaacatttgattgctactgcatatatccagttttcaagttaaatttgctgaattcctttaaccatccttttctaaagacattttccagacctttttcaccatcgaggttgctttcttccaaatacaatccattttgacagttttcttaaaatgtggtactacagattgggctgagtggtgcagaggatacggagcttccttcctttgatgtgctaatggtacctcatattctattaactgccatggcctttaatagccaggtcaaacttgtaggctaattttgaaatttgagtcaactcattttaacagtcttcctttttgtttactttttaaacactccttttctccctccctttctctcttgctctctttgtctcttgaatacaaacttttcagctagaacttgcttctcttgctgttttgccagagacttctctgaagcatacgtaacacataactttacattcattggatttcattgttgttttccactcactatttcagtttatatagagtatctttattttttaaactctgaaggctatttctttaaataaaagttttaattttttaattttaattttttcaaaaaatgagatgggttctcactatgttgtccaagctggcctcgagctcccaggctcatgtgatcctcccatctcagcctcctgagtagctgagactacagacatgcatcactatgctcagcttcttacaaaagcaatttgctgtacatttgcagaaactttggaaataccgagacatataagaagaaattaaaagtctgctacgtagtcccatttcttaggaacaaataatacttcagtgtactaattactttaatgtacatgtctcaatttcaatagcagcaccctgtgaggctatcatattttgacttgtacagtcattccgctcctcatttatgagccgacatgaatctatgaatagctccacaggcttttacatagttttgccagtctctgctctgataacagatgcattgagactccagagagcccctcagattctttattgattcatcatcttcaaacaccagaaggactaatggagaagcagaaacatctaacaatcaaccagttgttctgtctccttgatgcaaaacaactaacttcagagttttttccttccttaattgatgagttatttgagacttattcccaagctcaagagactcacatcaaaatgctcatggtgggaatctctcagtcttgcttatacaaccctgtttatatgcattaaggagttatctgctgaatgaaattccccaggtcagcgaggactcaaatcattttcaaattgggttaaatttgccatttctttggctttcgacagagaagaatgggaggtctctggagcctgcaacctgatcggctctcatcctctagtgtttccttctaacagacagggtgtgatccatgtggcattacctcatgtaaagcacgagcccactgtgttctttagtcatctgtggggcatgatagtgtgttgagagacaggggtcctcgttttgttgaattctgaaagttgatcttggagtaatagttttttaaatggcaaaccataaagtttatttgcacaaaaatcagagcttggtgacttctttacaatgagctaattttggctcttttccagaacaaaagtgaagtggtggcaaagtgctggaccagatgttagaagtctccaatttgctctcgacaacaacaatccacaagtaaccctgagaaaagtcatctctgtttccccactggtaaataatggtaagaaaaatagtgcctagtggggcttacgtagaggactgggaagctgaactgtgaaaaatgattccaaggtttctggtcaccatggctactactcttttgtacccagttctttgctcctcaaggagccttgttttctatacttgtgaatatttcaaccaactaataaagatttaatggc

SEQ ID NO: 1266 - DNA, 99960 bp, Homo sapiens
aaatgacgttgccgtttccgggtcacccaggcagcttgtggcggcgaagccatcggtgttcgctgatgtccagtctatggagtcagttggtaccggtggcggcgcggaggcagaaggcggtgtccgagtaggggcctctgccccaccaggatgttacccggcttggccgccgccgcggcccacagatgtagctggtcctccctgtgccggctccgtctgcgatgcagggcggcggcctgtaatcccagcgaccgccagggtgagtgtcccgcgctggccgctggctccgtagaagccgaactggagggccaggctgggctcggcgcctcgcctggggcaattcgcccacttgcctttcgccaacctcagaaccttcctttctggcctccgcctttccagttcagcctgcgcagcccgcgggggtcctgacaggtctctgactctgatgccttctgcagccctagcatggcccccgcgggaacttgtgggcacctcgcgggccggattgcacctctgaagcctaccgctttgtaccaaacaaaatgttacgtgcgcatcgcggtgtcccgcggttactcacctccgcggttggaaattgcggactccgcaaagttccagggtctttggagctttccagcgcaccttcatttagcacttggttgagattttcttggccttctttttcttactctcccaacttattttcttaaattttctaaaaggaaggaggggtgctactcactacggatcttttggaagaagtacgaaagtatccgacaatcattgaatgaacccagtttgggtccgaaaaacaaagaaactcttcagttcggctgagcagtctttttggtgaaaaggtggcagttgtagtggtaacccagaaaaaaaggtggttgaagagaattttcgtctctctcaacattcttttctgactcaaatttaaatggtttgagagtttccaaaataacattgaactaatcaggcttaccttcgtttttgccgtagcttgacacacattgcttgacactgagaactgataggatctctgagggagaagacagaactaagtccacccttaacctaatccctccattcttgggatgcagagagtatttaccgaaacattcatgttcgaagccaggtgtggtggtgcgctcctgtagtccagctactcgggagactgaggcaggcagatcttttgagcccaatagttctaggctagccttggcaacatagtgagctgtctgtaaaaacataggtttgaaaaaacctgtaacatgttcgtgacctcctgaaagaagtcggaagttgcagtcattcgagattttatgtaatataagctatagtaactatgctgtggatataaattagaatatattcgtatcttttatttgcaataaatgtaaagctgaatcttagaatttcaaacggataaattttaacagcactattcccagggcttttttggtagtgatagaaaagtgtaactgttgagtttttccatattggcaatatactgccaggttcccttatggacagaatgaatcatcggctgggtgcagtggctcatgctgctaatcctcaggaagattgtaaaccttaggacgctgaggtgggtggatcgcttcagcccaggagttccaagaccagcccgggcaacatggcaaaactgcctctctacaaaaaattagcctggtttggtgacgcgcgcctgtaatcctagcctgtactcaggaggctgaggtgggaggatcgcttgagcccaggaaattgaggctgcagtgagccttgagcatgccagtgcactccagcctgggtgacagagtgagacctgtctcaaaaaaaaaaaaagaaaagaaaaagaaaaatgaatcatacgtttatactgtactccagaatccccaagtaagtttctaacacaattgtttctattgaccaagcaattttggcattttacactgaaattacagtggctgttaaatttagtctaaactgccctttaagtgttggcaaaaaggagaagaaacagtgtaatttgtaatccctcttctgtgtagctgtcattatgttgaaaattatgtattctttgtctcatctgtctgtgaaacacagataattattacctaccttagtggtcaaaatgactttgcaaagttgtttggaatgtttattactacaaaaaattaaaattttttttacacttaaaaatgcttagtaggtttttaaaaataactttgtgaaaatttagtttcagtaatgaagcatttcttaaaagggcaaccattattatggcaaaatttaaaaatcatttagaaaaagagtactatttaaattggatgcatgtgagaagactatttgaagaacttttggagaaagaaaatctaaaaacagttgtttttatttgtctagaagtaaggtttagtttatgcttctaaaatgcctgtggctgggaaaagcttataaagcataaggagaggaggaaaccttgagggattgcttgaatacttaaaaatgaggaatgcctttaaaggcaaaatagaaactgtctaaaagaaatatgagagccctgtttgtaattttgagttgtctgatagccacattaaaaaaagtaaaattaaagatgaattaattttaatatatcctagaattaattttaataacgaaatttatatattttaataataaaatatataaaatttaatactattttattaagtatattcaaaatatttcaacatgtaatcaatatcaaaattattgaagtattttacatcatctttttgtactgtctttaaaacccagtgagtattttacactttcagcacatcacagttcagactaaccacgttttaagtgctcagtaaacagtgactactcaattagatagtgtagttagagttagtatctaagttataaagaatttttacaaaccagtatacattccagtaggaaaatggacaaaggaattgaatacaaagttcataaagttgttcaagtggccaataaaaatgcaaaaatgttccatactgaaaaacagagactttaaagggttttacttctcactgcctatttcattttggccgaatttttcataatgataataccccatattgagggtgtgggaaaacaggaactctcttaactactgattgaaaacataaacggtttatgccctctgacctaacagtttttactcaaaaggatttactttaaagaaataatcaaaatacatattaaaatgtttgcagaagtttattatagtaataaattggtagttcatagttatggagagtgggaaactgaaatatattatgatacctttattatgggctggtgatgtatacaaccatttttttaaaaaattataattcagggctgggtgtgttggctcatgtctgtaatcccaacactttgggaggccgaggtagggggatcacctgaggtcaggagttcgagaccagcctggccaacatggtgaaaccccatctctaccaaaaatacaaaaactagctgggcatggtggcgggcgcctgtaatcccagctacttgggagactgaggcaggagaatcacttgaacccaggaggtggaggttgcagtgagctgagattgcgccactgcactccagcctgggcgacgagcgaaactccatctcaaaagaaaaaaaaaagttataatttagaagaatagtgacatggaaaatactcttgtgttattaggtaaaaactgtagaaaaatacagtgaaaatatatactgtgatattaacagtgagtttgtctaaaaatttttttatttgtgttttacaaatgatctacagtacacatatacttctaaagaataaaaatgttacttagtttctgtagtaagtatatccttttttataaaaagttctttgggttaggatagagcacatatttctttttttcatgtatttataccttgcctcatttggcaaaaatttgagaggggaagacacttaagtatactagatgaacactgaaattaataaaagtgtaatttttaaatagaaaatagaaatcaaacatactatgttattattgtctccaatctgctagtatttattgtcataagaaaagtaggctgagaatttaacttttatccccagcagaggtccctcctcctcctcaacctctttaaataactaagagtattgacagttacaaaagaccagtctggccaacatcgtgaaacctcatctctactaaaaatacaaaaattagctaggcatggtggtgggcgcctgtaatgacagctactcaggaggctgaggcaggagaattgcttgaacccgtcagatgtggtctcaaaaaaaaaaaaaaaaaaagaccatttagactgtcaatgctcttagttgtttaaagaggttggggaggaggagggacctctgctggggataaaagttaaattcttagtctgattaagagagcattgacagttataaaagaccatttagggctgggtgtggtggctcacacctgtaatcccagcactttgggaggccaaggtgggcggatcacctgaggtcaggagttctagaccagcctggccaacatggcaaaaacctgtctctactaaaaacacaaaaaaattagctgggcatggtggcaggcgcctgtaatcccagctacttgggaggctgaggtgggagaattgcttgaacccaggaggcagaggctgcagtgagccgagatcgtgccattgcactccagcctgggcaacaagagcaaaactccgtccccccaccaaaaaaaagaccatttaggcaggcagacaggaagattctatgcagatcaagttcatgatagaatttattgtacttaagtataaaatgaagctaactgtagtatgtgcctcctagagtttttgtgaatgagaatcattcagcattggatgccaggcattatagttgctgatagtgtagtgctgaacgaggtggatggtttccacctttcttccaccagaaataaatatatttaaagtgccatagaagagataggcaggatgatgggctagaaagtagccaggatgggctatttcattcgataagatggcctaggactccagcttttctgaggtaatgactgagcctaggcatgaaagatgaaaatgagcaagccacgtgaaggtctgggagaaagagcaatttgggaagagtaaagaggaactgtaaagatcagactagtatgtatatatgtatgtatttttgagaaagggtcttgctctgtcacccaggctagagtgcactgacaggatcacagctcaccgcagccttgacttcctgggctccagtgatcctcccacttcagccttctgagtagctgggaccacaggctagcgccaccatgcccagctaatttttatatttttgttagagactgggtttcaccatgttatccaggctggtctcaaactcctgagctcaagcattccacccatctcggcctcccaaagtgctgggattttaggtgtgagccactgcgcctggcccagacaaatagttttaaggagcagaaagaaacctgttgtgtctagggtatggtggggtggtatgaaaataaatttgagtttttttattttttgtggttttttttgagatggagttttgctcttgtttcccaggctgaaatgcaatggtggatctcggcagactgcaccctccacctcctgggttcaagcaattctcctgcctcagcctcccaagtagctgggattacaggtgttagccaccacgcctggctgatttttgtgtttttagtagagatggggtttttccatgttggtcaggctggtctcaaactcctgacctcaggtgatccacctgccttggcctcccaaagtcccattacaggcgtgagccactgcacctggccgaaatttgagtattttaagccataggcttagaaaaagaggagtgttttaaaatatcactctggcccagtcgtagtggctcatgcctgtaatcccagcaaaatttgggaggccaaggtaggtagataacttgagtccaggagtttgagaccagcctgggcaacatggcaaaatcccatctctacaaaaaaaaattaaaaaatgtagccaggtagggtggcacacgcctgcggtcccagctactcaggagtctgagatgggaaaaccacctgaggctggggaggttgaggctgcagtgaaccatgattgcaccactgccccagcctgggtgacagagcaacaccctgtctcagaaaaacacaggtgggtgcggtggctcatgcctgtagtcccagcactttgggaggccaaggagggtggattacctcaggttaggagttcaagaccagtctggcccacatggtgaaaccacatctctgctaaaaatacaaaaattagtcaggcgtggtggcacatgcctgtaatcccagctacttgggaggctgaggcaggagaatcacttgaacccgggaggtagaggttgcagtgagctgagatcacgccactgcactccagcctggatgacggagtgggactccatctcaaataaataaataaataaataaataaataaaaatgaaaaagaaaaatagaattaagcaaggcagtagagaggtatgtcaagatgcagtctaggaagttgtcatcatctcctattgtttcctaactcaaaaaaaaaaaagattctctgttttttactctgctctggcgaaaagttacatcagcagtggtcttctagactgagctactccatccaggtcacacttttgcttgctacatgattaaggataaaaaggattttcctgtagttttggctagctgaaaggattaaagtaaaccagagatagtcaatctgttaatggtagactatattacaaattgtgataatgatgttaataagaccttgatgaagttccagataatttagctatggacacattcttaggttttttttttattattatgggcattttttttaatacagggaaagtataaggtataaagtaaaaactatgcataattcagatatttcaccacatttttagtagttgaaatcatactgtataagtcttccgctttttttatgcaacattataacatgagtgtttttccttgttattaaaagtttttaatgaatacataataaaagtatagttacctgccgtaatttaatcattcttctattagggaacatttgagttgtttgttttttcctgtgataaataataccatgaggaatcatctttgcattctatattatgtattttaaattcacacttaataacctctttaaaaggttatataacctcttagtaacctctttaacagttatttagctttcatatattactgccttagaaattttggaaaagaattattgaaatagtctcttaagtaaggagactgaaatctagaagacaggctgcaagcttgactctggctctgaaattagccggaaataaactcacgttgcaagaaatctttttgtttatttttagttgttgttgcggaagcaacgtatacagtagactgagttgtcagtttgtgtgagagaaaaagagtgtctttttgttgttattcgtagcctaaaaatgatggccagattttctctggaagccagagtagtggtaggtgacaaaccagattggagagagagaggacaagtagtgatcactggcagtggccattaggtcactagctacagaggccatgagagtaaaataaagacggagaagtgtggctgttctgagtagactgctgataggataccagtaactctgcagtcttgaagacacagcccttatatacacagccataaggaagttcttgtccaggccagtagaatagtaagtgccagagtaaagacttcgatatgtagcttgtttagaagtcaccttgaaaaaagaatattaatggtgggtaatatttttcactatctctttgcttactggaattaatgaattcagtaattctttttttttgtttgtttttgagatggagttttacaccgtcaccctggctggaatgcaatggcgcgatcttggttcactgcaacctccgcctcccgggttcaagcgattctcctgcctcagcctcccgcatagctaggattataggcgcccaccgccacgtctggctgatttttttgtatttttagtagagatggggtttcactatgttggccaggctgatctcgaactcctgacctcgtgacctgcccagcttggcctcctaaagtgttgggattacaggcatgagccatgcaccctgcggaattcagtaattctttaaccagtggttgtgtttctattgctatgtgttaggtattatatttgttttattgagttaaatgtgcttcagtatagtttttataatatacaatattaggtggtaaatgtatgtgccattttctgtctcgtatgaatgccaaatgtgtacttttaaagttgctgttacctgaatttctactggtgttaaaaattaaggacttttcaaaacagccagcaagaaaaagctatcaaagattatgaagatagtgtcaaaagcacttaggagtcaattttaagaggcctctactggcccaaaatagaacagtttgagcattagtcaggataatgactaaactagattgaaaaatgccaagtaatgtttaaatttatgaagttgtaatgatatacacacaaattaaaaatgtgtcactattacaggaccttgggtaattaacgtattattttgagaactggtaaataaagggaaagaagcatttagtctgactttcctatatgaactacttttctgaataaccaataaatgatggatattttctctttgtagaaatattctgagtagtaaatgaaggagtaataaaattggtatcatcactttgtaaccacctaatgaataaatgattctaagcattgaagaacagtagacactatgatcacaaataaatcaaccagttactgtgtggttcctgatgaaagaactcatcaccacttaacaaagtagtgttgacctaataaaaatagcctgaagttagataaagcctttacagccattgatttatagaacatacagaagaatgggctaaacaataccataggaattcagtcagcaaaattcagcctgggaaactaccaggacaaaaattcaggacaaacaacctggctttttcaacataaaaattgcagttaaaaaaaaaaaagacattctgtagcttaaaagagacttaaaagacatctcaattagtcccaatatgtggactttatctggatctattcacatagaaactggaaaaaaattgtaacatttgtaacaactggaaatttgaaattgagaatatttgatattaaggtttttttttaatttctggtaatggtgttatggttgtgttaaagtttttgtctcttataaatacatactgaaatatttatggatgaaattatatctgagatttgcttcaaattaatattggtgcaggtagagatgagatgaaattgtccatgagttgatcattgttgaaagtaggcaatgggtacgtggcagtttattgtgctggtttttctacctttgcatacgtttgagattttctgtagcattttaaaaacaaaagagaacactgaaaaaaatctagcatcaagtcatggaaatgggtcgtcttccaaggaaggacttttaaactgtggagtaatccctctttaaacatcttagcacaaattctatgaaaatatttcatcagtgtatgaaaaaaaagttagtggcatattgtctttgtcaggtaataattacagaagatattttgaatagggctgaacagtcagaacaccagtggccaggatgaagaagatgcttttctggagtgtgtttcctatgaaaatctgctttagcccatatttactaattatttttgctagtaggcagcatattttaatgtgtaggaatcttctgctgttatatttgctttactgaccctttaaaaaatagacacaaatgaccaaaaacattataggccttcaacagtttctcaaataagtaaaagaatcagttcacatcagaaagtttttcaagaaaataagttctaggccggaaacttgagtgaatacttatgttcccttatgtcctttgtgctcttcatattattttcaacattcataataatttatgttcctgatgaattctctgagccattaagaaatggcttttctttcagaatgcatatatctgcacacacaatccatgaattaacatttttggaagatcattattaagcacttacaaaagtttcaactcttaaatgcttaaccctccatccttggaaaaacttgactatctgtaatgatgtaatttgatttcacctaaaactttacaaaatatatgaatgatatctatatagggtttttgggttctttcaaaaagaggaattatcagtactcatggtaaaaaaagagaaggagggtcacaggaaaataggaacaaatttggttttctagtacttgggtaaattgtggaatatactttccttctgtatttgagcccttcaaagctcacagtcaacccagatgaagcagctgaagtgctttgtaattagtcttctattcttcactcaattaaaattccccatttactgaggcatctcaccaaatgttgatctaattatctgattaaaaaatcggtgacagtatgaatgaatgattaatataattcacttgattgtgaaatgaaagaggaataaatctttagctagtggaagaaggacacaggataattttgtgtaggaagtcttcctgaccttccctcccagagtcctttattctgaaaagtaattatgccaacatttttttagcttgcaaccaacatgcaaaataaagagtatctattatgtactatatacctttcaaaatagctgaatagcataaatattttatttgattttttatatttttaaaaatttccaaataagtttacaagttagagaaaattagaatgttgtcactaatttttctttacaaaatggtatttcatgtgtacctagaagcagtgaaacacctctggagagggtggcttggcaattaattatgcagctaggacttggtttgaaattaaagtatatatattttttcttttagagtggcagaatttagtgacatttggaagcttttcaaacatggttccctgtagtcatccatatattggtaccctgagtcaagtaaagttgtactccacaaatgttcagaaagaaggacagggatcacaaacactcagagtggaaaaagtaccatcatttgaaacaggtatgtgtaatttttttaatgtacttttttctgtatactggaatagtttgtgtaaaattatttgttccctggatgtttgatagaacttacttataatactgtctggactgatgttttctttgtgggaactattaaagcacttatttaatttctttattttttctatttctttttgactcagttttctacgaaaaactatctacttatctacttaaactaaaattttaatttattggtataaagtgtataataatgttccctgtttactcccaatagcatatgtagttatgtccttttttcattcctaatatttgtcttattttcttggctagtcttcccagaggtttgtgttttattatttttccaagtaatttttttttactttgaaccattatatgtttgtatcctatttcgtcaatttttactttttaattatagcctcctttctgcctttttttgggtttgttcagtcattattttttgttttgttttataacttcaacttttgtttagattcaggagggtacatgtgagggtttgttacatggtattttgtgtgatgatgaggtatgaggtacacgtgatctcatcacccagatagtcagcatagtaccaaatagtttttcaaccattgctgccctctctctctctccctcatctagtagtccccattgcctatttttgctatctttatgttcatgtgtacctagtgtttagctcctagttataagtgagaatatgtggtacttggttttttgttttctgtgttaatttgcttaggataatggcctctagctacatccatgttgttgcaaaggacataattcattcctttttgtggctgcatggtattccatggtgtatatgtaccatatttactttatccagtaccccattgatggacacctaggttgattctaagtctttgctattgtgaatagtgctgcaatgaacatatgagtgcatgtgtctttttggtagaataatttatttctttttgatatacactccctgatgggattggctggagttctttgagaaatctccaaactgctttccacagtggctgaactaacttacattcccaccagcagtgtattaagtattgacttttctctgcagtctcactagcatctcttgttttctggttctgtcattctgttattaattgtcagttagacacttagtttattaacccttccttcctttctgaagtagacatttaagccatgataacacatcccacagttttgatatataatatttttattatttgtaaatctaaatgtattcttatttctattgtgattcttctatgactttttagttgttaaagcatcattgtaaatttacagatagatggaatttttgtttatctttttgtatttaatgtatttcacaaaatgtggtctgtattgattcagtcttgaaatttgttgagtgtaacattttagtttagcaattggtcagtttttctaaatggttttcctgtgcttgaaaataatgtgtatttttaattgctggtgtggtgtttatacacatcaattcttatttttagttgttcagtacagatctttgtcctgttttaaaaattcattattaccaagggagatgttggagtatcacactctgatggtagatttgatggtctttttttatggttctgtaaatttttgctttttataatttgaggctgtcattagatacatacatatttagaattattacctaacactgatgaattattccctctatcattgtgcagctactgtttttctttagtgagctctccactacatttcttttggttactattttcccatcctttgattttaacttaattttgtcttaatatgatcatctctgtcttttaactggaagtttaggcagtgtgcatttactgtaatcactgatatagttaaacatatttctaccattttatcatgtttccttgtcctgttttcttaaattccttttttgcctttaattttttttctcattccgtcatcctttctcctctattctctttctctcatttgaaagttttagactctgtgtctgtacttcaaagcctaaagttaattgataaatttactttccttctgaaaaacacaaaagctttagagtgctttaattctgatcaccgcctccaacttatgtgctatttgttggctaatattttctgtctattctgctctttctctgctataaagtatgcattgttgcttgcttagatttattcagaatctttgttagccaccttttcttatgtctgatctttctgtctgatgtacatcctatacaagttcgtttagctgaggatcttttgtgggaaaggcacatttaagatgttactcgattgttttttggcttccactaattgttgagaagtcagatattatgcctttgtttgtatattttttctatttgacagcattttaaatttgattagctttaatttgaaagtctttttctttggtataaatggcagttttattatgaagtaactaggtatgtatttctttgtatttattctacttgagatttgttgggcttcctggatctgaggattgatatttttctacagttctggaattctacaattctcttattatcccttcatatattacatcttcccatttctgtattatctccttctggaacttcaattagaaatatgttacatcatcttatgtttttcatgtctttaaacctctctatcgtattttctatttctttacctttctggcctgcattctgtattatttcctcaggtctaccaggatcactaatttcctctttagttgcctctaatatgctggttgattatgtatgttgggtttttaacttaaatgattatattttccttttttttttctttttctttttttttttttgagaccaagtctcattctgttgcccaggctagaatgcagtggtgtgatcatggttcactgcagccttgacctccggggctcgacctaccttagccccctaagtagctgagaaaacaggtgtgtgctgccacgcccagctaatttatttttatattttgtagagacaaggtctccctgtgttgcccaggctggtcttgaactcctgggctcaagcaatcctcctgcctcagccttccaaagtgctgggattacaggggtgagccactataccggccatatttttcatttctagaaattgttttttaccttgcttggttggtctttaattccttggttgtattttcagacttaccttttattacattagatacgttaaacatagctattttatatttttaacagaaaattctgctatatgaaatctttttgtttctcactatatgagacttttcttcccttttttgctcttattcatgatgtcgtacctgtgttttataactgtgagttcttcattttccatgatgtttttgtatcttgaaagtatttgatgtttatctggactgaaaatgactttctgcctggaagggtttgtttttgcttttgtgtgctactctccagtagcattattgggaccacattaaattcagttctctgctttagatttacattgtgaattcagactgtaacttgtgttagggttcacttgtctgtaggattttcagaggagtatttttttcttccccactatttaacaccaaaatacagataggccagcttacttgctgttcccttctatgtgtattatttatttctagttcatagtgatcccatggctgtggctttttacctcagtgtcccctgttagactccttatcttggcagaacctagtcttattctctggtcttccatgcccgttgtagctctggaggtagaaataagctcaaagaatccaagcttcaatagaaatccggggaaagctggctttgatatgttcatttgttctgtagagattctgctttcacttcatttttggccttttcgtatcattttttgctagactaacaatgcatttaaaaagattttgcttggggtacaataaaaggaagcattaaaggaagtcctttattcatttattcattaatttactcaagaaatatttattgagcactttttatatggcagcaaatgagaatgactcagagttgattactaaagcagaaaattaagcaaacaaatattgtattgtaacatttagccctgtattcatgtgttcagcatctgtggattcaaccaaacaaggattaaaagatttggggggaaaatggatggctgcatctgtactgaacatatacagacatttttttcttgtcattatttcctaaacaatacagtgtaacaacggtttacttagcatttgcattgaattcggtattataagtaatctagagatgatttaaagtacatgggaggatgtgcataggttatatgcaaatactgcaccattttataagatggacttgagcatccatggattttggtatctacagggaggtcctggaaccaatccccaacaaatactgagggataaccatactgtgataggggaaattcattaatggtgctgcaggggcacataggagaggcacttaactgagtcttgagtggttaggaaagatttccataaggaaatgatacctccttggagacatgaaagaaaagtaggtattggccaggtgtggtggctcacacctgaaattctagcactttgggagaccaagtgtgtggatcacttgagcccaggagttcgagaccagcctgagcaacgtggtgaaactctgtctctacaaaagatacaaaaattagctgggcatagtggtgtgcacctatagtcccagctactcaagatgttgaggtaggagggtcaccttagcctgagaagtcaaggttgcagtgagccatgatagtgccactgcactctagcctgggcaacagagtgagaccctgtctcaaaaaaaaaaaaaaaaaagtaggtatggatgtgtggtgaatggtggaaaaaggaggtaaaattcctggaatagtgagtagaggatttggcggtggggttggtagtgttgaaagtacaagagacggtgatccagcttccatattccttttaatttttttctactgctctcttgcttgctcactatgtttcagccaaagcagtctccctttttctcagccatgttctgagaaaatggcaagagttaagcactagtcagatcggggtcttgtttgggagtttggactttgttttgtaggtagtgggaataacagagtattattaatacaagtaggggaggtacttgatcagatttaaggttttagaaagataactagttgcaaaatgtcaaacaggttgcaaaggagggagattgaaagtagtagtacaaatgaaggtctggagtagggtaataataatgcttttttttaaaggagtagatgaccttaagagatctaggagctgaataattaggacttagtaattgaatctgggggatgaagaagagggtcaagccaagggcaatgcttggttactgtttggccagctgtctagatgatttcattgatttctaaaattaggagtaccagagctggagtatattttaatgagatgatggcttggtttgcacatctgaattataggtgcctatggaaggtcttaacagatgatgcagtgaccaataggcagttggttatccagtgaatctactagtcactgcatcgtctgttaaaatgtcacacatcaggtcgggtgcagtggctcatgcctgtaatctcagcactttgggaggccgaggcaggctgatcacgaggtcatgagatcaagaccatcctggctaacccggtgaaaccccatctctactaaaaatacaaaaaattagccggagccgggcatggtggcacgcacctgtagtcccagctactcgggaggctgaggcaggagaatcgctcgaacccaggagggagaggttgcagtgagctgagatcgcgccactgcactccagcctgggcgacagagcaagactccatctcaaaaaacaaaagatgtcacacatcttaacacaactactatcctacttcaagatatcattatctcttgtctgatttactgtggtagtattctccctgggatctctgcttccattcttgtccttctgtagttcatttttcacgtaacaagtgtggtctttttaaaaacagatcatgtcacttttttaattaaaactctccattggcttctagttacccatagaacaaagccaagactgctagaataaaattaaaatttactattctgactctcaaagttctttctagctgatctggcttccgtattcctctttattttcttctgctactctcttgcttgttcattatgtttcagccaaagcactctccttttggttcggagaaaatggcaagcttgttgttatagggcctttgctctagttgcgttctctttccaaggtgcccttctccacatggctcagcctcttctggtcattcatatctcagtttaaatgtcagctctgcatagagacattttaaaatcactcaacctaaagtagccacccagtaagtctttaatactaccctaatttaatttttggcataggtagcacttactcctgattgatgttttccatattttatttcctcatcacctacatgtttgcaagctccatgacagcatgaacctcagtgtcttgctgatagtagggacataataaatatttataagtgagtgaatgcttagagttctaacctggaactaaagatttaggagtttttacctatacatagatggaactgaagccatgggtctgtttgggacagtgcagggacagtgtttagagtgaggagagatcttctagtacaaaatcccccacatgggtgagggacaggtagaagaggagcctgcaaagcagacttgagaaggagtggctggagaaaatccagactatctggtgtcaggagaagacagtgtttgaagaataataaacatttcaagaccatttttcctttagttagatgtctttcacaggggaagattttacagattccttgagaaacctgtatacatttaatggctccttgttttcattctttttcctaagcctcatcctccctttgggtttacctgtgcaatttcttctctttcttttgtggtgatggagaactgctggggtaaatattgattgagagtttgattttatgcaatgaaagaatgcagagtgtaatgagtccctaagttccagaaataagcatgtttattagaacacagttaagggaaaagaaatagtgatgaaataatataattaagggtaaaatatgttacaatgctctgcagaggtgaacacagactcaggggaaaatatttaatatggttccaccattcagaatctttcaaattgaaatccatgattaagtttcttttttctctgctgactggaataaaaatgttagtttattttcttatattagaaatacattgtttattgacagttttattttgggctcaatttttcagtacttgcttaggccacattagaccttgttagccatcagacagagtgcaagtaattgcttgattgaaagataatttgtatatttaaagatttgagattgagttttgaataattcaaatcacatgataaagtcaggaacagctcattaagaagcagagacttgctaaggaatccttaagtttttaaggagcattcagatttgttaaattttagtaaaattagttttaattttgctaatgacagcagatgtgtggcaaacagccagggtttgagcttaaaacaaatgtctagcgatattcatggatagaatgtttggttactgattgaaatcataaagattctactgcagtgatgcagtgtgagtttattaagttggtgctatgtaaaataagtattcatacatgtgtttaagccatttactagcattcttgtttgtgctgtataacactatatatttagtaacatctagacagtttgtagtgagaagaatatccagaaatatacagcttaaagcaactcattttatgtgattaagttcaataatgttgagcattgtagaaactagggttgtttctgaaacttttgacagtagatatcagttgtttggacattaggtaagttttgaaaatgtattattccacctttttcccttcactcctctctgccctgctctctgtttcccaaagctaaattgtaagaaatggatgtgtaggttctatagataaagatactttagaatttgcttgctgtgtagcgagacaaaaataaaatcataataatttaattttttaaggtcaaatgtagttactaaatagaagtgtttttaagcttatcttcaatttactagtatgacatcataacctacttaggatttggcaaacacttaaagcctttttagattttctgtacatgctttaggtatcaaaacgtactgtattttggtcaagtgaagtggctcacacctgtaatctagcactttgggaggccaaggtgaaggatcccttgaggtcaggagtttgagaccagcctgggtaacatggggagggagaccctgtctctacaaaaaataaaagaattatccaggtgtggtggcatgtgcttgtagtcccagctacttgggaggccgagacgggaggatcacttgagcccaacaggttgaggctgcagtgagccctgattgtgccactacactccagcctgggcgacacagcaagatcctgtctcaaaataaaataaaataaaataaaataaacacacacacagtatttggtcattttcctagtggttttcactgaaaaacaattgccaagaaatatactaaaaattacctgtaaaatattttgcttttatttcaaatagggctttgcttttgttagtgcttaatatattggcatttaattgcttcatataagctttgaaagaggtaactcaatggataggcagaacttctgatcacagtggtattgtgaatacatactttgaggcatgtgttctactaaccactcattggaataatagataaagtataaaaagagaaaattgaagacatagttggactaaaaaaagacatgttatatcaaagaaatggaacagaagcatctggactctgggtctgtaatctgggagtggcagctaggagtttggcttgtttggagtaatatgctacatgtgctatttgaatagcaaggtactggagtcagactcactatttgaacttatccacccacccccacagaaggagactgaaaatagctaattccagttgctacctgaggctgtgtcttacaggaagctgtaggcctagggaggcaaggagaagaccagtgtactagtccattttcatgctgctatgaggaaatacctgagcctgggtaatttatgaagaaaagaggtttaattgactcacagttccatatgactggagaggcctcatgtggcagaaggcacctcttcacagggtggcaggagagagaataagtgcaaacaggggaaatgcaagacacttataaaaccatcagatctggtgagattcactcactatcatgagaacagcatgggggaaactgctgcgtgatctgattacctcctcctggtcctgcccttgacacatggggattatggggattataattcaaggtgagatttggatggggacacagagccaaaccatatcaaccaggaactgaaacttgctgtttcctggcttagagactggattgaggggaaggaatttcaaactggcaatatgagatcaaactggcaatatgagttttgcatagaggtattagaatgaactctgagcacaagaatgtgaagaggagaatgaaaggatataccctattcagggtaagatggtgaactctaaaatttcaaaatacatgaagaatcctaatgctacgaaagccaatagaatcaataaatgtgaattaattccagttgaagctaaaataacagcttcaattgctttaaaataagtttaatgttctcaaaaggttaaatgaaggactcatattcattaaaaatgacagggaattttgaaacacaaacttgcagaaataaaaccagagcaaataattaggaaaaggagacaattagaaatcttagaaatgaaagtgtagccactaaagtaaaaatgtagtagactaaatagtcattgtcagtaggagagttagtaaattcaaattcagtctgaaggcacataggaaggcaaaaagatattccaaaaattgaaagcatttaagaacttgcagctctagcctacatttaataggtagagaaatggtgaggaatcaatatataaagagagatgagaatttttcagaatttgagaaaaacaggacttctcagatcagaaatatgttttgagtaccaagcaggataaataaaaagaaatctacccctgacactttgtagagacaccacagatttaaaaaccaaaacacgaaacaacccaacttaaaagctgacaaagagaaaaatcagaatactatcagcctaattgttgttctactgaagtagactttttacctgcaaaaatatgcagaaagcaaagatgggggagtgatttggaataatatccaggaaagagtaagaggaaaaataaatgctactctggaatttcatagtgatctaaataatcattgtagagtgaaggcaaaaataggaatgttatcatacatataaagatgaatgtcattttaaaaaaagcttattttctaaaattttgggaggtacatagtaggtgtatatatggagtacatgagatgttgtgatacgggcatgcaatgtgaaataagcgcgtgatggagaatggggtatccatcccctcaagtatttatcctttggtttataaaccaattacattctgtaagttattttaaaatatacaattaagttattactgactatagtcaccctattgtgctatcaaatagtagatctttttctatttttttaatccattaaccatcttcatctctcaaagatgagagtcattttactaaacaacccctccacattaaaaaacaaacaaacaaaaaaaactattaaagcatgtacttctgcaagatgcagaagaaacctggagttacagaagggaaaggatgaaatatccaagagacaacaaagaacaagaaatggataaaatgtcctggtaaaactattgataataaaacagtaaacttttttttaatattaaatgctaaaactataatcaaccaggctcagtggctgaggcctgatactataaccaggctcagtgactcaggcctgtactctgagcactttgagaagctgaggtgggaggatcacttgagcccaggagtttgagaccagtctgggcaacatagtgagacttcatctctacaaaaaatttaaaaattaactttgatgtgatagtgttcacctctggtcccagctactagagaagctgaggtgggatcacttgagcccaggagttggaggtggcagtgagctatgatctcaccactgcactacagcctgggtgacatagcaagatcctgactcctaaaaaaataataataatagtatgatggaagacatttagatcactatgaaattctagagtaacatttatttttcgtcttactctttctcagatactactgcaaatcaccccctacccacctttgctttctgggcaacaagaaaaaaactgtggaggaatattaccagatttcaaattatactacagggctttaataatctaaacagcataggtttaggttactaaacctaaatcctttatgctgttttactgttataaagacagacacataaaccaatggaacagaatacagagcccataagtgaatccatagatatacagtgagctcattttcaacagatgtgccaaaaacatacattggggaaaggactgtctattcagtaaatggtgctggggaaaactggatatccatatgcagaagcatgaaactagaccccttctctcgccatttacaaaaatcaaatcaaaatggagtaaagactgaaatctaagacctcaaatgatgaaactatttaaagaaaacattggggaaactctccaggatattggactgggcagatttcttgagttagatcccacaagcacaggcaaccagagcaaaaatggacaaatgggatcacattaagttaaaaggcttctgcacaacaaaggaaacagtcaacaaaatgaagagacaacccataaaatgggagaaagtatttgcaaactattgatctcaccagaatatataagaagcttaaataactctatgggggaaaaatctaataatctgattaaaatgtggacaaaatatctcaagagacgttttcaaaagaagacatgcaagtggcaaaaaaaggtgtatgaaaaagtgcttaacatcattgatcatcagagaagtgcaaatcaaaactataataagatatcatctcactccagttcaaaaggcttttatccaaaagacaggcaataacaaatgctagtgaacatgtggagaaaagggaacccttgtacattgttggtgggaatgtaaattagtgcagctactatgaagaacaatttggaggaccctcaaaaaaccaaaaatagaactaccagcaatcccactgctaggtatattcccaaaagaaaggaaaacatacaaaaaaattagctgggtgtggtggcatgtgcctgtagtcccagctactcgggaggctgaggcaggagaattgcttgaacccaggaggcggaggttgcagtgagctgagatcgtgctgctgcactccagcctggcgacagagcgagactccgtcgcaaaaaaaaaaaaaaggaaatcggtatatcagaagagctatctgcattcccatgtttattgcagcactgttcacaatagccaaggtttggaagcaagctaagtgtccatcagcaaatgaatggataaagaagatatggtctatatatacaatggagtattatttaagcataaaaaagaatgagatcctgtcatttgcagcaatacggatggaactggaggttgttacgttaagtgaaataaggcaggcacagaaagaaaaacagcacgttctcacttatttatggagctaaaattaaaacaagtaaattcatggagagagagagagtagaatgatggttactaggggctgggaagaatagtgggaggtggagagtgaggatggttaatgggtacaaaactgcagttagatagaatgaataagagctagtatttgatagcacaacagggtgactacagtcagcgataatttattgtacatttaaaaataactaaaagagtataattgggttctttgtaacacaaacgataaatatttgagatgatcgatgctccatttaccctgatatgattattacactttgtatgcctgtttcaaaatacctcatgtaccccataaatgtttaatgtgtacccataaaaaattaaaatataaaagcaaatttaaacaaaaacccaaaaaataataaaaagttttttttaaagaaaaataatgttaaacaatagaaatacagtcttataaattccaaatagcaattgggggattggatgggaggcgaatatagaaaactttttcaatctaagagatggagacggcaggaaaagcgaaataaaaataaaagcaaagaaaacaagatggtaaactgaaaacaataagatggcagaagtacaaatgtaccacagttaagtagtcagacttagtggtgttccatatcatttaaatgaactcataatctaaatatgtggaattagttaatttctgtttcattccatgttttcagagacttatattctggatcccctactaccccatctgctcaaggactttgcttttgggattatcctgttagcctactttatattttcttcgtggttattgcatcattcctatctctatgtaaaatgcagtcaacctttccttgattcattctcttcagctcctgctgaaagtccaaataccgcttccatttaatctcctattttctcctcaactattgtgtccattcccattcttgtccagaaactgctgttttcaggaggttccagtgatcttcatgttggtaatctagtatctattcttttttttaccacctagaaaaatacacaaatacctacacataaaattaaatattgttctaaacacaggcaatacaggaaggtggttaagagtgtagagtaatcaaaataactgtgcctccatgtttaaaatactagctgcgtgactttgggagaatttacaaaacctttctatgccccagtttcctcataacaaggaaaactggctctgtgactttgggggaagttataataatctctgtgcctcagttttctcataagatgaagataatagtattttcctcagagcaattttgtgacaattaaatgaaataatttgtaaagtgcataggacagtacatggcacatgttaaatgcttagtatatatagccattcttcataaactctgaaatgttattgaatgaggatataaatataatggaaaatgttttaagggtgagatttttacaatatatttgatacatacaaaaggatattataatacatatgtaagttaacaacataataaaatcaaaccttggaatttactactcaagctaagaacttcactgtcttgatcacatcctcctatctccatttgtcctatgtatccatgtgaaaaaaaagaggaaatagctttatacatttgtatatagccctgattatttacttttgcttgtttgtgaacttcgttgtgatagcttattgtatatattcttttgtgatttacttttttcattaaatttagttgctaagatttatcttattgattggtgtgtgtgtctggttcattaatgttcttggagataattatagcacatactgttcagggatgttgtatgagttaaatgagttgatacatgcttagagtagtacttagcacacagtaaaagctcaaagaaagatggccattattatgtttgttactatgcactgctgtatgaaatgttgtgtgaatataacatggtctatctatctatctatctatctatctatctatctgttctcttgctaatgggcatttgggttgttgccagtttacaacaacagaacagagtcctgctctgaacactcatgtacctctgtccttgtgccctcgtgcaagagtttcttgaagccaaatatattgacctagaagaattgctgggtcataaattatgcttgtgttcaactatagtagataatgccaacttgtttaccaaggtattgtgcccatttatatttccaccagcagtgtatgcattttcattgttccatacccttgccaacattaggtattctcatattttcctttttcttgatctgatggttataaaatagcatcttatgatttcatttggattctattaataatggggcagacattttttcaaatgtttattggttatttgtatatccttttctgtgcaagattgtccttcctattttttctaatggattgtcatttttttgatctagaggacttatttaaatattcttgattacttttgttgattctatttgttggaaatatcttctctcagtttgcggcctttcttttttctctgtttttttttttttatgggattacttgatgaacagtttttctgagttttaatttggcagaaatttatccagtttttcttgtgttgtttatatcttgtttaagaaatctttctgtaccataaaagtattctgtattatctactataaggcatgtaaataccttaacatttaaataattaattaatctacctgtaattgttttttctttatggtgggaggtagattcaaattttttaaatttaatgtgttttttggtaggtgtagggttgtacagttgtcccagtcccacttaataatcattctttattgattgaatggtatctctggtacagttttaaatagaagaactgtgcattcttttgttccttaatttaaaaatgcatttaaacattcaccattaaagacaatgtttgttgtaggtttgttttaccctttaaagaaattcctatttgtcctaattttctaaaagggtttgagatttgcatggatgttgaattgtattaaatgctttttctttagcttctgaaatgattgtatagtttctcttctttaatctgttaatgagataaatagcttttgtaatgtttaactactcttacattcttaagatgaatccaacatggtctgatacattgtcgtttttatgcattgctatattacattggctaatattaattaagtttatagatttatgaaagcagttgtttaatgtaaacttcttttaataaactttacagcagaaggtataggcacagaactcaaagctccacttaagcaagaacctctccaagtaagaggtaaatatattttatcctatttttgtattataaagatgttttgaattaaatatataacattggtttatgtagagctctttatagttatattattctaagagtatagtttattttttacttttatttaaatagattgaccataaggatttattctcttacatataaactaattttctattaaatttattttgcatttttgtcacaaattttttcaaaagcccaagaaaggaataatggcaaataagaatcatcaattgcattatcatttttagaagagtaaggcaattaaagaacaagaggcccacacttttcagctactgcttattcaaatccaggtagagtttggccgttattgtctgactttattttctaggagaaattgaaggaattcctgtttgtagctctcttctgtataacaagctgtggttcccatctccaaagcagctgtttcatggaggcagcaactctatgattaacagcactgtggctttggcatcagataaaactggattaaatttgtggctccagtgcttaccagctggctgaccttgggcaatttacttgacttctctgaggcttagttttctcccctataacgtggtgctgaaaatgagacttcttttctagggtaactttgattaacacatggtagacaattaataacaattaatgttgttatagcagccatcattatcattatcatcctcaccttcatcattaataacctgggccagggttttttagctatttggaagaaatttttttaaaaattttttaaaaatttaaaaggcggtttagagacatgaaactcacgcaaaaaaaaaatctgtatttccttatattttttttcagataaggttttgattttttaattgaactttatttttcaaatattcttattacataatatttgtgcatttaatgtaagtatgtattattttaggaatctttttacccactgtagtgataggtaatcttaggctgaatttgctctttcaacttggaagtagaacagaaaattgtgaaataataaatatgagaatagaacatgaagtgaatagatgacaattcgaaatagaacacataagtttgttattttgctcttgcacttcaggtatttgcttatttatctctatcatatgaccaaaagtctcaccttataatgatttattaacatagaccaatgttctgtaatttttaactcacagactataattgatgccaaattggtattggtattggtgtcgctggcctttttatgagcagtttgatacttgacaatagaaaaacaatttattagaaggcaatatttaacctataatctataataattttttttgtaatttttaactgatgaaattattctgtacttttcttcagttttattacattatgtgaaatggtctagtggctttaaacttttttgactgtaacccacataagaaatactaattagcaactagtatacacatagattagtatatgtaaatgaaacaaaggttttcacaaaaaaataattatatgtagtagtctttgattactttatatttctactttgtatgaaatgctgatttcacctcacagtttgaaaagcactcaactactctgttattttatttatttatttatttattattttttttggacagagtctgactttgtagcccaggctggagtgcagtggcatgatctggctcactgcaacctctgcctcccaagttcaagtggttctcatgcctcagcctcctgagaagctgggattacaggcacccaccaccacacctggccaattttttgtattttttttttagtagagacagggtttcaccatgttggccaggctggtctcaaactcttgacctcaagtgatccacctgccttggcctcccaatactctgtaattttttatcaaaacttcagttcattttcatttagaccctaagcaatttaaattataccaatatgatttagacagaccagtaatacctgttcaaggtgttcattagacaaaggttgacattttgggatcagttatagatgacatatagagacaaaagctagatggctacaaatgcaatttcatcctattctgcacttggataattttttctctgatgtcattcagtgaaaaagatcagttttctgtgaaattcattagtgaagcctcttaagtatcagcctatattcatcttcacatgtgactttcaatgtgcatatttattatgttttcctgttttttgtttagttaaagcagtccttaagaaaagggagtatggctcaaagtacactcagaataatttcatcactggagtcagagcgataaatgagttctgcctcaaatccaggtaatttttttaaaaaatgtagccgtgtgtcatatctaaataatctaaataactattcctttcttagagtgtgttacctgctaccatccatatatggaaaatttgctactggctccttaaaatgaagagatatttttattcagtcaaaaatgttaaaaattgttagcaaactaaactgaatcctgccccagcattagcaattctagtctttcttagtttcttaaacccacaatggtaaattcttcaaaagctttccatcacacaagaatcttaggagttaaattgttaagtcattggtatgtgacagaattctcaataagattatttgcgtatttgtatgtttgactgttttggttttttggccagcagagttgagtacttaatttagtgagttaaatttatgttcatgctcccaactgtgatttctgttgagtataaattatttttactactttccaatatctgttattattaattttctcatatttatatttattgaaattatgttagtcacagatttaaacttttctccctcctttgtgcacgaattagagaaatcagatgatctatctttttttcagtcttcctcattgtcacagccactttggtatatatcaagaaataggtattcctataatttttaacttttataactattacatcaacaaccaattataatattgatttagttctgacacaaattttgtgaattaagtggattaggcattgctgtctccactttaatagaccaggatgagcataatacaagatgttagtgattgacccagctcatttaagtgagtcagtgacagggagaactagaatatatatcttttgaaagctgatccatacatttttactaacatgtgatggttattgatgttttttaaatctaggtttaatttctagaacttgataacattacatagtcacagactttttatttatagattgtttcattgctttaacaaaatttccataggaagatccatgattaaatatagaatgactatttagcagtgacttgatgaatatataagcctttcagaatttaagagaaaggaaaataaataacatgtaattgacacaaactctttatgacatcattcctttgaatggatattaccacttagtattaatctacatataaacaaataatgactgtaaatttttaacttaaattcttaagtagagggatgatattctaatccatgttctttcttcttttcgttttttttgtttgtttttttttgagacagggtctcactctgctgcccaggctggagtgcagtggcacaatcatggcttactgcagcctctacctccctaggctccagtgattcttccacctcagcctcctgagtaactgggactatggctgtgcgccaccacgcctggctaatttttttttttttttttttttttttttttgagacggagtctcgctctgttgcccaggccggactgcggactgcagtggcacaatctcggctcactgcaagctccgcttcccgggttcacgccattctcctgcctcagcctcccgagtagctgggactacaggcgcccgccaccacgcccggctaatttttgtatttttagtagagacagggttttgcaggttgcacagtctagtctcgaactcctgacatcaagtgatccacccacctcagcctcccaaagtgctgggattacaggtgtgagctaccgcaccttgcttatttttcacttttttttttttttgctttatctcctaggccgaagtacagtggcgtgatcttggctcactgtaacctctgcctcccgggttcaagtgattcttctgcctcagcctcctgagtagctgggattacaggcaggcaccaccaaacccagctaatttttgtatttttttttagtagagacggggtttcaccatgttgaccaggctggtctcgaactcctgaccacccacctcggcctctcaaagcgctgggagtgagccaccacgcattacctaacttttcacttttttccccatatattagagatggcagtggtgtgcccatagcagatacaaatacaagtactggtgagggaagtgaatctctacatattatattgtggtgtctacactgagcatcaagagtaattttttttcactgtctctattttttgtatacaaaatgtcatctttaaactgatctttaaaagccattcacatcaatatttctctaagatggggatcagtgttgttgcttttatctgcccttagtaatcctctttaagtatataaactatatgcactttgtctgaataaattcaacatgtttctttctctagtgatctagaacaacttcgaaaaatcagacgacgaagtccccatgaagatactgagtcttttactgtatacttgagatcagatgtggaagcaaagtaagaacatagttctttcagaataaaagtgcaaaccaaattttggattaataaaaatacattttagacagagtcagaattttttaaatgactttttaaaaacaatatttttgtatttgcaaatctgtttatttgtgagttactaatatgtactccttaactaaatatatgtcataatgtgtaagaaaatttgctgttgaatttactctagttgtttagatttcatttggaaaagttcctaagtcctttatgtttctccaaaagcaccttacactttgttgtaagattctcattagagaatttagatttaaatgtgatgtcaataaagtcattaaaattgttcattgtggtgaccatgtgtgtatgcacagatctttggaagtttggggaagccctgaagctcttgccagagagaaaaaattgcgtaaggaagcagaaatagaatacagagaaagtaagtatattcaatttaaagtcaagttaattgaaaaataacttgtagatgagaactgtatctgtaagaactctctagtgctagcatacctgttggcctaggctctgttgcttccagcaaatgctagtttccgttttgggattcaattatttcacaaaaacaggaactgtatttttgttttctcctgtatagctttttgaagatgatgagaggaagagaagctacagtttatcatttttataagacatataactatcaaaacttatctgatttaaagattatacttgttataaaagtgatagaataggaagtaattgctgtattagtctgttttcacactgctataaagatactacccaagactgggtagtttataaacaaaggagatttaactgactcacagttccgcatggctggagaggcctcaggaagcatacaatcatggcgcaaggggaagcaggcgcatcttaacatggtgtcaggcgagagacagcgtgtgtgtaggaggaactgtcaaacacttataaaaccatcagatctcgagaactcagtatcatgagaacagtatgggggagaccatccccatgatccagtcacctcccaccatggcctgtcctcggcacatggggattatggctattataattcgagatgagatttgggtggggacacagagccaaatcatatcaattacttttttacagaagggtctattaactcagctacattaattaattcagcagatatttatccaatacccgctatgaacaagaagctgtgcttggtgtttgaaatgtatatgcaagtaagactcttaggagccaggtgtggtggcacatgtctatagtcccagctacttgcctgtaatcccagctactcaggaggctgaggtgggaggatcacttgagcccaggagtttgagaccaccctgggcaacatagacataaatggggtgataccatacatattgtacatcttgctctttatagatagtggtataatcataaccgttttccatatctacatatagaaatctacctcattctttttaacagttgtatagtaccccattgtatggatgtagcaagatttatgttcttcagtttttcactgttagaaagaatacatcaataaatatttttatttttttaacgtgagataattgtgaatatttacataggattgagtgttaataatacaattttaggatcaaatggcataggcatttaaaaatttgatagatcctaaagaattactctctgaaggaaatatggtaccaatttacatttacaatcacagtgtatgagggagactattttttcatacccttgcccatgctggatattaacaagattttaacttttttgtgtatttgatgggcaacagatggtacctcgtttaattttgaatatctctgactactactgaggttatcttctatgtatagtggtttttcttagttcttctgtaataatttttatatgttttgttcacttttctattagattgtgtgtctcttaaaattgatttaaataagtttttggtggattttaaccaaaatctaaccaagttagtttcatatgttctaaatattttctaacagtctatcttgaaatttggtttctcctctttttagtagggaaatttcaaacatattcagaagtgcagagaaaaacataataaccttttaatgcccatcatctggctttacagctaccaacaacatggccagccttgtttaatgtatatccctctcactaaccttcactctactggattactttgaaaccaggtccagacattatatcattttatttataaatattccagtatatattaaaaggtcaggatgtttgttttagtcagttcatgtgatggtgatggttgaactgttttagaaaagttaactatccattgcctgtagtaagctgtcagtcttagtaatcctctcatttgccctttggttgaaggtctaggatgttctcaaatagctttaattctgacaaagaaagtgattgaccttctgttgatgattccttttcttgacaaaactgaaaatagtatgtctcttttcagctaacctagtcaggaggaataaggagtatatttgtgtgacctggaatatataatattaaatcatctagttgttgaataagtatagttttccttgtaaaatccaagttctttaaatcattggtttggcattttcaaaagtttgaaggagacagtgaatcctagtatcaaaggatttttggcctcagaaaaagttgttgattatttttattttattttatttttcgagacagagtcttgctgtgtcacccaggctggagtgcagtggcgcaatctcagctcactgtaagctctgccttccgggttcatgccattctcctgcctcagcctcccaagtagctaggactacaggcacccgccaccgcgcccaactaattttttgtatttttagtagagacagggtttcaccgtggtctcgatctcctgacctcgtcatccgcccacctcagcctcccaaagtgctgggattacaggcgtgagccaccgcacctggcgattatctgtttttttttaagagatgaggtctcactatgttgcccaggctggaatacagtggctattctcaggtgcaatcatagtgaattatagccttgaactcctgggctcaagtgatcctcctgcctcagcttcctgagtagccaggactacaggtgtgtgccaccgtgtctagctgacaatccacagatattataaagaggactgcacttaaattaacagaagtgaagtatttactttcaatggaagaaatacatactggggacagatagtcctggaaattctggtgtactattcagttaatggtttccattgagtttctttataggtaatacaggtactaacacaggatgcaatcagatagggcatattccattggggaattagatattgccagtgcagttatatagttcttttactcttgggcacttatatatggtaatgtatcaggattaaagtagagatcgatgtactagtatttatgaaaaatgtatacatatttttctttgataatcaggctgactttattgttatctgttaaacgactaacagattttattaagcatcgtgaggtttctcagaagaatatcattgctgctattccctttctggtttgatagaacaatttattttttagtgttcctacttcttatcaatgacactgatttttattagtattagaaagggactgcacttgcttagggtttgagaagttaataaattttgccttgtatggctgttaaaagccctaagtttgttcctttttttttttcttttcatcttctcttttggtttcttgacagtgcattgcaatttagtttttccaacgtgaactaactgccagttcattttaatctttcttaccaccctatttttaatttaaggccctttaaccaaagagagcataaagggtcccttggcattctacatcagggtcagtgtccacaaattgtttatttctagaagtctaattctaaatttacctattaattctgtggggttttttttgtttatagttttggatcttagtgtaatcaattttaatagaggatggcttcctggatagcttacaacaacctatgtccctggctcttaataaataacttttgccggtgttacggcatctgtcttcagtagccagagttggctaactatggcccgtggaacaaattggtctgctgcctgtttttgtatagtttataagccaagagtggttttcatatttttaatgactgacaaaaaagcaaaagagtaacaatattttgtgacagatgaaaattaaatgaaatttaaatttcagagtccacaaataaaattttattgggacgtagccatgatcttttatttacatattgtctgtggctgcctttgcactaccaacagcagagttgagtagctccgacagagactgcgtgtggtgctcctgtcactttgcactgctactcagttacaattcagtaacagttataattcaacagtatttcaaatgtcataggtatccttgtacatgaccttttttttttttagtatgagtgcatacctgtctggtgagtaagaaaagtagacatctagtgttgtgcttttaagtcacagttgagcatggattattttttattgaattagatggcaaagtactgtgtctactatgcagtgacaccatagctgagttaaaggaatacaatatatgttgacattactagattaatcaatcatcacagtattcccaactcacaggagtgtaacaatcagaaaaactagagaatttaagatggaatatattacagcagaatttgttcacaaaaatagaaaatgaaaatgaggctgcaaccaaagtttggtttctgagtggcttattagtcaagcaaagaaagtgggtttctaatggcaagtaaattaagtcctgtttaatttaagcagctgaagaaatgtatccaggactagtagtctttaggcaagactagttgcttcaagagttgaggacactgaggacagacatcagtagtcaattaaaaagcaaggcaaattattttgaatgatgttccttggctcttgataagttgacctgtgtaccaatactatttgaggagtgagtgctgagtttgaagagactggagaattaccctttgtgaatagtgtatgtggagcaaccacaggcaagaatttattttattttattttatttttgagacggagtctcactctgtcaccaggctggagtgcagtggcatgatctcagcacactgcaacctccgcctcctgggttcaagtgattctcctgcctcagcctcccgagtagttgggattacaggtgcgtgctaccatgcccggctaattttttttgtatttttagtagagatggggtttcaccatgttagccaggatggtctccatctcctgatcttgtgatcctccctccttgtcctctcaaagtgctgggattataggcatgagccactgcgcccagccacgtgagaatattttcaaagaagatgtgaaaatactaattcagtaaacctgatgtggaatctgctaagatgtcttatatagatgatggtggtaaaaatacatgtggagcagaaaaagccttagttggacaaatttataaagtttgtgaaaacataagatatttaaagccttttcatcagtagatacttcccagaaaatatttgtcatgagtaggaactttgtggaaaatgcttaaatcttgtttgctgttgaaccaatagtatcacctttgaacttgtggacttaaccactgaaagaaatagaagctgataatcctgacttgtccttctacactgcatttcagtggtttagcagttttactgccattttttgagctcaggattgaaaaattcaaaatggaaatttttctgaataagaagacccacctgtcaaccactattatcaaacactgagtggcttagaaaattaggttttgctgcagacgttatttttcttaatgcattcagtgtaaaattacaggggaaaacagtgcttaaatacaaaacttactctgctgtgaagtcatttcaacagtagatacattatttgaatcaaagtaatgtcagtcagctttatgtacttcccatgctgttaaaagtttaacacaagcactcagatccgcagtggcagtggtgtgtcctgtctgcggagagccaggccagagacaatgagcaacacctcagagaacacgagggcgtgccccgaagccacccacccttccgactgcggcagctgctgacccgctgttgccatgacctgcaggaaagccaatgaggagggcagttggaagaaattcttctggaactcagagaagaaggagtttttaggcaggactggtggcagttggtttaagatcattctattctacataatattttatggctgcctgactggcatcttcatcggaatgatccaagtggtgctgctcaccatcagtgaatttaaacccacatatcagaaccacatatcaggacccccaccaggattaacacagatttctcagatccagcagactgaaattgcctttcatcctaatgatcccaagcactgtgaggcatatgtgctgaacgtagttaggttcctggaaaagtacaaagattcagcccagaaggatgacatgatttttgaaaattgtgacaatgtgcccagtgaacccaaagaacgaggagactttaatcaagaatgaggtgagcgaaagtctgcagattcaagcttgagtggctgggaaattgctctggattaaatgacaaaacttacagctacgaagagggcaaaccacatgttattataaagctcaagtgagttctaggcttcaaacctaagtctcccgagaatgagtccttggagacttacccagtgatgaagtataacgcatctgtgtttcctgttcagtgcactggctagcaagatgaagataaggataaaaatagaaatgtggagtattttggactgggcacctaccttggttttcctctgcagaattatccctactatggcaaactcctgcagcccaaatacctgcagcctctgcttgttgtacagttcaccaaccttaccatggacactgaaattcgcctagtgtaaagcagatggtgagaacattgggcacagtgagaaagatggttttcagggatcctttgatgtaaaaattgaagttaagagctgatcacaagcacaaatctttcccgctagccatttaataagtttaaaaaaagatacaaaagcctgttagtcttgaacaaactgtcatatgtatgggacctacacttaaagcataatctatatgctttacacttgctttctgcatttaattggttagaatgtaattaatgtaaactaaagtgtagcaatagcaacaaaatattctactgtaaatgacaaaagaaaaattgagccttgggatgtgctcatttttactgtaaattatgattccataagtgacttgtaagcagtgtttctggcccctaagtattgcctcctatattttatttaatgtatagtactataggtgcatactctggtcctttttcaagccatgtgttatcgtatctgttttgtactttatgtgagcaggttttgctgtccaaggtgtaaatattcaatgggaatgaaactggcatggtcttttttttttttttttttgggctctttcaaagataatggcccatcaatgagcatctttaacatattctatagtcttttcctgtggtgttaggtcttactttattattattttttctcctgggaatgggacagggatttgtcatgggggaactgccctttaaattttaagtgacactacagaaaaacacaaaaaggtgatgggttgtgttgtgcttgttttgaatgctgtcttgacatctcttcccttgtcctctagtatgttctaaagctgtgtctgagatctggatttgcccatcactttggctagtgacaggcctaataaatttgctttgtacattttcttttactttccttttttcctttctgggggcatcatgctgatggtgtgtctttatgagtgttttaaccattttcatggtggaagaattttttatttatgcagttgtacagttttatttttttctgcaagaaaaagtgtagtgtatgaaataaaccacagtcacttgtttgaaaataaatctttattttgaactttatacaaagcaatgcagtactccatagactggtgtaaaatgttttctactatgcaaagtccatgttctaataattgccaggagtacagtgctcttgttgatcatgtattcagtcaagttaaaacaatggacaataaaagaatgaatacatgaaaaaaaaaaaacagaagacatctgcagcagatatattttccaagcccaacctatagttccagaagtgtttttcagatttccatgcaagtgcagaggaaatttacatatttcaaaatccattaaatagtgcagttgagcagctttctcctgacttcaattggaagtgattagtcgtcaatgtaagaagatgctaaaaggcaaatatcaacaagaatttcatagaattctataaatgctttcaaagcaatgaatatagttatttaaaattatgtttatagatttatatcagcatttggcagtacctatctataagattttgaatatgaaatagtaacatatcagatcatcatcaatagatgaacatttacaattaattttgatgataaggaatactaactgaatcccaattaagtgaaatattttatcctatccccccaaaaagaattctgttcttctcattagtagacctgtattacaaagaattgcactcacatatttttattatattttaaattttgtcaaaaaatttcatggaaatttgtagttatttcttgctataccttcatcatgtcctttatattacctcttggcctccaaagcatgaaatatttgctatctagctgtttagtcagttctcgtattgctataaagaaatacctgagactgggtgatttataaagaaaagaggtttaattagctcacagttctgcaggctgtatagaaagcatagaagcttctggggagcctcaggaagcttccagtcttggcggaaggcaaagatggaacaggtatcttacatagcaggagcaagagagagatgggggaggtgcctcacacttttaaatgaccagatctcatgagaacgaactcaccagtcgtgaggacagtaccaagagggatattgctaaatcattcatgagaattcacccccatgacccagttacccccccaccaggccccacctccaacaattggatttcaatttgacatgagatttggatggggacacaggtccaaaccatgtcaccagccctcttcgaaaaaagtttgccaaccctatttcaatggtttcgttaggattccaccccattttatttatttttgttattagtaacctggaaagaagctatgaaactggaaggatgtaactagaagccttggagtataaatatttaggaggattctaaattatttgactatctcagttctgcacaggaccaaggcttagaaatgacaatatttccttctccagatgagttggcaaaatttcaaagtggaaattgtgagacaattatggtcaataacccaggaagaaaagggatggagggagtttcttgagagtataggagttcattaccaggaggggagcagtgggataggaagatcaaggaagagggaagagggagaagaagatatgcaaggaaagaacaaagtagcagtgctcaaactgtcctaatgttggtcaatggaagcacctcagttggctcctaagtccctttgtcataactctagtatcatggcgtccttactttcaggaataatatgtttcagattcatcttgtacgtttcctgtcctgggttggtaatcaactatttctaaaaggagccacttttctttttactggaaaataaaatcaagttaaagtaattacatacttgatttattctatgtctctacacacatagagaataaagtgtagtttcaaatagcagtattaatactaacaatgtaatttaagatttctttgcttttctttgtatctttagtatatatatcccactagagatgtatagttcaatttctgtgtgttaaagtcacttaaaatttttctatatagaaatatcatcagtagatatacagttaggctcatttgtttcattttgcttctgatttttaaaaataattttgtttttattttataattgcctaaaaatttacatgatttcttagtcaaacctacagaacagatatttcagagaactctagcttccatctctgtcctttccactctaagtcctctctcttgtataagtaactgttttaaagtttttgggttttttttttaatacttaaaatataagaaaataaagccaggctccatggctcatgcctataatcccgggactttgggaggctgaggtgggaggatcacttgagaccaggagtttgagaccagcctgggcaacattagcgagaccattttccttaccaaaaatttaaaaataaaaataatattttttaaaaaaacgtacacatttgtattaaacgccatacccttcataaataaggcatactatacatactttctggtcttgctttttttttgaggcggagtctcgctctgtggcccaggctggagtgcagtggcacgatcttggctcactgcaacctccgcctcctgggttcaagcaattctcctgcctcaacttctcaagtagctgggactataggcacatgccaccatgcctggctaattttttgtatttttagtagagacggggtttcaccatgttagccaggatggtctcgatgatctgaccttgtgatccacccgccttggcctcccaaagtgctgggattacaggcatgagccaccgtgcccggctgctcttgctttttttacttaactctgtcatgaggactatgctatagcggtaaatagagacatttcttcatttattttataatactctgttttttgatataccgtaatgtattcaatcattcccccataggacgtttctagtgttttgctattaaaacgataccatgagaagccttgtaaataaaagttaaaagaattttttgtaatacaaaaatttgagaaaacacagtaatagaaaaatactctctcatatttttcaactttgaggtaaaaatgaaggacttgtttttgtatcaggcttagttaacttttataaaggtaatattgagaaaagaatcttaccaaactgtctttatctcattgcaaatccagattttcctgcctccttttttattgtaaaaaacacatagcccaaaatttaccatcttaaccatttttaaaggtacagttcataagtgtgtaagtatattcacattgttgtgaaacagatcttcagaggtttttcatattgcaaaactgaaacactatacccattaaataactaccccccatttccctgccaccccccggtccctggcaaccaccattctgctttttgtttctattaatttgaatactttagatacctcatataagtggagtcatacagtgtatgtccttttgagatgggcttatttcacttagcatagtgtcgtcaaggtttatccatgttgttgcatgtgacaggatttcctttttcaaggctaaataatactccatcatcatatgtatataccacattttgtttatccattcattcatccatccatggacatttgggttgcttcacctcttgactgttgtgagtactgctgctatgaacatgggcatgtaaatagctttttgaggccccacttgctattctttggacgtatgtccagaagtaggattgctggattatatggtaattctatgttacagttttttttaggaaccttcatatttttttccataacaattgcaccattttacattcctaccatcagtgcaaaaaggttccagttttgacacattgccaatccttgttattttctgtttcttgtttttttaatagtagccatcctaatggatgtgaggtgatatctcattgtggttttcatatgtatttctctgatgattagtgatgttgagtatctttccatatgcttgttggtggtttctatataatctttggagaaatgtctattgaaatcctctccccattttttaatcagtttacaaatccaaattttttataacttaatatttttgctgttagctagtagcgcatatttaacatagtcctgaagagaatatcatgttcatctaaactgtgactggtaagaatatctatgacctaaatttattttgttattcttacagggctatttagaaaccaaaaaatattaagagaatacagagatttcttgggaaataccaaggtatggatatctttgtaataatgtgtgtgtttgtgttgcacagcaaaattctaatatcagtccattgtaaaattctagcatgtctgtgatctcaatctaagattttcttgagtacattgtagttcactgaattatagtcaattcattcatttccgtctgattttcctttttttttttttttgagacagagttttgctcttgttgcccaggctggagtgcagtagtgtaatctcggctcactgcaatctccgcctcccgggtttgagcaattctcctgcctcagcctcccgagcagctgggaccacaggcatgccaccatgcccagttaatttttgtgtttttagtagagacagagtttcaccatgttggctaggtgggtcttgaactcctgacctcaggtgatgcgcctgcctcggcctcccaaagtgttgggattacaagcgtgcccggcctgattttcttgaaatttaaaacatttgtacataagttttctttaaagtcataaccatgttatgaaccttaagcatgtagatatagatgaggaagactttattttcttaggttttagtgagatttatatccgtcatacacactcttaattttctttagcctctctctttctgctcctaactctggttcaacattcagactgccaactctgtgcttgtatccaagaagcttagcccttggagaagaaaattacacagccagtgtgattgttctttcttccttatatgactatacaaaatcaatggatactcaatattatttgacagtcttactaaacttccagagtatgttcaccttcccactctttgaaatagctattgcatatctttttctttcttgccaacagcctcactctttactcttcagctgttgactttgcttcatattttattgaaaaaataggtgtaatttcataaaagtacctcatctttttcatcacctcatcttttcatcaccaaatttactaactcatctacacatgtgacaaaatactctgctttccttcctactagaaggaaattaatattgggacacatgtagaaagtttgcctctactgttctacctcttattttctcctgaacctaatccaattgggctttcaaccccaccaccccactgaaatgacttaccaaagtccccagcacctttaagatgccaagcagtctgtggccaagttgactttccatttaaacttggctgggaggaatctcctatcaagaagttaatgtcatatttggataaaaggctacctatgcacattttcttctctctggtggcatttgagacattgcacccattttgcaaagtttagacattggcagtgatgataattttagccaaatcttatttgatatgctttccttttccatttattatcttcaagacctcttaatttccatttcccctttgatcactgcatttctggcaccccagtactgccctgaagatgtggactctcctctggtagagccttcatatgtcttatgagccagcattttcactctcatgcctcaagggctattgccattgcctcttgtgctgggataacttaggctggtgagacctgcctcctgggaagattcactcctcgccttcacatctgtttcacatggagaatcatcctcaccagattttctaatagtagctgttgacttatgaaatctttgttacttcagaagattaatactggtcaacttttgaatattccatgttttgaaatgatttttttttgctattacaacgtttttttgctgggacattaggataaaactagtatttcatttccctctactgtacccctattccctttaggaatggttgttctctcactgaagatggttgctttccttctctaaaacatagggctaatcctgtttgcaaaaattaaatgccttcttttttttttttttttttttttttttttttttttgttatttctgacccagacacttgtttttccaatatattcttatctcatgagaactccaataatgagatatatgaaatcacagtgttctgggtctgctcctctggtatttaatttcttatataataatttcccctttaatacctttctactttcccatgccttcccttctatttctaattcatgggtttcttgatatagtacttcagagaattggaagtacctttatctctgcttaatatatttaactccacaatagtatcaccttgaaatgcaccaataatgctttgaacaatttatgctccttttcctggtagttctctctgaaatctatccaaattttctgcacttgtcccaatattaaagaaccttgtttattgtgaatgttctcaaagatatataaaaatagaaaaatagatattggctatccagtttcattaatttctaacattttgctgtcctggtcttcaaaaaggggcagttctccaattgctctgattatggaattttttaatattttattttattttatttttgagacagagtattgctgtgttgcccacgatctcagctcactgcaacctccgcctcccgggttcaagagattctcatgcctcagcctcctgagtagctgggattacgggcacccactaccacagccggctgatttttttgtattttagtagagacggggttttaccatgttgtccacactggtctcaaactcctgagctcaagcagtctgcccatcttggcctcccaaagtgctaggattacaagcgtgagccactgcgcccgacctgattatggaatttttgagtagcttttacaggaagcttcccaagcaggttgtggatcctggctccttgtgatctcttgtttttctagatttttattctcttgttagagttccttggaccttatcattatttctagtttctaccaacacatcttcccgttttctacagccttctttattagagtggtttgggccgagtgaatctttttccttatttttcttattatttcttattctgatcttaaagatctcatttcctttccctgttttgcccctcccatgagttcccaaacctttcttctaaagaaatcttatttttcaccgtaagcagcattctattgttcccataataatttcattgagttttttctctattcatccaaataatacaatatattcttattttaataaaacatacattctgtttgttatcaataaacagtataattcagaaatctagacccatagtcagagtttatggcttacaaatcgaagtaaaagttgagatcacatggacaaggtttatccctgtgtagttccttctcttagctctgaaggcaggtcaatacagaattttgggtgtctgatttcacacattcttagagcatatgaatttcagcacagtgcatttttctactttattactagtttttatgtagccagctcagatcctttctggaagtaggcaggacatgaattacaaggaaacaaaacaaacaagtttctggaaagagacccagatatgctttcggttttaatctttccactttctaaacaagaacttctagagaaaaataagtaaatctaattcagaagttttgatagaggaaaatgttctggtctgtcaaagccaccagttacagtgcttctctgcaaaattttggaggtattaaaaaaagtttttgtttttttacagccacgctccagaacagcatcagtgttttttaagggaccaggaaaagtggtgatggttgcaatttgcatgtaagtactgaaaaataagctttgtgaaatagaatatattcttttaaatatgtatatccttaaatatgtaaatttattacatggtagctagctatagagtttgaggtttattttgttttaggaggaaattgaataagtctttattattgtcagtaaagtggtggggaaagagcatgaattcatatagataaccatgctcattctctgtatatttttgatgtagttagatctaagaatagttgctacctgaaaatcctttcttgtttttattggagttgatagaagtcttttttaaagaagttagctaaaccaacctgggttacagctactgaagaatatctttgtgcttattatctttattccacttatcttggaagaacataattatttgttcttgttatttttgcctcctctttttttttttttttgagacagagtcttgctctgtcgccaggctggagtgcagtggctcaatctcagctcactgcaatctctgcctcccgggttcaagccattctcctgcaacagcctcccaagtagctaggattataggtgcgcgccatcatgcccagctaatttttgtatttttagtagagatggggtttcactacgttggccaggatggtctcaatctcctgacctcgtgatctgcccacctcggcctcccaaagtgctgggattacaggtgtgagccactgagcccggccttgccttcccctttttccctctatcttcttgattcctattgttttgttcaccttttgtctgtttttctgactaatctattttaggatggatgaaatcattcaataattcattagttcttttattcttaaatatatatatgtaaaatatgtatcagtgtgataggatatgaaaatataaagatataatacataattctttaaggattggagggacactaaactagaggaagacatttataatacagacaaggaataatgctgtcataactacaatagtggtggtacagatagacgtagacagtttcaacttcttagaaggtatgttcaaggatagtgaccaggtttctggctgtacaattgtgtaaataatgtaccattcactgaggagagtactggaaggaggagcagggtgggagcagagaaaatgatgagttcatttttgagctggtggtatgtttagggcacccaggtggagataagtcaacagggttctttccaccagtaatacagggatagtgattatagcttttctcattggagggatgtatgtgtgaaaagtgcttaacatagtacctgctctaagatatgtacttaagaagtattattgttaatatatattggtctgaagctcaggagagaaatctgagttagaggtttgatagtttttagtatatagatgataactaaagccataaaagtaaagatcacctgaggaatgtatgtatatatagtatcaggaataaaaagtcctcaggaaaaattccttgaagaatgttaacattaagaaaaaggtggaggctttgggagacctcgtgatccgaggtcaggagattgagaccatcctggctaacacggtgaaaccccgtctctactaaaaatacaaaaattagctgggcgtagtggtgggcgcctgtagtcccagctacttgagaggctgaggcaggagaatggtgtgaacccgggaggtggagcttgcagtgagccaagattgcgccactgcactccagtctgggcgacagagccagactctgtctcaaaaaaaaaaaaaaagaaaaagaaaaaggtggaggaaaaagtgcctgcagaggagattgaggaggagtaaggagaaaagtagaaagaaaaccaggagtgtattagtccattttcacgctgctgataaagacatacccaagactgggcaatttacaaaagaaagaggtttaattggacttacagttcccgtggctagggaagcctcacaatcatggtggaaggcaaggaggagcaagttatgtcttacatggatggcagcaggcaaatagagcttgtgcagggtaactcccatttttaaaaaccatcacatctcatgagctcattcactatcacaagaacaacatgggaaagacccaccctcatgcttcagtcatctcccactgcgtccctcccaaaacatgtgggaattataggagctacaagatgagattttgtgggagacacagagccaaaccatatcaaggagtgtcaagaaagccaagggaagaagcgtttgttttttttttgtgagacggaatctcactctgtcgccaggctggagtgcagtggtgcaatctcggctcactgcaacctccgcctcccaggttcaagcgattctccttgcctcagcctcctgagtagctgggactacaggcacacatgttttaaggaaatagcaggcctggtacaggcacacacctggaatctcagcactttgggaggctgaagcaggaggattacttgagctcaggaatttcagaccaccttgggcaacatagtgagaccttgtacctacaaaaaaatttttttaattagctgggcatggtgggtgatgtgcgcctgtagacctactcaggaagctgaggcaggagaatcatttgagcccaggagtttaaggctacagtaagctgtgattataccactgcactccaacgtgggcaagaacaagaccctgtctttaaaaaataaatagccagctagggggtggcgggcaagatggctggataggaacagatcctgtctgcagctcccagtgagatccatgcagaaggtggataacttctgcatttccagctgaggtacctggctcatctcattgggactggtcagacagtgggtgcagcccatggagggtgacccgaagcagggtggggcattgcctcaccggggtagtgcaaggggtcggggaactccctcccctagccaagggaagccatgagggactgtgctgtgaggaacggtgcattccagcccagatactacgcttttcccatggtcttcacaacccacagaccaggagattccctcgggtgcctacaccgccagggccttgggtttcaagcacaaaactgggcggccatttgggcagacaccaagctagctagactagttttttttcatactccagtggtgcctcgaatgccagtgagacagaaccttttaatcccttggaaagggggctgaaaccagggagctaagtggtctagctcagcagatcccacctccagagagcccagaaagctaagatccactggcttgaaattctggctgccagcacagctgtctgaagttgacatgggatgcttgagtttggtgtgtgttggggagttgggggttggggaccaccattactgaggcttgagtaggcagttttcccctcacagtgtaaacaaagccatcaggaagttcgaactggacagaacccaccgtagctcagcaaagccactgtagccagactgcctctctagatttcttctctctgggcagggcatctctgaaagaaaggcccagcagtcccggtcaggggcttatagataaaactctcatctctctgggacagaaaacttgggggtaggggcggctgtgggcgcagcttcagcagacttaaacgttcctgtctgctggctctgaagagagcagcggatctcccagcacagcgctcgaggtctgctaagggacagactgcctcctcaagtgggtccttgacccccatgcctcctgatggggagatacctcccagcagggatcaacagacacctcatacaggagagctccagctgacatctggcaggtgctcctctgggatgaagcttccagaggaaggaacaggcagcaatgtttgctgttctgcagcccctgctgttgatacccaggtaaacagggtctggagtggacctccagcaaactccagcagacctgcagcagagaggcctgactgttagaaagaaaactaacaaacagaaaggaatagcatcaacatcaacaaaaaggatgtccacacaaaaaccccatccaaaagtcaccaacatcaaagaccaaaggtagataaatccatgaagatgaggaaaaaccagtgcaaaaaggctgaaaattccaaaaaccagaacacctcttctcctccaaaggatcacaactcctcgccagcaagggaacaaaactggacggagaatgagtttgacgaagtaggcttcagaaagtgggtaataacaaactcctccaagctaaaggagcatgttccaacccaacgcaagaaagctaagaaccttgaaaaaaggtaagagaaattgctaactagaataaccagtttagagaagaacataaatgacctgatggagctgaaaaacacagcatgagaactttgtgaagcatacacaagtatcaatagccaaatcaatcaagtggaagaaaggatataagagattgaagatcaacttaatgaaataaagcataaaggtaagattagagaaaaaaatgaaaaagaatgaacaaagcctgcaagaaagatgggactatgtgaaaagaccaaacccacatttggttggtgtacctgaaagtgactgggagaatggaaccaagttggaaaacactcttcaggagattatccaggagaacttccccaacctagcaagacaggctaatattcaaattcaggaaatacagagaacaccacaaagacagtcctcgagaagagcaacctcaagtcacataatcatcagattcaccaaggttgaaatgaaggaaaaaatgttaagggcagccagagagaaaggtcgggttacccacaaagggaagcccaccagactaacagcagatctctctgcagaaaccctacaagccagaagagagtgggggccaatattcaacattcttaaagaaaagaatttttaacccagaatttcatatccagccaaactaagcttcataagcgaaggagaagaaaagacaagcaaatattgagagattttataaccaccagtcctgccttacaagagctcctgaaggaagtactaaatatggaaaggaaaaactggtaccagccactgcaaaaacataccaaattgtaaagaccattgacactataaagaaactgcatcaactaatgagcaaaataaccaactagcatcataatgacaggatcagattcacacataacaatattaaccttaaatagaaacaggctaaatgcccctgttaaaagacacagactggcaaattggataaagagtcaagacccattggtgtgctgcatgcaggagacccatctgacgtgcaaagacacacataggctcaaaataaaggaatggaggaatatttaccaagtaaatggaaagcaaaaaaaaaaaaaaaaaagcagggttgcaatcctagtctctgacaaaaaagattttaaaccgacaaagatcaaaaaagacaaaggtcattacatagtggtaaagggatcaatgcaacaagaagagctaactgtcctaaatatatatgcacccaatagaggagcacccagattcataaagcaagttcttagagacctacaaagagacttagactcccacacaggaatagtgggacactttaacccctcattgtcaatattagacagatcaacaagacagaaaattaacaaggatattcaggacttgaactcagctctggaccaagcagactaatagacatctacagaactctcaaccccaagtcaacagaatttacattcttctcagcaccctgtcactcttattctaatattgaccacataattggatgtaaaacactcctcagcaaatgcagaagaacagaaatcaaaacagtctctcagaccacagtgcaatcaaatgagaactcaagattaagaaactcactcaaaaccgcgcaactacatggaaactgaacaacctgcttctgagtgactactgggtaaataactaaattaaggcagaaataaataagttccttgacaccaatgagaacaaagacacagtgtaccagaatctctggaacatagctaaagcagtgtttagagggaaatttatagcactaaatacccacaggagaaagtcggaaagatctaaaatcgataccctaacatcacaatgaaaagaactagagaaacaagagtaaacaaattcaaatgctagcagaagacaagaaataactaagatcagagcagaactgaaagagatagagacaccaaaaacccttcaaaaaaccagtgaatccaggagctggtttttttaaaagattcacaaaatacatagaccactagccagactaataaaaaagaaaagagaggagaatcaaatagacaacaatgaaaaatgataaaggggatgtcaccactgatcccacagaaatacaaagtaccatcagagaataatataaacacctctacgcaaataaactagaagatctagaagaaatggataaattcctggacacacacaccctcccaagactaaaccaggaagaagttgaattcctgagtagaccaataacaagttctgaaattgaggcagtaattaatagcctatcaactaaaaaaaaaaaaaaaagcccaggactagacggattcacagccaaattctaccagaggtgcaaagaggagctggtaccatttcttctgaaactattccaaacaataggaaaagaaggactcctcctcaactcgttttatgaggccagcatcatcctgataccaaaacctggcagagacacacaaaaaaaagaaaatttcagaccaaaatccttgatgaacatcgatgcagaaatcctcaataaaatactggcaaagcaaatccagcagcatgtcaaaaagcttatcaccaccatcaagttggtttcatccctgggatgcaaggctggttcaacatatgcatcaacatatgcaaaataataaatgtaatccattaaataaacagaaccaatacaaaaaccaaatgattatctcagtagttgcagaaaagcccttcaataaaattcaacaccgcctcatgctaaaaactctcaccttaaactaggtattggcagaacgtatctcaaaataaaaagagctatttatgacaaacccacagccaatatcatactgaatgggcagtagctggaagcattccctttgaaaaccagcacaagacaaggatgctgtctctcaccactcctattcaacatagtattggaagctctggccagggcaatcaggcaagagaaagaaataaagggtattcaaataggaagagaggaagtcaagttgtctctgtttgcagatgacatgattgtatatttagaaaaccccataatctcagcccaaaatctccttaagctgataagcaacttgagcaaagtctcaggatacaaaatcaatgtacaaaaatcacaagcattcttacataccaataatagacaaacagccaaatcatgagtgaactcccattcacagttgctacaaagagaataaaatacctaggaatacaacttacaagggatgtgaaggacctcttcaaggagaactacaaaccactgctcaaggaaataagagaggacacaaagaaatggaaaaacattccatgctcgtggataggaataatcaatatcatgaaaatggccgtactgcgcaaagtaattaatggaatcaatgatatccccatcaagctaccattgactttcttcacagaattagaaaaaaaacttctttaaatttcatatggaaccaaaaaagagcctgtatagccaagataatcctaagcaaaaagaacaaagctggaggcatcatgctgcctgacttcaaactatactacaaggctgcggtaaccaaaacagcatggtactggtaccaaaacagatatatagaccaatgtaacagaactgaggccttagaaataacaccaaacatctacaaccatctgatctttgacaaacctgacaaaagcaatggggaaaggattcccgatttaataaatggtgctgggaaaactggcaagccatatgcagaaaactgaaactggaccctgtctttataccttatacaaaaattaactcaagatggattaaagacttaaacgtaagacctaaaaccataaaaaccctagaagaaaacctaggcaataccattcaggacataggcatgggcaaagacttcatgactttcacaccaaaagcaatgggaacaaaagccaaaattgacaaatgggatctaattaagctaaagaacttctgcacagcaaaataaactattatccgagtgaacaggtaatctatagaatgggagaaaatttttgcaatctatccatctgacaaagggctaatatccagaatctacaaggaacttaaacaaatttacaagaaaaacaaacaactgcatcaaaaagtgggtgaaggatatgaacagacacttctcaaaagaagatatttatgcagccaacaaacatatggaaaaaagctcatcatcactggtcattagagaaatgcaaatcgaaaccacaatgagattctatctcacgccagttagattggcgatcatttaaaagtcaggaaacagcagatgctggagaggatgtggagaaataggaacacttttacactgttggtgagagtgtaaattagttcaaccattgtggaagacagtgtggcgattcctccaggatctagaaccggaaataccatttgatccagcagtcccattactgtgtatatatccaatagattataaatcattctactataaagacacatgcacgtgtatgttttttgtagcactattcatattagcagacttggagccaacccagatgcccatcaatgatagactggataaagaaaatgtggcacatatacaccatgggataatatgcagccataaaaaaggatgagttcatgtcctttgcagggacatggatgaagctggaaaccatcattctcagcagactagcacaagaacagaaaatcaaacaccacatgttctcactcataagtgagagctgaacaatgaaaacacatggacacagagaggggaatatcacacactggggcctattggggggtgggtggctaggggagggatagcattaggagaaatacctaatgtagatgacgggttgatgggtgcagcaaaccaccatggcacatgtatacctatgtaacaaacctgcacattctgcacatatatcccaaaacttaaattataaatttaaaaaataaataaacattgtttaaaaaaagaagaaaatagtgtcagatgctcccaggaggttaagagaaatgctaaaatatttccaggaatttagtagtatggaatggtaggtggtattgataagatgaaaactgtgacagacagaataaatatgatgtttttaagaagttatctgaggtggaggagatgggaaaagggtagctaaaaggggacatacagttctctcatttataaaatgggggtgttaatatttgtataacagacttgtaatataacatggtaactcactagcataacgtctgagataaatcatattagtcattactgttagtatctgagcagctagtttcctcagagttaactgtttattttggcatctagctgcttctagtatgactctgagactgcttagagtcacctctggcatctgcctccttaagtaaacagattttcactgaagtcttgcctttgacactggcccaatggacagtatcaggtgcagatctgcttttatctacctaaaacacataattttcttttacattttatcttgtccacatatagaagaccatcttttctcaccagttttcaaaatatacttaagtaatttgcttacacatagcatgcctcttaacagtacataatctatattttttcaaatttttactcttgttacctaaacaaagttttttaaggctagggattcttttaattgtacttgttttttttgttattgttgttgttgttttagcgatggggtctcactctcttgcctaggctggagtgcagtggcacgatcatagctcacttcggcctcaaactcctgggctcagatgatcttcccacctcagcctctcagtagctgggactaaaggcgtgcactaccacaccagactaagtttttaaaaaattttttgtagagatggggtcttactttgttgcccagactggtcttgaactcctgtcctcaagccatcctcccacctcagcctcccaaaatgttggcattataggtgtgagccattgtgcttagcctaattttactttcaacagaatctagtgtagagatatacagctgattgagtatgcttttggcttaaatttttgtccaaacctatgctaaattgttttctctttctcttctagcaatggattaaactgcttctttaaatttcttgcctggatttataccggttcagcaagtatgttctcagaagctatacactcattatctgatacttgtaatcaggtgaggactaaagctttttttataagtcaattttaaagtaatagttgtaggctttaatctaaaagttgatctattttaaaactgaatgattccagtagttggcttgtgggataaaataaaagtttacttttcagcaatgaagtgcatagaaatttaatcatagtattttaaagcagattgttatgctttaagaacctctgacaatggaatgtgaagtataacattgtcagtcactgagcagaaatctggtctctgaatatgaattctcaatgactgtaatagtcaatgaatttaaacttttggaataaagatgtaaaatcatatgtaattggttaaaatgctttcacattagattcataatttgaattactttccttggctttgcaaatggagaaaaatttttgtattaatacaattaaaagaccttctaaaccccctgtggcccaaattgtgaaaactagaaacccaaaacttttctaagaatataataaaaatttctgtgtgtgcatcctattacattttaaagagtgtggtatattaagaggataccttttcaatatttacttatttttagtcctgttatgtaaaaactgatttgggagaacttcaatgagagacacaggtaaaataagaatatttaagacaaggataaaaataacgtgaagataaggagcaaggagagcaatattaattaaaaattaagcctgtgaacttgtctcactcactgtcaaatcagatggattaaaacccttcataaaagtaaggaaagaagacaagcgtttgccattagtactaagtatttaccttgaacttaatttttatactcaatatatacttaaatactgtctctataaaattttaccattcaactgtggtatgcagtgggaggagaggggatagggagagatatataacttataatctctattttcttgtaagcttatcgaggaaagttgaaatacagaaatatttgtccatatggcaaggagatatgtatgatgttattagtttcaatattagtttttatttcaaacattgaagacagtgtttaagtgttcattctctatgctattcaggcatttaaaaagaatgtagtagatatctgtgtactgacctggaatgataaccatgataaattgagtaaaaaatcaagttgcaaaatactatgttcagaacttctgctttcacccatgacagactaacagggattgagtttaatcttttgccatagacaactaaaagctagacagtatattggataatagcagcataagaccatgatctctgagagataagaaacaaattatttgaactctctgatctctctggctttttgcttgaacacatatttgggatagtggagcaggatgggaaataacagtctcattgagttgagaagacagaaatcagtgttcagggtgtctgaggtggctagaacttacaaggaagagttccacagaggaaggagctacaaggacaaaaagctatagaagtctacatagggatttccttgaattgaatgtttgctgaatgttaagttacacatgtgtaagatgtgagcatcaatctgggcagagaaccagcagggagcagtaactgactaattcccactgctcacacaaagctaggttacattcaggttctgactagctgacgtaagagagttctcattgattatcgaggccaatggaaggctcaccttaggagtagggctaaattattcttaacgtaaaggctgttctagaaccctccctaacaaatcttcctaaaagttctaaaggatcaagctgatcttcaaataatttaatcacttgccagaacaaagcctcacattctttaataaaggcagcaaaatccaaacactcagtataacattcacagtgtttagcatccaataaaaaagactaatcgccagtataagaagcaggaaaatttgactcataaccaggagaaaaatcagtcggaagcagactaaacagatgatagaattagcagacaaggatattaaacagctatttcaagtacagtcatgtattgaaaggaaaatatgaacataagaagataaatcaaaggtataaaaaataaaccaaatgaaacttttagagctaaaaaaatatatctggtgtgaaaaattcactgtatagaattaacagcacattagacactgcaggtaaaacagtcagtgaacctgaatatgtaacagcagaaaatattcttactaaagccacagacaaaaaagattgaaaaaaatggaggaagccttggtaacctatggaacaatatcaagagtattctgtcaagcatttagggaagaaacaatgctgagtacacagactttcagaaatagagaatgaaatgtttttctactgctttaatgaggctagtataaccctgatgccaaaattttacgaagtcattatgagagggaaaaaaccctacagaccagttattcctcatgaacacagatataaaactccttaaaatataatcagattttattatataaatatataaatatgatatatataaaaatgatattatatcataagtgagtaagatttcaggagtgtaaagttggtttaacattcaaaatcagtaagtatagaaggttaatatgaagaaattaattgcatttctactatcagcaaataaatggggaaggaaattttaataaattccataagtagtatcacaaaatattaaatacttagagataaatctagcaaaagacatacaagacctttacgctgaaaatcataaaatgttgctgagagaaatcaaagaagacctaaagaaatggagagatacaataccgcgttcatagattggatgtcatagatctgtcaaatctccctaaattgatttacagatataatggagttccattcataatatgaacagacttctctgtacaattgacaaaccgaataaattccaaaattcatacggacatgcaaagaacctggaatattcaaagcaatcttgaaacaagaaatttggagaacttcaagacattataaacttatatagaaattaggacagtgagttactggcataaggattgacaaatcaatggaacaaaattgaggatccaacaacagagccacatttacatggcccgtgcctttcggcaaaggtatcaaagcaattgagtgaggaaatgaaactttttaaaacaaataatgttggaaaaattggatccatatggggagaaaaaggaccttgactcctacttcacacactgtatacaagtttgaaatggatcatagtccaaatataaaagttaaaactatgaagattctagaagaaaacctaggagaatatcttttagacctggtaggcaaagatttcataaataggacacagaaacaatatcataaaataagatttacaaattcaacttcatcaaaattaaaaacttttgctcattgaaagacatccttaaggaaataaatacgcatagattgggagaaaatagtcacaaagcattctgacaagggactggtatccaggattaagaaattccacgattcagtaataaaatgagaaccagttttttccccccaaggataaagatttgggcaggtacttcacaaataaggaaacatgaatggtggccagtggacacctgaaaatgtgctaacaccgttaatgatcaggaaatgtatattaataccacaagacatctctgcatatccactataatggctacaagtaaaaacctgacagccaaatgttggtgaagatgtggagcagccagatctcccagtcattgctggtgtattactaaaatggtacaaccactctggaaaatatttggcagcctcctataaacatatacttatcctgtgacccaccaattccacttctaagtatttacccaagggaagtgggaatgaatggtcccaaaagatttgtataagaatgttggctgggcgcggtggctcacgtctgtaatccgagcactttgggaggccaaggcaggcagatcatctgaggtcaggaattcgagaccagcctggccaagatggtgaaattccatctctgctaaaagtacaaaatagctgggcatggtgatgggcccatgtaatcccagctactcgggaggctaaggcaggagaatcgcttgaacccgggaggcgggggttacagtgagccaagatccgagattgcaccactgcactccagcctggatgacaagagtgactcggtctccaaaaaaaaaaaaaaaaaaaaaaaaaaaaaggaatgttatagcagctttacttataatggctgaaaaaattggaatcaacccaaatgtttatcagcagtacagcagataaacaaattgtggtatactcatacaatggaatattatctggcaataaaagggaatgaagtacttttctgactggcaacatagatgtatctccagcaaggaactttaatttttaatagtttaaaaaaattgggaaaaatggttgcgtctgatgtcggggaggaaagaggcacagggagctttttgggaatgatggaaaggttctgtgtcttcataggaatatatgtttcaagggtatgtgtatttgttaacaaccagaactgtacattctgggccaggtacggtggctcatgcctgtaattccagcacattgggaggccgaggtgggcggatcactggaggtcaggagttcgaggccagcctggccaatacggtgaaacccgcatctctactaaaaatacaaaaacattagctgagcgtggtggtacatgcctgtaatcccagctactcaggagatggagacaggagaatcacttgaacccgggaggcagaggttgcagtgagtcaagatggcaccactgtactccagcctgggcgacagaactagacatctcaaaacaaaaacaaaaacaaaactgtacattcaggatttgtgcatttcattgtatgtgaattttacctcaaaaaaattctccctatgtggaaatgtgattacttagtagatatttgataatagtaaggaattagtattgatttttttttttttttgagacagagtctcgctctgtcacccaggctggagtgcaatggcatgatctcagctcactgcaagctccgcctcccaggttcacaccattctcctgcctcagcctcccgagtagctgggactacaggtgcctgccatcacgcccagctaattttttgtatttttagtagagacggggtttcaccgtgttagccaggatggtttcgatatggtcttgatctcctgaccttgtgatccacctgcctcggcctcccaaagtgctgggattacagacatgagccaccgcacccggccaggaattagtatcgatttttaaaagtctgataatagtcttgtggctgtattttctaaaaagcctagtttttaaagagattcatccaaaatatttaaagatgaaatggtacgatgcttggaatttacttcaaaatattcatgagggagtagatatggatgaaataaaacatatttggttacatatttataattgttaaagcttaatgatggatgatttgagtttttaaaaatgttctatcagggccgggcatggtggctcatgcctgtaatcccagcactttgggaggccgaagcaggcagatcacctgaggtcaggagttcaagaccagcctgaccaacatggcaaaaccccgtctcttagagttttcaaaaagacttcagttaaaaatatttcaactggacctttctgaatagatggaaattgtatttcagaaagttgtttctttcgagacctataatatttttaaaattttaattcattgtaatatttttatgccatatgttttccctcacttcttgagagacttaagtacctccaacttttaaattagacctgtgtctctaattataatgtagttttttatttatttattacttattttttgagacagagtctcgctgtcttgcccaggctggaatgcagtggcacaatctcggcttactgcaagctccatctcccaggttcacgccattctcctgcctcagcttcccgaatagctgggactacaggcgcccgccaccacgcccggctagttttttgtatttgcagtacagacagggtttcaccatgttagccttacaatttctgttacagttcatgttggaaaacttttctgttaaatattgcacatcgtatcatttaatatcaactgagatgaatttattgagcacctgagtttgcaatgtagcaagtgtttagaagaagacatggttctttctctgtcttctttaaacaggttatatgcggttatatgcacataaaacaactagaaagatcttctaaggtaccatttatgcaggtgctggatagtatgatacttaaggaacaccagaaacgtgaagggtgatcatggagtagagagcatttacagtacttcttagccactagatgttaatgttcgttatgctgcaaactaaacaaatgctctgtaggttatatatacgtactgatagagatttatgttgtaaatgtgtagaaaaaggtctggaaggatacatatcaaatataactgtgattctgtcttacctctgaggagagctggttggggtggtctcatttttgttagaactaataaatatggtccatattcattttataaaatagttgacggtatctcacacttcattgcacagccaactgaatattaaggatttttaaatagttgaatgtttattgaatattttaaaaataatataaatacatatatatgtatacatatatacacataatgtgaataatgactgtcacttttaatgtacaggtgtgtattattccattttcacactgctgataaaaacatacccaagactgggcaatttacaaaaaaaagaggtttaattgtgactagggcaggctcacaatcatggtggaaggtgaaaggcatgtctcacatggcagcagacaagagaagagggcttgtgcagggaaactcccctttttaaaaccatcagatcttgtgagacttattcactatcacgagaacagccgaggaaagacttgcctccatgattcagttacctcccactaggtccctcccacaacatgtgggaattcaagatgagatttgggtggggacacagccaaaccatatcttcccgccccagcccctcccgaatctcatgtcctcacatttcaaaaccagtcatgccttcccaacagtcccccaaagtcttaactcatttcagcattaactcaaaagtccatccaaggtgtcatctaagacaaggcaagtcccttctgcctatgaacctgtaaaatcaaaagcaggttagttatttcctggatacaatgagggtacaggcattgggtaaatacagacattgggtaaataccatgtctccatttggcgacattgggtaaatgtctccaaaagggagacattggccaaaacaaaggggctacaggccccatgcaagtccagaatccagcggggcagtcaattcgtaaagctccaaaatgatctcctttcgctccatgtctcacctccaggtcacgctgatgcaaaaggtgggctcccacagccatgggcaactccacctctttagctctgcaggatatagcccacttttggctgctttcaggggctggcattgagtgtctgtggcttttccaggtgcactgtgcaagctgtcagtggatctatcattctgggatatggagggcaatggccgccctctgctcacagctccactaggtggtgtcccagtaggttttctgtgtgggggctcccaccccacatttcccttaagcactgccctagcagaggttgtccatgagagccccgcctgtgcagcaaacttctacctgggcatccaggtgtttcccatacatcctctgaaatctaggcagagatttccaaacctcagttcttgacttctgtgcacccacaggcccaacaccacgtggaagctgccaaggcttggggcttccacctactgaagcaatagctggagctgtaccttggccccttttaatcacagctggagcagctgggatgcaaggcactaagctcccagactgcacacagcagagggaccctaggcccagcccacaaaaccacttttcttcctaaacctccaggcctgtgattcaaggggctgccacaaaggtctttgacatgccctagagacattttcccccttttcttggtgattaacattcagttcctcattacttatgcaaatttctgcagctggcttgaatttctcctcagaaaatggaattttcttttctattgcattgtaaggctgcaaatttttgaaacttttatgctctgtttcccttttaaaactgaatgccggggctgggcacagtggctcatgcctgtaatcccagcactttgggaggctgaggcgggcggatcacgaggtgaagaaatcgagaccatcctggccaacatggtgaaaccccatctctactaaaaatacaaaaattagctgggtgtggtggcacttgcctgtagtcccagctactcgggaggctgaggcaggataatcgcttgaacctgggaagcagaggttacagtaagccaagatcgtgccactgcattccagcctggcgacagagtgagactttgtctcaaaaaaaaaaaaaaaaaaaaactgaattcctttaatagcacccaaatcacctcttgaatgctttgctgcttagaaatttctccagccagacactctaaatcatctctctcaagttcaaagttcacaaatctctagggcaggggcaaaatgctaccagtctctttgcttaaaacataacaagagtcacctttgccccagtttccaacaagttcctcatttccatctgagaccacctcagcctggactttattgtccgtattgctgtcagcattttgggcaaagccattcaacaagtctctaggaaattccaaactttctcacattttcctatctttttctgagccctccaaactgttccaacccctgcctgttacccagttccaaagttgcttccacattttcgggtatctagagcagcaccccactctactggtaccaatttactgtattattctgttttcatgctgctgataaagacatgcccaagactgggcaatttacagaaaaaggaggtttaatggacttacaatttcacatggctagggaagcctcacaatcatggcagaaggtgaaaggcacgtctcacatggtggcaacacaagagaagagagcttgtgcggggaaactcccctttttaaaacaatcagatctcataagacgtattcactagcacaagaacagcatgggaaagacctgccctgattattcagttacctcccaccagatcccacaacacttgggaattcaaaatgagatttgggtggggacacagtcaaaccatatcagggtgtaaaagagttatatcttcctttgaatttcctgtcattctcttagtttaattccctgaaaaatcatgtatattttaggtggtttgctcccttttcccatggaatccagtggtaaaagcttataatattctgtgtatttagggtagggtttccaatattaagacctaaaaatatatttgtattaagtattttcaagtttctttaatctctattttttattagaaaaaatgtgtctattaaatttcttgtaacctaagggaaacctcatctgtgaagaagtcattatctagaaacttcacttatctgattatttgatatgatgctggaaaaaggaaaagcctcagattaatcaactaaaattacatagggaattcactcagaggctttatatttttatcaaatagttctaataaggtagtcttatgatgtgatttctagattcacatcaaattaggatggaaaggacttactagggacaagcatactactattgagaagttccagtggataactctttaacaaagggcaaaactttaaaaaccacctaagtggaaatgaaagaaagaaggaagaaatgatgaaggcaagtgagacagaggagaggcagtcagaaaggaaggaaagaaaagaatatgatatataattcctgtgcatggttttgcagttttaatagaaatgtgtgtgcccatacacaatatatatatattgtttaaagttgttattatcttttacttgtaaagctatacaagttattcttcctgtaaaaagtcaaatattagactaccttaattctgcctctcttcagagatacaaacatagttacttgcatgttcttttaaaccttttctgtgctttacattatatgtagtttataaaactacaaagcataagttctgtactgtacatactgttcctaacttgcttttttctcttcttccacttaatggtatgtctaggagctttatccatgtcagtatagaaagctctactctaaccctatttttttaacctactgtagaagtaatttatggtttatcatttattttgtcattcccaattgatggattttttttaggttgctttcatgtttctcatctttataaacaatggtgttttgaacccctttgagttcatctttattttttaaggtaagtactagaaaccagaattgctgggtcattggacatgcatatgttgagtgtttctttgtcattgttagcctgcaccctccacattggctttaccatattatactctccatcttgctaatgattattcacctttttttcttcttcttcatagggtttactagcattgggcatcagtaagtctgttcaaacaccagatccttctcatccgtaaggacattgccttattttgtttttgtttgttttggcgataagtcattgaaataactaaatatcagaaatctcctgcaatttatgtacctgcagtttgttcaagatttggtcatttcttccactgtagtatctaaaatgcagaacttcccactgtgtcaaagtaaattcaaggtataatttgaaaatggagttcaagttatttttatgctttgtagcacggcatggagatcttgttttctccatatttgataataataaagcacatattttgatcttagaggtctgttttatttggtccaaggaaacatatattctagatttagactcataggctgcccaatctaaaattttgatgataacttctattagatacacacttattttaatcctcctgttgtgatttggaaatgtattttgttaatatttcagaattatttatttgtaaaatgagtatactttttagaatgtattattttgaatcatagccattatttgatacagagatttttttctattgcttctattaacataaccatctaacacttttgaattccacaaacatcattttaagactagcttcagtaatataatttgataaatcttaagaccaaaaaaagtgcacttttatttctgtaaaggagtctacctctattctttagaaatgcctttctttacttgaaagcaatactactgttttcccataaataacatatttgaatgttttgtaactgtcaagctagtatagagaatagctctctagtgtgttaattacccatcattacagtgttttaccatcttaagaaaaatttttttttcatggccagttttatgtacaaaagatttaaaaacagaaggtacaaattttaaattttaggttgtgaagatttcttctcaaggtatttttatagtctactttagtgctgcccaacagaattttctgcaatgatggaaatattttatatctgtccagtatggtagtagctaactacatgtagctattgagcacttgaaatgtggccagtgcaactgaagaactagattttaaactatatttagttttaatttatttaaatttaaattgccacatgtggctagtggctcatcatattgggcagtttagacctacataatcaaaattttcaataagttaataattccttgaaatcacctgaagtaataccatttattttagatcttaatttactttaacgtgaatatatattcatgttactttagaagaaagtaaatttttctgagtgagctgattgtcacattgtcacatctataaactgggaattccccatggcaggattactctttgcaaaaaggaattccaagagcagcttgattaagaattcttgttgaaagccgggtgcagtggctcatgcctgtaatcccagcactttgggaggctgaggcaggtggatcacctaaggtcgggagttcgagaccagcctgaccaacatggagaaaccccatctctactgacaaaacaaaaaaattagccgggtgtggtggcgcatgcctgtaatcccagctactcgggaagctgaggcaggagagtcgcttgaactcaggaggcggaggttgtggtgagccaagatcacgccattgcactccagcctgttcaacaagagcgaaactccgtttcaaaaaaaaaaaatgtcgggcgcggtggcccacgcctgtaatcccagcactttgggaggccgaggaaggcagatcacctgaggttgagagttcgagaccagcctgaccaacgtggagaagccccgtctctactaaaaatacaaaattagctgggtgtggtggtgcatgcctataatcctagctacttgggaggctgaggcaggagaatcatttgtactcgggaggtggaggttgcagtgagccaagatcctgccattgcactccagcctgagcaacgagcaaaactccgtctcaaaaaaaaaaaaaaagaattcttgtttaaatttgtatttctcagaagagtgccactgagtttgggtttgggactaaattttccaggaaatatttttattaatgagtgattcttttcctcctctagtatgttattaatatatttttgagcacctttaatactaagtattgtgtcagtactaacaataatacaaaataatgtacatattgatgaagcatgcttgaaaaataattgagattttagcaccatgaaaacacccagaaaactgaaggtcttagttctagtaatagttgaaagttgctgtgtgctaacctattcagaaccagcaataaattatgtgttgtaaacttctgtatccagcatcaaattataggtattataaataatagactggctgcacacaaagatgaaaatattcaattagaagctgcattacaaggaaatttaaatgttatcctgttcattaaacatctgaatgcattttttaaaagattaattttaccaggatctgtggtacataatagtaaagtagctctctaaatcaaaataggctatttggaaaagagatcagaaaatacctgaattaaatggtattcactttatgtattttcaaaattcttacagttttttccactttacatattgcttttcaagtttggcacttaacatcttacttaaatataaaattataacatcttgatattgttagtctttttcattgacctattaagcacatatattttaaaagaaaccatttgtatttcttgcgaactatattcttttctatttttcaggtacggattttcaaatatgcgctatatttcttcgctaattagtggtgttggtattttcatgatgggtgcaggactatcttggtaccatggagtcatgggattgcttcatcctcaaccaatagaatcccttctatgggtaatcctctttttttctcctcagttttgatgtcttatgacatagtgattgtgtacagtagaaggcctttgtcatattggtgttaaaggagaatgacatacaccttcttgactgtgtattgtagggttatatatctatagtttaatttttagaacgtgactggacataacctctaaatccataagattcaatgatgttgaacaagatctctgtaggtaccaattatcaagccctgctccttggttaaaatcttgggcagttccactaatttctccagttactgttgaagaacaagaaaacctctgttcacttttggtcccaagaatagtctcatttcagtaattaaaatattcagacccatgtaatagtcataagttggaactatatttgaagttaaagcttctcttttcccgcatcctgggcttccttcaggtaggaagcctgcactgggggaatgggaggatagcaggatgatcacccgtatgatcccctctggggcttctgcccctctctcctattccctggaaagtgttgagggtttggataagggataaaaacataccactttactgactacagtgttattttgcattggtttcctctggcctttgtagatgtttaaaactgtctttttttttctcatgggcacttcttggagattaccctgcttggctgctctggctatggctgcccaaattgatcacatagcctaccctctcagcttctgcatctcatggtgtggtttccagacagtgctgaagttgtcttgcatttggaaagaatgccctttgagcagctgatctccttataaaagactcctagggacctgtgtgttaaaacagacatctttaacacactttctgtgggagtgcaggtttttctctcaagcccaatgatctactctgctgatacagccaatatcagttagtaggcttgcgtatggatgtatcactcaggtatgcatcagacagtttgctgtgatatccaatatcccgggggacacacatcaaggctactgaacaatcttagtagctcaacagctttcaccaaagaaatcttcatttttggcctcctcaatttcagctcttcttatgtggtctagaggatgtggagctagcatgtagtctagtgggtagaggccccaggtttgggctaccttctgtgcaaggcctgaatagatggtataacacctccttttggaatgtggggatacttgtacctattttcttctctattttgagttgtagtcagaactagacagaatcaatctgtctacttttttaatatcctgttatatcatgcaaatctacttaataacaagcacattaaactaggcttatttgttattctctagttttctatagttttgattgactagtttcttaccataatacatttcatataattaaaacaaacaaatgtgtttcctccattctgaaaagatttggccactttatgggtacttcattgttctagcgttcttctaatttgtatagtgtcactttataggggcaaagcactctctgtagttagagattaggtaattagttaaattttcagttgtgtataagttttaaaacttctaaaagctcttgtgtctttcagtaactaaatgggtttccattagactatggccctttttaaaatagtgttggactaggttcaaagttttcagacctctattttaggaaagcctagggttctaaacattgttgaaaattctgtagatgtttggtttgaatttcattaaaataaaaaaaatgtgttgctaggttaactttttttttttgatacacccctgtctaaagctttttttaccatctttaattgaagagtgtcctgggattgcagggaatgtggtattaccaaaaaacaaacattggttactgtttgtaactacttatctttctgaatcaggattttcttggtattaggcatggaagcaaaatccagaagttacttgagtttgggtgtggatcttactgtatctggtgtctaccactcctgatatcaaatattgtattcatatctcattgtcctcctcatttgagttgtttcccattagtaaccttactgtctggcttaaatttgaattcgtgtttttgttttagacattacggactttatatatgaacaattgtgattggaagtacttaatttatgctttattttaatatttcttttctaggcatattgtattttagcaggatcattagtatctgaaggaggtatgtactgtcacaaagtatgtctctattcttaatttagtaatatatattcagctgtccattattatagtttgctaagttctgttgattaaagaaaagcaagtgtgggaataggcatctaagctttctctacttttagggagtaaagtctttgcataatgtactgtggttgttctgtaatggatagctgtgggggggtgtgtaactgcgccctgccatgggatggcatcctggcaaggcctcatttctctttgtgtcctgagctgctaggataggctcaagtaggtgactatcagatagatggaagacagtaactgatgtggcatgaaagcgcttagcaagcccaccatatttgtggttatttttaaactatgtggtggtaagaggtgttccttacagttttcactttgcaagcattattccttgattgaacccaccaccactactatcgctgttacttgccgattcactaaaaattggataaataattattttacttatttaaaagggaaagtatgtttcatttttgagtatcataccataatactcaaaacatttgaaatggagtataaaaaacataattaaactgaacttttaaaattagagtttaataatattcaccagaagaatattatttactggctcttgtgagacaaatatttcaaagtttttgaaatacacagctatagcagtatgatgacagagaactgctaatatcagtataaaactgcctgattcactgctgtgctcatgtttacttctgaaacattgtaactttctatgtataatgttcccttcatctatttttaaaattaacattttttattgacagatcctaattgtatatgtttatggggcccctcatctttgaaagtctatgaaatggttataacacaacctgcttcaaaagattgggaggctcagaaatgaatgtggttagtgtggtgctgccaaatagcagctcttcaataaactaaagctgttgttattagtaattatatttaattattatggtttagaactatggggttcattttattataatgattaattgataacaactaattaacatagaacttgtccttattgccaaccctagttttaaaatgttgtgcttatttgtttatcttttgagatgccatctttaaagtttggaggcatgaagtttctgtcttgctgatatgaatgcttttcttttagcaacacttcttgttgctgtaaatgaacttcgtaggaatgctcgggctaaaggaatgtcattttacaagtatggtatgtattttagaaaccaagtgtttgtttcacctcccttatttgcttaaaattacttagtactgttattgctttgttcctaatagaaatgtacaaaatatatctgaatatcatccctgtgtggctcttacatatccttcagcccttattaaaaagaaatgtagtatagaaatttgaacatggatactttatatttggatttgacttaagtgaactaaggtatttctttatatggttatataacttgagaaagtaatttgactttatgtatcagttattgttgacatttaagccaagaaattatgtttgcattgagcaaggtttttaaaatcataatctctcatacacttttttatcttaacttatatcttgattttaaatggatacttattaaaatgttacctgatagtatcaagttaagattttagaaattttcttgtcttgtctcttccccaatgactagtaatggaaagtcgtgatcctagtacaaatgtgatattattggaggatactgctgcagtcttgggagttataatagcagccacttgcatgggccttacttctataacaggtaaatattccttaaattacaggtgatttatttgtcctacttaaataattctctaatatgtgggaattttctcttatatcattgaataatattaaaccaacaaattgttaaatgttaattcctactaatcattgacttatgtaagacatttggtcagcagaagtattcaggtttatttgaattaaaaatgtctctaaattagaaataaggaaggctatttgtaaaggatttctgtaatgctgtacgtctttctagctgtgacttaaaaaattgtgcaatcactctgaactttttatttacctataaaagtgtggataatatttaccttggtaacctcttaggtttattaagaaaatatgagagttttaataaactctaaagttccaaataaatatacataggtcctcaaataacattgttttgttcaacttgattttgttataacattgttgcgaaaaatatcaattcctaactggagctaccatctctgtggagtttgctcattctccttttatctacataggttttctttgggcaccccaacttcctcccacatcacaatgccgtacatggtcagtgaattggggtgtctaaatagtcccaatctgagtgagtgtgggggtgtgtgtaagtgtgccctgccatgggatggcatcctggccaggtctggttccttcctgtgtcctgaactgctaggataggctcaagtagatgataatcagacaaatgcaggacaataactgatgtatgaaagcgctcagcaagcctacatatttgtggttgtttatttttgaattatgtggtgataggtgttccttacaattttcactttgcaaacatttattctttgatttaactcaccacccctactattgctgatactcactgattcaccaaaaattgggtaaataattattttacatagtttttattaatttttaaaaatgtatatgtagcccacatttatttcagtgttcaatattagacatgttttgggtcttagaagttgagtgatgtttttgtgaccagaaatatgccataggaacttaactctttttttttttttttgagacagagttttgctcttgttgcccaggctggaatgcaatggtgccatgtcggctcactgcaacctccacctcccaggttcaagcaattctcctgcctcagcctcccgagtagctgggattacaggcatgcgccaccacgcccggctagttttgtattttcattagagacggggtttctccatattggtcaggctgatctcaaactcccgacctcgggggtgatcctcccaccttggcctcccaaagtgctgggattacaggcatgagccaccacgcccggccggaacttaactcttgtttgtatcagttagcttatggtaaaattggttttgttatatgttgttccctataaagtcgcagtttctaagaacctattgacaacatgaatgaggacttaaccgtatattgtggctcttgttcatttgtctttttccacacttaatgccaataataactactgttgccttcctatttctttaattctaagttgtttgtgtccttattttggtagctaattaagtgttttgagggccaataaaatacaagtaaatgaaaagacaattctattttatttttattttcgaaaacaaccatttagcatgaaaagactcaatttatgaagttggaattctcttggaaaggaacttcttccatacttctctatttgtccttacatatttaaaataattttaggtgacgagcttccacagttctgcagtgtttcttcaaatagtctgaaatatgaatacttctttctcattctgagtgtgcattttaataccaaactagcattctctgatgtttattgtgatccaaaatatttgtaaaaatgttgattgtttttctggttgaccatatagttttagactgtttttgaacataaattactagcaaaattttaggcttaagaaaagtgtgacttgatgcagatgtcaactttgaataatttattttcttttacataataatagaaaccaatcaaatcaaatttacaaaaatatgtaatgtgttttacatgaattaaatttttcttaattagctaatttattcaaattaaattaaataacatgccaagaaataaaagttttcttaaaaaaggtattttctttcagctaatattcctgtaatttctttaagagtacatgaatgtatatatttaaataaaaataactcttcacatttggatttctaaagagcagtatttgattttgagctctataattacaaaacttctaatggataatgttttacaagcggatcatttttaacacttagtatagattaacaagtttgctttttagtgttacagcttagcaaaatatatgttttatcaagcattaagaagagttaaatatattgatgacatttcatctttgggataaaaagacttgtagtcataaaagccatgtgtaaaatttattataaagatttaaaacgtatttattggtgtctattatataaatattacctatacattcatagatgataaatcagcctttctcattggttctgggagagaagccctgacaacctaaggcaaatattagaatcagaatcacctgaagggcttggggaaacacagaatgctgaaacccacatccagaattttttattcaggggcctgaaatgaggtctgagaatttgcttttctaccaagttttcaagtgatggctgctggtccaggaaccacactttgagaagcaccaccttgaggcacctatggcatgtaatgaattaagttctctcctttttatctagaatgatactagctatatatcatccttggttggatgagaagagagtcacccatattattttctgtagggcttaattctcttacagaacattagtaggaagaagatacggaaaaaggtttctttcagcttttgattccactgttattttgtctatctggtgtaggaaaagtgctatggatatatctaaaagaaatggactcttcattatgtcatttttttgtattggtgtctctaatctaaatgtgctcagaaacttcacatatgtaatgacaggtacaagtaagagatcttaattatgtcacatagtactcttatgaaagcaagttgtagcatcctcattttgtggtatattaaaactattaggagttgttaaaggaagtaattaaagaaattaggaataaatttcaagtgccttgatttactcgttctggttctttgctctctataaagttcactgaaataatataaactgttaatttactgatttttttatgtgcttcatttaggcaatccactgtatgacagcctaggttctttgggtgtgggcaccttattaggcatggtctcagcattcctcatctacactaacacagaagcactcttagggcggtccatccagccagaacaagtacaacggctcactgaactcctggagaatgacccatcagtaaggtcagccttattccagtaatcctgttaaggcttacaaaaacatattaaaaaacagaaatgcctggtttgtaaatacttccagaggaagttttggattcctcgtcttcagaacgttttagtctgtaacttttcagaattataatcctggaagtaagaaagaatacacttaggaaactccttctaagtttccttttaaattttctatacttctaatttttagagtaaggaagagtcaagttgatataatgagaatggaagtttgcaaagtagttgtcttcttagtggaaatacttaatatggaacctgtagagttgccttatattcgcattgcaattacaaattgaatatattaaatttaaaaagatttttgttcattgggcaatgattaccaaattaaatataatttatatttactttgaaaatagactttgttttagcttattttaagtatttttcttataatctttatcttttaaattatgtaaaactaaagaactggagacttaggagataatcagcagaagagatacagaattctaatagtgcttttcagtgaaattctagcagcattgtggttttataatgaaataaaagaacaaacctttaaaaacccagttttctactaactcgctctatattttttcaaactttaaaataagatttttttgtgtattgtacttgaaatctttaagttaaatctttttaaaatgacccgtatatctgaattagtaaaatatattaatgattactagatttatattctatgccctatatgtttaatcttgaaaagtaactatcttattggaacaagattagaaaatgagagatgggcacagtggcacatgcctatagttccagctacttgggaagctgaggcaggaggatcacttgaggccacgagtttgaggctagtgtgcaatgatcatgtctgtgaatagccactcactgtactatattctgggcagcatagcaaaaccctgtctcaaaaaaaaaaaaaaaaagattagaagttgagcattatgaaagtcagtattagagttattaacataatgtgagataatccaaattaatatcctttctttgtgatgtttttgtctggttttggtattaagataatactggcttcagagaatgagttgggaaatgttctctcctatttttttggaagagtttgtgaataattggtgttagcttctttaaatggtagaattcaagtatctggatatgagctttgctgtgtgggtagttttttgattagtaattatatctcttgttatggatctgttcagattgtctgtttcttcttgacttagtttaagtagcttgtattctaggaatttgtcttttacttctaatttacctaatttgttggtatacagctatttataatattcctttgtaatccattttatttctttagtgttggtacaaatgtctcatctttcatttctgtaatttgaatctctccttttcttggtcagtgtagctaaaggtttgttcattttcttgatctttctaaagaaccagcttttggtttaattgactttctctgttgtttttctattttctttttcatgactttctcctttaatctttattatttttttccttctgcgtgctttcagtttagtttgctctttttccactgtcttaaggttaagcttttaatttgatgtttcttcttttttaaaatagacaattacagctacaaattttcctttaagtattgctttctctgcattccacacatttccatatattgtgccattttcattatctaatagtattttctaatttctttttttattcttttcagttatttaggggagtatgtcacttaatttttacgtatttgtgagttgcacagatttctttccattattgatttattattttgttctattgtggtcaaagaatatgttttatattagttctgtccttttaaatttaccaaggtttgttttatggccttacatatagtcttggataatattcatgtgcacttgagaagaatgtatattctgctgttgttgtagagtgttctgtagatgtttgttaggtttaattggtttatagtgacttcaatttccctaattatcttcttgctctattgttctatcctttttttttttttttttttagatggagttttgttcttgttgcccaggctggagtgcagtggcacgatcttggctcactggaacctccgcctcccagattcaagtgattctcctgccttaccctcccaagtagctgggattacaggtgctcaccaccatgaccagctaatttttgtatttttagtagagacgaggtttcaccactggccatgttggccaggctggtctcaaactcctgagagacgaggtttcatcactggccatgttggccaggctggtctcaaactcctgacctcaggtgatccacccgcctcggtctcccaaagtgctaggtgtgagcaccgtgcccggcctctgtatccgttactgaaagtatcgaagtctctagttattgttgttgtattagctcttcctcccttcatttcttcttggttttggcatcatatattttggtgctctgttgttgctacatacatgtttataattttgtatatattgtttaataagtaatgtctaaaaaagagctataaactgaaagactggcaaattcgaaattttgtggaagagtgaatatctgtggattcaattattggaaaaaatacgttagtaatccagaaaattcatacaatttttttaaacagtatattagttacctactgctgtgtgacaaattggcccaaaacttagtggtttaaacaacatattaccatcttacagtttctgtgagtcaggaatcagggcacagcttatctgggtcttcgacttcagggtttctcatagactgtaatcaaggtgttgactgggattatagtcatctcctggggaaggggctgcttctaaccttactcacatgattgttcgcaagatttagctccttgccaaatgggcctcttcaacatggcagcttgcttaatcaaagcgtgcaaattgataaggcaatagagagcgagtgtgaacaagacaaaagtcacaggttagtcacctggtcttggaaatgacatctcatcactttgccatatttggtagttatagcccacattcagtgagaggagatcacacaagggcttgcgtataggtggcagggattgatcatatgggagccctccaaacagttttctgtctgtagttagttatatgtaagaacataaggaaaaagtatatctaaatatatttattagttgctactcacataccagccaaataatgaaatgtgtttatactctgtgaagactaaagtagaaatgatttttgaaaatgaataaatatgttctgtgagttaccaggagagaaaaaaaaaagaataaatgatatagccttttgccaatctgaaaaagttttgttttaacttgagcacatgtaactataaatattaaaacattaattcttatttcatccttgatggttgattaaaatatagcttccttatatggataaaaaattttggactcagtgtttagtaacctgctcaggatccctcagaaattagggtctaatgttgtaagaatacttggagtcttacgtaggcttgtttttctagtaaatctccatgtcctcagaattcagagtgttttgttatttcttatatgtgctgtacagaaaagatcttacagtgatcactgtagaaagaagagaatttctcagcagtttctagggaagattgtttactgagggttagagcaggaggggtgaaaagtagttatgcttgagtatctgctttcctgtctgggaggcaaaagggtatgatgcaaataccactgggcttgcatttctgaagagctgggctggggagtcctaatctgctgtttactagctaaattaccttgagcaagtcacttatgccactctaggatggttttatcatgtataaaataaagatgtcaccctatccacttatgaaagccatccattaaatgcctgccttatagttcttactgtattaaacattttatatatgtattagctcattattcctcacatcaagtcccatgtggcagttattattaacctcattctaatagagaacttcacagcattgtatgaagacttttaaagaagctagtgaacatacaattggttaatatactctacaacaccattataaattaaaacaaatttttatatggcatttaggaaattgataagtagatatatggagacaaaggcttatgagataacatgacattttagaaaattgatttagagttaatgaatatatatatatatatatatatatatatatatatatatattttttttttttttttttttttttttttttttgagacagagtcttactctgttgcccaggctggagtgcagtggcacaatctgggttcactgcaacctctgcctcccaggttcaagcaattctcctgtctcagcctcctgagtagctgggattacaggcatgcaccaccatgcctggctaatttttgtagttttagtagagacagggtttcaccatattggccaggctggtctcaaactcctgacctcaggtgatcctccctgctcggcctccgaaagtgttgggattacaggcatgagccactgcgcccagcagagttaatgaacttttaatacatgagctttataattcataaattaccataaaataatatttgttaagtttgcacctttgtatgatatcatgccaaaaaaaaagctaaacggacaggccttggaaaatgataggtggtacttaatggtgaatactctgaagccatcttagtccattctcgtaactagtggggaaaaaaacaataattcaagcctttgtgctattaaagtatatatatgtgtatgtatgtataaataaatttgtatgcattgttattgattgcagggcaattcatgatgttaaagccacagatctgggattaggtaaagtaagatttaaggcagaagtagattttgatgggcgagttgttacaagatcatatttggaaaaacaagattttgaccaaatgttacaagtaagtttatttgttgttttcttacataactgagggttagaaaaatgcttttaaggtaaacaaaatgaaatttttttttatagatcttaaaggcactttagctctcaacttcttaggttccaaaatttaacagagacctttatatttactatggaggggttcagaggagacagcaaaagaacaaacttactatttcatgcttgctatgtgcatttaatctttttttatctaatttaccctcaacaaccctgttatttcaacaatgaaataacatttttattttaacatatatagaaattgaaagacagagattaagtaatttgccttaagttgtagtgccacagagatggagtcatatatgaatcgagatctgcctgactccagaatccatttttttattaagaatagtttaaaagagaatttataaaacagaatataatgaacagcacagatgttaccacttgcccctgtcaaatcttaacattttgctatagtgtatttgcttaaggtcttaaaaaaagaaataattacaaaaacaattcaagcccccattttctctttctatatctcattcttcttcttccatccctagaattaaacattatgctgaatttggtacctgtcttttccattcagatttttatacttttcagcattttttagtgtaatatgtaacattttgaatgtttaaaaattggtataaatggtatcctactgtatgcgtctctacaattggcataacaacatattttttagattcttccgtgttaatttatatatctctagtcagtttaccttcattgttatagagcatttcatcctatgaatatgctgtaatttatttattttgtctccagttgatggacatttatattactgttagaaacaatgccatggccgggcgcggtggctcacgtctgtaatcccagcactttgggaggccgaggtgggcggatcacgaggtcaagagatcgatcccatcctggcccacatggtgaaaacccgtatctactaaaaatacaaaaattagctgggtgtggtggtgcgtgcctgtagtcccagctactcggcaggctgaggcagtagaatcgcttgaacctgggagttggaggttgcagtgagcctagatcgtgccactgcactccagcctgggcgacagagcgagactccgtctcaaaaaaaaaaaaaaaagaaagaaacaatgccatgattgcattctcacacgtttccttgttcacatatatgaaaatttctttagtatggtgtatatatagatagctagattttaaataggtgggccattgggtgtacttaccttcagcttgcctaggtcttaccaagttattttccaaagtgtgtcaatttaacttccatcattgtatatcaaggttcttgcttcctattcttacatgattgtattaatagagttattaaatttttgccagtttgataggtgtgaaatagtatcttgttctaattttatttcttggagcattgaggttaataaacattgaagttcattgaccagtgggatttcctctacattgctccctgatttttcatgttttaagttcatttgcattacacttatagatttgaaaggtctttattttattgcattgtattattattttttgagacagagtctcgctctgtcacccaggctggagtgcagtggcgcgatcttggctcactgcaacctccgccccccaggttcaagcaattatctacctcagcctcccaagtagctaggattacaggtgcctgtgaccacacccggttaatttttctatttttagtagagatggggtttcaccatcttggccaggctggtcttgaactcctggaaaggtctttatttttaatatcctggatgctaattcttacttgtatatatgcaattatttttttctagtttataacttccttttctttttgttgttatacaaaatatttaatatgatttttaattttaatgtgagatttgtaatcttttcctctgtgctttttattcttttgcatgaaaaatccttccatatcccattatcataaaaatattctcttctcatctagtagttttgtggtttgttttttacccttatgtctttcatccactttgaattattttaatggtctgacatagggattcaatttttttttcttaagggaaaatattctaacactatttattgactatattatttccccagtaattttgtagtgctacctctgtgtagtattatactcagttttcttgatccgaattgttttggaaataggtaatccattgcctgtggcttaaagttttaaaaatgttcattaaacttaatggcgtttgttataggtttgtttttttttaaggagtcataagtgtaccactatggttttttaaaaatttattttcctgttttcattttctttataggaaattcaagaagtgaaaactcctgaagaactagagacctttatgcttaaacatggagaaaatattattgatactttaggagctgaagtagatagacttgagaaggaactgaaagtaagatgtattcataaaaataacataatgataatggcagctatttttttgagtacttactctacagcagacactaagtgcatccatcacatgcatgctttaacccactcataactccacagtgtgtaggtatttataagcaagaaaatgactgggttagataagttgaataatttacccaaggaaatagggaaattgtgatttgaaccagattctttacttttaaacactattttatgcagcctgcttagtttctaaaatagtcaaagggggtttttttgtttgttaataaataagcattttgaaagttcctagagaaagatgaaaaggaaactttagactgtggtcaaaagttagaaaaaatagaatgtatatcttgcttttagcccatttgaaattattttctgtttttgtttgtttctattcagttggatgttattgtaatttattgattatgttactgaaatattacctgatcctgatcaggttgtcttttaaaatgtctcagtgttctcaaattgccatttattgacatttgaattctgtttgcaatgaataaaaacttgtaaatgatctttaatgtatataatttgttgaaggcagtgctttttctgcagttgatattgaccattctttaattttgtaaaaaattgaagaaaaaaacttccatctctacttttcaagttttcctttgagaatctggatatccgattagattaatacaagtacttcaaataagattttgttaatattatagttcatgagctttatctgacataatttttgaattttctagatgatattttggtcttaagacgctttcattcttaaaaattattgcagacctcaaagagattttatttatttgagttatagttattgatatttaccaaatcatgcatgaaagtagataaattttaaaatatttatcatttacttttaaaaacatacacctatttaatataaataactttttttttttttttaactaagaatctcactctgttgcctaggctggagtgcagtggcacgatctgggctcactgtaacctccgtctcctgggttcaagcagttctcctgcctctgcctcctgagtagctgggactacaggtgcctgccaccatgcccagctaatttttgtatttttagcagagatgaggtttcaccatgttggccaggctggtctcgaactcctgacctcaagtgatctgcctgccttggcctcccaaagtgctgtgaagtgctgggattacaggagtgagccaccccacccagtcacatttttttttttttttaactgagacggagtctcgcactgtcacccgtgctggagtgcagtggcacgatctcagctcaccgcagcctccgccttccaggttcaagggattctcctgcctcagcctcccaagtagctgggataacaggcacccaccaccacgcctggctaatttttgttttgttttgtacttttagtagagacagggtttcactatgttggccaggctggtcttgaactcctgaccttgtgatgtgcccacctcagcctcccaaagtgctgggattacaagcgtgagccaccatgccaagcccacatttttatataaatagttatattttccaaaatgaaaaaacgtagttagaagagtgatatttcacatttttgcaaaagtctcttatgcctggcttagtagaagacagctacattcccatatctgcttctgccttcagttgtagtgatttgattgtttggccgaagaacatgaaggaaagggagaactgttcctatagccttttgagataattgtgatactctcttttggtgttataacagctggtagaaaccaaatcaatgaatgaacttctcatatgctacttgtgaaggtagggggcacagtctacaagactgtccttccttctaataccaactgtgagttcaggaggttccctagagcaccttcagatttaataactcactaggactcttagaactcaccgaatcatgttatacccatcatggtttggtttattacagggaaaggatactgcttgaaatcagccaagggcagaagaagtgcatagggcagggtccaggaaagttccaaacatgaagtttcagttgtcttttctctgtaatgcatagtattactctcctggcaatgaagtgtgacagtagcatgacgtgttgccaaccgggaagctcatctgagacttgatgaccagagattttattgaggctccatagttgactgcataagtagctgaccttttgtctctagcccttctagaggtagagcagatactgtgtggccaaaggcccccatcatatatcacattctaaagttaatgcccccagataaacaaagacactcttaggcaggacatgtcaagggcctagaaattccctcccggttatggagaacaaaagccaaacctccctttgggtaagattaattctctactatacactgttatattaaaatctgttggtctatttttatactctgaatgaatcttttacccatgcatgattctataacattatgaattagtattttggaaaatactggttcacagaagtacttagatctttcagatgttgatacatttctaaatatgggtacactctcaggctgatggggtggatatgtttttcaacttaaatttccacttaaaagcttgcattttatcattagcaacaaatactgttgttttccttgaaataagactcattttgttcattttttaggagatgcctgccaaatacccaaatttgaataaaccgagtttgttaatctttcaaataaaaatgtactctagattaaaaagcagtttattcagctcacaacttaagcaatcaaagaagtacttttacgtactttccattttgtcacagtatttttaaaagtgaactcaagggtttaggtttaataaaatggatatatttgctatttcatgaaagacttttttaaatgaaactggctttttttttaatgtcaagtgtgggacagtagagacaatgactactggtattgtttgatgccatttgtgttgaattgtgcaaaggtgcaagcagttttacccaccattgtttttatgccatcaggaaatgtcagcatagtaaaaaaagcaaagaatgtcttacagttactgtgaaaatagttgtgaccttagagtccccctaaaaaggtctcaggaccccagcagtccttgaaccgcactttgcaaacaactaatctgtataaaatgtgagacaatggttatttttgtgcaaggtagcacaagattgaataaactttgctctttattctacttgtttttattttgctggcaaggaaaataatggactaaatatttgctttacattttagtagatacaagaaatcagaagccagatttaagaataatcaccaaattggtccttgtcacctacatttactcttacaacaatcagaccttattgtttttgtttagctaactttgtactttaactagaggctattaaatcattaataatgtttttgaattatgtaagtctttcaaaccaggaaggtaagtataatccatacattcaggtggaaacgtctttggctaagataataaagcatggccgggcgcgtgcggttgctcatgcctgtaatcccagcactttgggaggccgaggcgggtggatcacgaggtcaggagatcgagaccatcctggctaaaatgacgaaaccccgtctctactaaaaatacaaaatattagccgggcgtggtggcaggcacctgtagtctcagctactccggaggctgaggcaggagaatggcatgaacccaggaggcagagcttgcagtgagccgagttcgagccactgcactccagcctgggtgacaaaccgagactccgtctcaaaaaaaaaaaaaataaataaataaaataaaataaagataataaagcataattaatcttaagtcaaaggacatgttcatagttgaggtgccaaaccaaaagggaatgcatgaatgtaattgtttttcttagtcatgaaaataaggtgatttccttttgaaaactaaaactttgttcactggcatattccttcatttttagtatctcagtttaaattgtaattattattggattattttgggaggtcacactcatttatataattctgtaccagtggagtcatctctgttgagtaatgccattgagtgttgaaatagattatatttttggcttaaaattccagaacttgtggctgggcgcagtggctcacgcctgtcatcccagcactttgggaggccaaggcgggtggatcacctgaggtcaggagttcaagaccagcctgaccaatatggtgaaaccccatctctactaaaaatagaaaaattagcttggtatggtggcgggcccttctagtcccagctacttaggagtctgagacaggagaattgcttgaacctgggaggtggaggttgcagtgagccgagattgtgccactgcacttcagcctgggtgacagagcaagactccatctcaaaaaaaaaaaaaaaaattctagaacttttgtatagttatctgtaaaggtgttaaaaataatagagactaattcatagattcccatattacaagataggaactacaaaattaatataaaatatatcttgttattattttgaagttctttgacctgttaaacattttttgtcttatctctgtatttcagagtatagataaacctttctcctatccctccattaagttttttgtttatgatgattaatggaaattagttcattgggaggctgctgtagcattcataaattccttataaataatggctgaattaaatgctctgttctttactttgcctttgtttctccagtttctcttaaagcattgtttttaatgaatctgcagcattgtaaaataaattatgtaatttgggctttaactctctgcaagtattggaataaaatcctcatggtgtgtaaaatagcctaatcggtattgagcaatgcaaggaatatagattttaaagtatttgttgaataagtgggtgaaaattttaaattggataccaattattgattttcagttctgttcaataaatattagtttctactatacacatgatatcttgttaagcagtaaacattgaattttaaggatattaatcatatttattcattcagcatatattgtgtgctttgtattgtgcacatatacttttacaaatttgattagtttactctgaaaacttgattttaaaaagcagagcaaatttttaggcttttttttaagataaagcttttattagtacacatttatttatatcatgctttttagacagaataatgtcaaacttaatgaacaggtaaatttttcaagtcatattaggataggtaagggttgattggagtaggaagatacaatttagtttcatttctgtttggagaatttttttttaattctatattgagtttaaggagttctagagacagggaatagttttaaataaggaaaaagttgggaacaaaagtgtgccctccttgttaaaaggtccctggtcattcccacattaggatctaagaggaaagtacccccaggcacacctgagcgacactagttataagaaaaatccctgtgtgcactcagtagagtgttcttgctggagcaaaactccaatattctgccagattttgtttttataactggatgcctttaatacaagtaatatgcacatggtcctaggatatttttaagctaggaatcctaactgaatcatttacaggaacttttctcccctttttatttttgcaatttttatcaataatgcacaaagtttataaagtcaaatagaactgaaaagattataacagaaataactatcactgcctcacctgcctcagtacttatattttaagagataaccatttttaatacttttagtatgtctttatttattgccatatttctgcataaaagtcttatactacttctcttgatttaacagtatttcctctacgataggtgtagatttagttcttttatacactactttctgtcctcccttctcacagtattaatatgttacattttattatatttgtaattccccttaagttgatttaggtgcccttcctttattttattttattttttatttttttatttttttgagatggagtcccgctctgtcgccaggctggagtgcagtggcacaatcccggctcactgcaacctctgcctcccgggttcaagcgattctcctgcctcagcctcccgagtagctaggattacaggcatgcgccactatgcccagctaatttttgtactttttaatagagatggggtttcatcatgttggccaggatggtcttgatctcttgaccttgtgatccgcccgcctcggcctcccagagtgctgggattacaggcgtgagccaccgcgcccggccaggtgcccttcctttgtgcactcacaggaaaaagaaacccaaaatctttactttgctctgtggtagccgagtgttgtaattgcctacttaatttacctatatcacctcactaccaaacgtaagtccactgaaggcaaatactgtttgttcccagctcattgtcatatacacttcaatgcctggcacagagtaggcatgtaatagtagacagtattggttgttattgaattgaagttccttaagctagcatataagatttttaacaacctgatttctgcctgtctttccagcctcattaccaaccctaccctttttgcagcttctgtgctagctataccatagtgccagtgcacactttgcaggctgtctgactttgctgatgttgtgttttctgtctagacactcttcattatctacctggaaggctcatcatatgcagacctaccttagatattatatcctcagtgaaattttctagatctcatgagcaaaatggctgtctcatttttgctcccagtgttattatttagtacagtgtaataggagcttgggatctggaatcaggcctggagtcaggcctggaatcaatcctggctccatcacttactagcagtgtgacttcagacaggttagttaatttcttcgtacttcagttttccctgatgtatgtataagatggaaatagtaattaggttatgaggcttttaaaacacacatacatgtgctcatgtaacacagtacttgatacatgagtgagtaagcaataaatgttaactttttattattagctctaatactttaacttgtagatgattactgctatgctggtctccctagctaaactgagtcactcagggtcaggaacagagtcttatttaataatcatagctctgttttctagcacagggcccggcccaagaatatatggattgttgctaaagtatataaaatgagtggttgtcaatttactctttttgattattattgttttgcagtgattttgttttcaccacacaaaaatgtgtatttccagtgcttcgcaatgcttggcatgtactagatccttaatgcacttttgtattaacaaacacatgaacaaacttaggaatgtgatactacttattgtactgtttatagtatgtctatttacctattgatcttactttttttcttatgcaactatttctctcattagtatgctatagtgaaatagtttgcaaatgttttcattggctctaatgaccaaaaggaataaaaagaaacaagattttattttgctacaaataatgtggtggtgatttttctttccagaaacgaaatcctgaagttcgacatgtagatttggagatactgtgagtttgatggaatgaatcacctgggtggggaccttggaaacaagtttgtccgtccactctacaaagtttcctcctctcctacactgaaagactcagtgccatgcagaagccttttttttaagatgaaggaaatattttatgtaaagagcaactcagcaggacacagaactaaaactactacttacatctaacagacacactacaagttgaatcaatttgaaaatcatgtttttatgcttccatagggaacattttggttatttaaattgttcataatgtcccatatttcacctgttcagtgtatactgtactttgcaatcatctttccttttttcacattggtaaaaataagtggcatccataggatcatgatttttaatttgttgcctctgaagatttcactccatcaagatctgccaatcttcaatattctggctaaatcttggtatgtggtttttaaacagtcactccgtttcaaagtctgtctttccttatagaatgtggaaattatttctccataccttgtgattttgacctgagtgctaagagaatcactctccttacctagttatctacaaatgttcattccagaaatgtttagttactgaattgaatgaagacatctcagtacactcttttaggtcatagtagttgccattttgtaaaatttcttttttcttctttgcttttttccccttatttggtttaatttttctaatgttaggagatatagtcctagatatttccatgggccagtgtgatgacttttttttaaatgaggttcagtaccataatgtttatttactggaagataatgcatttataagcattttaaaattctgtaaagtgggttagaaatatttataattttacaggcaggacagcatttgacttttatttaaaaggcggcactacttatgtaaatctgagctgtgggatatttcttgctttaagagagagacagaatctctcactgaaactcatggtcatgattttgtataatatagttcatactgtgtctgtgagtttcttcagttacaaatgggcatttagtatagttatattgactataacatgtaagtaaatagctttctactgaccctaagttatcaaggtggaaaaaaaacatgcaattcagtaattgaaaatgtggtgaaaagctgcagctgtcatcatcaaaacaactcataacatactttaaaatgttcaggtagcagtgagcattgttcatatgagaatggcggctgggtgatctctttgctgaattaatgagttcttaacatgtggacccaactgcctgtgtgagatctgtgtcttaaaacttactggaatggaaatctatgaattattgcaaattgtaatgctggaaacaaaaaataaatccttggttaaagggtttgtaatggtgatttttgacccagaaatctcatttactggaaaattgtgagactttacgttggtgtatttttcttttttttttttttactattacagagtattttgcatgctgtacattttaagtgaaataacattccagttttatttttaagatagaaaattgttatatatatatataatttgatactctattcttacagtttcaaattccttatcccttctttacaaaaaaaactttttttttacctgttatgatttattctatacttttttcttcttccttcccctttcccacttgccatttattacttcatgtcattgccatatgagaaagtaccaaattatatccagtttcctcctagtgatattactctgaaaaatttcacaaagccagacaagaataattactcattttttttcccaagacgaccctcaaagttaatgtgcagcaggtattccaaatggtaattttttttttttaggattccctaataaaaaaaaaaaaaattctgatatttctttttaaatctgattttggttgaggtcataccattcttaaataataattgaaggtttatgttgccatcttttctaattctgttttgcactgataaacttacataaagtttgtttatgtaaaataagacataaaggagtacaacatatcaaggaatttgagtatttatgtggaatcaggaaatttttctagagtcactgaattttcaaatcagagaatttgggctggatatggtggcttatgcctgtaatcccagcactttgggaggccgaggcaggaggattgcttgagctcaggaggtcaagaccagcctgggcaacacagcgagacctcatctctactaaaaaaagttagccgggtgtggtggtgctcacctgtgttagtccattctcacactgctataaagaaatacctgagactgagtaatcaaaaaaagagctttaattggctcatggttctgcagactgaacaggaaacatagcagcttctgcttctggggaggcctcgggaaacttcattcatggcagaatacgaaggggaagcagtcatagccagaggaagagcaagaggcggggattgggggtaggtgccacactcttgtaaacaaccagatctcatgagaactcactatacagtaccaagaggggaaggtgctaaagtattcatgagaactccacccccgtgatccagtcatctcccaccaggccctacctccaacatgggattacaattcgacatgagatttggtggggacaaagatccaaagcatatcagcatctgtagtcacagctacttgggaggccgaggtgggaggatcacttgagccccagaggtcgaggctgcaatgagctatgatcatgccactccagcctgaatgacagagtgagatcctgtctcaaaaagagaatttgggtctctttctccaaaaataaggctatatttagtttttcaggtttcttgttattttaccaaattaatgtttcttactttgtatctactttggcatatagcatttgagtattaaagcatataaatcatttttaaggaaaatattctctgcaggagaataattacaaaaataatactggacagaggaggggcagtcaagggtccatgattgattccttcttgcccaaaactaaaatctaggatttatcaaaggtgaggtatacagtggtccctgacttataatggttgcacttaagaatttttatgatgggtttattggcacataacccaataataagtaaaaagcatctgtacctacttttagctttggctgagaatggatctctaattcactgtaagtagcagtccccaaactatataaggtggcacagttttcatcatggcagtgggaggatgaggggtggagtgtttttgttttttttgtttttttttgagacagagtttcgttcttgttgcccaggctggagtgcactggcacaattgcagctcaccgcaaccttcacctcccgattcaagtgattctcctgcctcctgagtagctgggattacaggcatgcgccaccacacccggctaattttgtatttctggtttagacaaggtttctccatgttggtcaggctggtcttgaactgccgacctcaggtgatccgccctcctcggcttcccaaagtgctgggattacaggtgtgagccactgctccggtgatctgtttttaagtggagtatcctgggggcctatagtatccaactccaaagaggtaagttcctgaacatacactaaagaacctgtgagataagatcagacggaaaaattttcaaattttttcaaaagcaaaggtaatccctgcatacatcctcctacacacacacacatagtgcaaagtgaataacaaaatgtcataaggcttgagtttttggtatatggctttcagtgttaccttatctcataatttaggtaatgatttttgctaaaatgataaccatctaaagagtgcctaagttttaagtctcgtaactttttgaggaagaatgctgggaactacagaaaactgcataggcatttagaatttgtattatcttcttagactgcatttgtcaagctttggcagcatttcttttaaatgtgatgaaccccaatttgccaaactgtcagaagtcagtgaagcaaagaatcgaaggtaaaatgttgattcaaagattgtctcccctaaatccttcatttctttctctgaaatggaactttggaagccatttatatagattagtctgacagcctttatatttgcatgtaagtttacttgcatccttagacttggctttatgcaaaaagaaaatttttattcgttatattgtatttcatctgtctgatttccctggcacattaagatggtcctggtccctcaggatactttttcccttaataaatgtcatatgtaaataaaggcaactca

SEQ ID NO: 1267 - DNA, 4559 bp, Homo sapiens
aggggcggagctgctttgcggccggccgcggagcagtcagccgactacagagaagggtaatcgggtgtccccggcgccgcccggggccctgagggctggctagggtccaggccgggggggacgggacagacgaaccagccccgtgtaggaagcgcgacaatgccccgctacggagcgtcactccgccagagctgccccaggtccggccgggagcagggacaagacgggaccgccggagcccccggactcctttggatgggcctggtgctggcgctggcgctggcgctggcgctggcgctggctctgtctgactctcgggttctctgggctccggcagaggctcaccctctttctccccaaggccatcctgccaggttacatcgcatagtgccccggctccgagatgtctttgggtgggggaacctcacctgcccaatctgcaaaggtctattcaccgccatcaacctcgggctgaaggtgagcactgaaggggctgcagtggaggaggccgaaaggagtgctggggctgggggctggggctgatgctggtgcgctgggctcagaatgcatccctgatggagagggtggcatctacaatccatcactgagtttgctcccctttggggacacccatggctacatgccaccatcaccccattgtgacctttgtgaagtaagaaaataatgcagacagtgcctgaggaagtcagcttgccaagcaaaggcctcatgccacaggccgctgagctaaagaagaagcgatggcctggtgctgcctgagttacagggcaatatctggaaggcaaaggtgtgcactgagcttggtgcactgagtcctgcccagccccagtttggaaatggaggcccaaggggtggtggccaggggttggcctggttcctctgctctgcctctgatttctcaccatgcgctcctcccactgcagaaggaacccaatgtggctcgcgtgggctccgtggccatcaagctgtgcaatctgctgaagatagcaccacctgccgtgtgccaatccattgtccacctctttgaggatgacatggtggaggtgtggagacgctcagtgctgagcccatctgaggcctgtggcctgctcctgggctccacctgtgggcactgggacattttctcatcttggaacatctctttgcctactgtgccgaagccgccccccaaaccccctagccccccagccccaggtgcccctgtcagccgcatcctcttcctcactgacctgcactgggatcatgactacctggagggcacggaccctgactgtgcagacccactgtgctgccgccggggttctggcctgccgcccgcatcccggccaggtgccggatactggggcgaatacagcaagtgtgacctgcccctgaggaccctggagagcctgttgagtgggctgggcccagccggcccttttgatatggtgtactggacaggagacatccccgcacatgatgtctggcaccagactcgtcaggaccaactgcgggccctgaccaccgtcacagcacttgtgaggaagttcctggggccagtgccagtgtaccctgctgtgggtaaccatgaaagcacacctgtcaatagcttccctccccccttcattgagggcaaccactcctcccgctggctctatgaagcgatggccaaggcttgggagccctggctgcctgccgaagccctgcgcaccctcaggtacttatcgtccgtggaaacccaggaagggaaaagaaaggtgaatgaaagtgaagggagaagggaacctggggcattgtctctgattgctctagcatgagtccttagtgctcttcatttggctcccctaatctgactcctccttccctttctactgttttgccgcaccaggctttttttttttttttttttttagtttagtttttgtagagacaagatcttgctatgttgcccaggctggtctcaaacacctaacctcaagcaatcctcccgcctcggcctcccaaaatgctgggaccacaggcatcagctactgctcctggccctccctttttttttttttttttttttttttttttgagatggaatcttgctctgttgcccaggctggagtgcagtggcaccatctcagctcactacagcctccacctcctgggttcaagcaattctgcctcagcctcccaagtacctgggactacaggtgcacgccaccacacccagctaatttttgtatttttagtagagatggggtttcaccatgttggccaagatggtcttgatctcctgacctcatgatctgcccacctcggcctcccaaagtgctgggattacaggcatgaaccactgcacccagctttccagccctccctttctactcttatctccagccaccctccttcaaaggtctggcagcataacctctctatgccccagctgtgtctttgctcatgttggccctctggaaatgatttcccccttttttttaagtgctccagtttttcccaccttatccatcccatgtcatcttccctctgtgtggtccttgcttcccattctagctaactcttatccctcccccatactcctggagccctctgccctcagagtcttttgtgtcacacagacccaataattagaactgtttggtctctggctagactgtgagctccttgcaggtggggaagatgtcatgtatgcttttaccctccacccaaatgcccagcacaggaggaccaggattggaacaagtgttgacctctcatgtttactttgtttcagaattggggggttctatgctctttccccataccccggtctccgcctcatctctctcaatatgaatttttgttcccgtgagaacttctggctcttgatcaactccacggatcccgcaggacagctccagtggctggtgggggagcttcaggctgctgaggatcgaggagacaaagtgagggccagtagtgggaacacggtggtgctgggggacaagcaggctcctgttgagctggagcacctctgggcacagaagttttattttcctggcattcccaacaagtgttccctggggattcagctcatggtcactgttgaaagccttcattcagtccccctttctctagccagggctgcctggacccctggatgccctgattaccatccttaattctccctactaggtgcatataattggccacattcccccagggcactgtctgaagagctggagctggaattattaccgaattgtagccaggtaggacggagatgagggtgggaatagggacagggtgagtgtctgaaggctgaaaattcccttgagcatctcaccatccctgttgtcccatggagtggggaggctcctcactagaacaggttggagaaagagggcatcctatctccccagatgtcttcctacccctccctagaatcttctgaatgtagtaccttctggccaggtatgagaacaccctggctgctcagttctttggccacactcatgtggatgaatttgaggtcttctatgatgaagagactctgagccggccgctggctgtagccttcctggcacccagtgcaactacctacatcggccttaatcctggtgagtgaggcagaagggagcctcccttatcctggagttggtgggataggggaaggaggttggagccagagcctgcaaagcatgggcaggatgtgtggcccctccctggagttacccttgctccttgcccctccagtcagccccacatccttgcaggttaccgtgtgtaccaaatagatggaaactactccgggagctctcacgtggtcctggaccatgagacctacatcctgaatctgacccaggcaaacataccgggagccataccgcactggcagcttctctacagggctcgagaaacctatgggctgcccaacacactgcctaccgcctggcacaacctggtatatcgcatgcggggcgacatgcaacttttccagaccttctggtttctctaccataagggccacccaccctcggagccctgtggcacgccctgccgtctggctactctttgtgcccagctctctgcccgtgctgacagccctgctctgtgccgccacctgatgccagatgggagcctcccagaggcccagagcctgtggccaaggccactgttttgctagggccccagggcccacatttgggaaagttcttgatgtaggaaagggtgaaaaagcccaaatgctgctgtggttcaaccaggcaagatcatccggtgaaagaaccagtccctgggccccaaggatgccggggaaacaggaccttctcctttcctggagctggtttagctggatatgggagggggtttggctgcctgtgcccaggagctagactgccttgaggctgctgtcctttcacagccatggagtagaggcctaagttgacactgccctgggcagacaagacaggagctgtcgccccaggcctgtgctgcccagccaggaaccctgtactgctgctgcgacctgatgctgccagtctgttaaaataaagataagagacttggactccaga

SEQ ID NO: 1268 - DNA, 40653 bp, Homo sapiens
agctgtggggtctgtaacaacatggcagctcccatgagaacggcatggttggagtcagaagaggaagaagcagaactgggcaggtgagctgggaagagaataccatagatgtccactatggagatgataaatgccctaatagatgcgcacaaaaaatgtcatgggcatttaggggatgaagacacaatttctagctgtgcaactgtggtgatcagtcagagcttcttggaagaggtggcattcgagctgggtcttgaagccgagaatcatctggaacgtacagagattctaaatgccacctcacattagaaaagaaagatgatccctggtaatggagaagatagcatccgaaagaattaaatatgaatgtctcactttgtcaagatttcataggttttttatttttacagatggtgtgtctcgctctccctcccagactggagtgcagtgcgatcatagctcattgcagccttgaactcctgggctcaagcggccctccagccccagcctccagagtagctgggactacaggtgcacaccaccacacctagctatagttttcaaaatttagatataattcatatataaattatattttatagttattttggtgtttaattttgaaataattttagacttacagaaacgttgcaaaaatagttcagagttatcctaaactcttcatttcctacaccttcacctagctttccctgataggaacatcttacctcaccttagtacaattatcagaaccaggaaattaacactggtacagtaacctacataccttatttgaattttagctgttttccttttgatctaatccaaggtccaacattgcatttagttgtaatgtcttcttagtcttctctaatctatgacagctcctcagcctctcgctttttttctcaaatgaccctgacacgtactgttcagtcattttatagaatatccctcaatttgaatgtctgattttttttttggtgattagattgagcttatgcacttttggcaagaatatcacagaagtaacgttatgcccttcttagtgcatcagatcaggggctactttctgttgatatgacttattactgggcatgttaacactgatcatgtggttaaagaggttatctgctgggtttctcttttataattttataataagtgtccttttgtaattagtaattatcttgtggggagataataagaccatgcaaaaatgtaaatttcttgacatttacggtatgtttgtttgtttttttgaaatgaaatctccttctgtcacccagggtggagtgcagtggtgccatttcggctcactgcaacctctgcctcttgggttcaagcgattctcctgcctcagccttccgagtagctgggattacaggggcccaccaccatgcctggctaatttttgtattttttagtagagacgtggtttcaccatgttggccaggctggtctcaaactcctgacctcaggtgattcgcccacctcggcctcccaaagtgttgggattacagacgtgagccaccgcgcctggcctacatttttttttttaagtgctgtcaaatgcatgccgtctacttttcttcagtaaatgtcaactctttacccattatgtgccagtccctgtggggtgtgccaagcagaaaaagcactgatctaagatgtgtggctcagttatgtgtagatccatgaccttgctgggctttaggatccttatctataaaatggatatcattatatcttaccagtaagaactgctgaggataaaggcagaccgtacttgtgaacgtgttctgtaatacaaactagggttgttcattctccttctgcagtgctcagctctggcctctcctctcctgtttgcatttcccttttccttcctgcctgtgttcaggcctgcagacttctgtctgtcctccctggtctaactcccttatcctacttgccaagccttactgtgatgtcatttaataaattttggagacacaaggagcgcctcatagagatggacaatttccttcagtagtctcctgctgtttttagagttgcctccaggtgcctgggcctgtgggtgttgggcaggagaaccttcctcctatggcagaaataagtgggagaagtagggattgccttcctccaataataatgctttggccctaaaaaggaaactcttgaaccccatagaatattttattttattttattttatttttgagacagagtctcgctctgtcgcccaggctggagtacagttgcacgatcttggctcacgcaacctctacctcccagattcaagcaattcttgtgcctcagcctcccaagtagctgggactacagtgatgcaccaccacgcctggctaatttttgtatctttagtagagatggggtttcactgtgttaccatgctggtgtcgaactcctggcttcaagtgatccgccctccttggcctcccaaagtgctgggattacaggcgtgagccaccgtgcccagccaaaccccatagaatattgaagaagcccaaatggatacttgtgtcttactgagtggacacactttaaagttacttcaaaacatgaaaggatgacttactccatatcaaacctcctaattaatccaacagtaattttttttattttgttttattttattttattttttgagacagggtctcactctgttgcccaggctggagtgcagtggcacaatcacagctcactgcagcctcaaccttttaggctcaagtgatcctcccaactcagtttcctgagtagctgggactgcaggtgtacgccaccatgcctggctaacttttgtatttttttgtaaagacagagttttgccatgttgccgaggccgctctcgaactcctaagctcaagcaatccacccacctcgtcctgccaaagagctgggattacaggtgtgagccaccacacctggcctgcaattttaatctaaggcaggatttacttatttatttagagacagagtctgtctctgttgcccaggctggagtgcagtggtgtgatcatgactcactgcaagcttaaactcctgggctaaaacaatcttcctacttcagcctcttgagtagctgggactacaggcacacaccaccatgaccagaaaggttttttttttttttgacacggagtcttgctctgtcgccaggctggagtgcagtggcatgatcttggctcgctgcaatctccgcctcccaggttcaagcaattctcctgcctcagcctcctgagtagctgggactacaggtgcgtgccaccacacccagctaacttttgtatttttagtagagatggggtttcaccatgttggccaggatgatcttgatctcttgacctcgtgatcctcccccttaggcctcccaaagtgctgggattacaggcataagccaccacgcccggcgcacctgcttcttcttcttttttttttttttttttttgagacgagtccccctctgttgcccaggctggagtgcagtggcacgatcttggctcactgcaagctctgcctcccgggttcacgccattctcctgcctcagcctcctgagtagctgggactacaggcgcctgccaccatgcccagttaattttttttttgtatttttagtagagacagggtttcaccatgttagccgggatggtctcgatctcctgaccttgtgatccgcctgcctcagcctcctgaagtgctgggattacagtcatgagccaccgcgcctggcccacacctgcttcttaaaggaccaagtcctggctgggctcggtggctcatgcctataatcccagcactttgggaggccaaggtgggcagatcccttgagtccaagagttcaagaccagcctgggcatagcgaaatctcatctctacaaaccattaaaaaatgttttggctgggcacagtggctcacatttgtaatcccagcagtttgggaggccgaggcgggtggatcacctgaagtcaggagtttgagaccaacgggccaatatggtgaaaccccatctctactaaaaatccaaaatttagccgggcgtggtggtggacacctgtaatcccagctactcgggaggctgaggaaggagaatcacttgaacctgggaggcggagattgcagtcagccaagaccgcgccattgcactctagcctgggtgacaagagtgaaactccatctcaaaaaaaaaaaaatgttttaaagggaccaagtccttttaggggagcttctgatcatttgaatctccaataacagaagaggttttcaaatgttaccccggggattcctcattgcctgctcccagtattttccaagaaagacctgaggctcctttctgagcttcattcccttgttctcctcccagcccctcagctgtcttttgtaccaattaggtagttattaattgctccctaattgcaaattggctgcctccttactggctcccacccatgctggctggctgaccaaggggtcacatgcatccttcagggaaaggtgttttgtgaatccagtggttcatttgttccacacgtgtgttgagccccttcgttgacgccagatcctttctaggtcctggggaccgtgttgagcgagacaaacccaagtccctggcttctcagagctcacagtctagcaggagacaaacaacaaaaaaattaatcatttccgatcgtcagtgctgtgatggggagtaattacagtacagagtaattttggggagcttcagatacgtgctctgggaagacctttctaaggaggtgatgtgtgagttaagatctgaatggtaatctggagccagccagagtgaagatgtggttgaagagcacagtcccaggggagaagaaagcaaaggcagaggccaggggagagaaagcagcatggcctctctcaggggcattcatcttatctatgaagccctaagcgattcagaagtcaaacatcaggttggggctagttgtaaggtttagggcaaaacacccctcctactccctgttgttagaagaccggaggcggggtttgcccccacctggccccgctccagaaggaggggttattatacgtctgattgaatcaacttccaggatccttattggtccttggtggtaactagggcgctctcttccaggatccttattggtccttggtggtaattaggccactctcgcttcaaagtcccaaattcaggcgccccgctggggactagagcgaccgttccccacctcacccaccccaagctcagaggttggagagaactgcctccccaaaggaacccagacccaggcttgagactttgcaaagagacacaagatggggattgccatgtgaagtttccagattttttaaaatgttagaacgatgaattcgaaaagctttaaaacactgcacaggccaaacaacaagtctatgggcaagacctggccagctggcctgggtgcggtggggcttggtgaacgcctagaggtagggacgagggagagaaggagtcaggaaggatgctaactgcatcctggattctgggacacccatgccctggcagagatgtgccctaagaggaacgaactcacggccacaggcacagattgagcacctaactgtgtgcatggctctgtgctaggatgggggacacaaaacacttcataggactgcaccctcgctcagggctgggtgggccgacctcaggaaacctgggttccagccctgacttgctctcctataattgctgtgtgaacttgggttgattcatcatctctctgggattcagcacacagcctttgttgacattagattaactaaatccagtaagggaagattttgaagggcctctgggtgtctggatagggaatctgggctgggtctaataggaagtaggaaccaccccaggttcttgagcaggggagtgacatgttgaagaggaaagtgaagcaggccacctgtgcagagacacacatcatccaggtgtggggtagtgaggacagcaactgaagcgtatgcaaatcagatctgatcacctctagctcaaaaaccttccatggctccctgcagccctcacatgaaagtcctttcctcttactatgggccatgggcagggccagcttcacgtaatgaagggtcggtgtaatgctctgctgtcactatcttgaaatacttcagaatttttgaacaaggagctccgttttctcattttgcaccaggccctgcaaattgtgaaggttcccacaggggcctttcagtctgggcctttcccctctccccatccaaaccccacttctcccttacccttcatacttcactcacgttggtcttccatcagtttctggagattgttcctgcctcgggacatttgcgtagtctgttccccttgcctggaacacccccacccccacgtcgagaccaacttagttttttgttcaacaatttcttatcttccagacttgagcataattatctcctgagagataactcctctgacctcccagaactacctgttcaaaacaaaactttaaaaattatttaagccagccgggcacgatggctcatgcctgtaatcccagcactttgggaggcccaggtgggtggatcacttgaggtcaggggttcaagaccagcctggccaacatcttgaaaccccgtctctactaaaaatacaaaaattaaccgggtgtggtggcaggagcctgtaatcccagctacttgggaggctgaggcaggaggattgcttgaacccgggaagcagaggttgcagtgagctgagatcacgccattgcactccagcctgggtgacagagtgaaactctgtctcaaaaaaaaaaaaaaaaaagaaaagaaaacgatttaagcctgagtgcagtggctcactcctgtaatcccaatactttgggaggcaaggcaggagtattgctgaggccaggaattccagaccagtctgggcaacacagcaagatcccatctgtacaaaaaataagaaaattagccagacatggtggtgtgtgcctgtagtcccagctactttggtggctgaggcaggaggattgcttgcgcccaggagttcaaggcttcagtgagccatgattgcgccactgcactcctacctgtgcaacagagctacaccctgtctcaaaaaaaaaaaaaaaagcaataatggaggcatttcaggcatgtgtcagcagccataggtgttcaggggctttgtgcttatgaaggtttgttcagtaacaaatattcagctggagcgggcatcatggctcacacctgtaatcctagcacttcgggaggctgaggcaggaggattgcttgagcccaggagtttgagaccagctgggcaacaaagtgagacctgatctctacaaaaaataaaatacataaaattagttgggcatagtggcatgcaccggctgaggtgggaggatcgcttgagcccaggaggtcgaggctgcagtgagctgcgatcacgccattgcactccagcctgagagacagagtgagaccctgtctcaaaaaattaaaaacttaattaattaaaaaaaattcaactggggaaatagttctagctctctctttctctctctctctctcttttttttttttttttggaggcagagtttcactctgatacccaatctggagtgcagtggcatgatctcggctcactgcaacctccaccttccaggctcaagggattctcccacctcagcctcccaagtggctgggactataggtgcatgccaccacacccagctcatttttgtattttttgtagagatggggttttgccatgttgcccaggctggtctcgaactcctggactcaagcgatcctcccacctcagccccccaaagtgctgggattacaggcataagccaccacacttagccatattgccatctcttaatgaagtaaataaaaccatttacaccacaagagatagagggaagggataggatttgtccaaaacataataaatccccttggccaaattcatggaccctggcagggtaagatcagagatagcatcatttctgcctatgtggctgacattcattatgtaagtcccatgtaccaggatccccatcccatgcaagctccgtgaatgatcactcccaaccttataaggttggaagtattagctccccattttgtggatgaggaaactgaggcctagagaaattaagtaacttgccaaatgtcacacagtaaagaattgacagagttgggattcgcacctagatctgtccaactccagatctccctgagcccttcactactgcaaaatagctactcaactggcttgctgtatgatttggggcaagttcctcaacctttctgagtctcagattctttttttctttttctttttttgagatggaatttccctcttgtcacccaggctggagggcaatgcacgatctcagttcactgcaacgtccgccttccgggttcaaaccattttcctgcctcagcctcccaagtagctgggattacaggtgcccgccaccacgcctggctaatttttgtatttttagtacagacagggtttcaccatcttggccaggctagtctcgaactcctgacctctggtgatctgcccgcctcagccccccagagtgctgggattacaggcatgagccactgtgcccagcctctttttcttttttttaagacaaggtcttactctgtcacccaggctggaatgcagtgggcaatctctgcttactgcagcctcaacctcctaggctcaagtgatcctcccacttcagcctcccaagtagccgggactacaggcgtgcggcaccaggaccagttaagctgagcctcaaattctttacctataacttgtcccttatttaagctaacacatggtaggtgctgaagttgattctctctctctctctttttttttttttttttttttgagacagggtcttgctctgtcacccaggctagagtgcaatggcatgatctcggttcagtgtagcctcaacctcctgagctcaagcgatcctcctgcctcagcttcccagagtagtgggattacaggcatgcaccactgttgattctttatagatgttaattctctgcttaacacacatgcccctccaactcccaccacacatacagacacagacacacatacacacgcacgcacgcatgcacgcatgcacgccagccccacaacaggaggaatgtaacggaagcaatgctttgtgttctgtaacctgtttccttttcctggacacacaggaaggtcatgttctcatttttcctgcagttagtagagtcacgtgactacataaaggccagtgaaattatacgtgacccctgcgcaaaggcagttaagtgtggatgtgcctcctttgattttctgattccctttccacatgcagaggattcaggaatagattccagggaaagcctggggtggaggcaggattcgggggcaaggtcactgcttggaaaagagctccctgggagagccccaacctgtatcagactttgcaggggtgagaaataaactctgattgggttaaaccactgagatatttggtttgttacagcagtcagcattaattacactgaataaaacagtgtatcagttatcaattgccacaacaatgctacataacaaaccaccccaaaacttagtgccttaaaacagcaaccgtttttttagctcaagatttcatggattggcactttagcctgggctcagctaaagatttttctggtctcagttgggcttactcatgtatctgtggtcagctattggattagctggtgactgactaggacagcttcagctaggataactagtccctgttccagtggtctcttaggcaggatagcccaggcttgttcacataacagctgcgagagttccaagagaataagtggaatctcttaaggcccaatctcttaacacccaggcttcgaactggcaatgccacttccgtatattctattggccaaaaatagtcacatgcctgcctgggcatggtggctcacacctgtgtaattccagcactttgggaggctgaggtggacggattacttgaaaccaggagtttgagaccagcctggacaacatggggaaactccatctctataaaaattagtcaggtgtggtggtgagtgcctgtagtcccagctactcgggaggctgaggtgagaggatcacctgagcccagacaggtcaaggctgtagtgtgccatgatcgcaccactgcactccagcttgggtgacagagatcctgtcttaaaaaataaaaaagagctcagcctctagaatcacagccctgggcttaagtcctgactcacttgctattgattttgggcaaatgccttcccctccctgagactgacatttcccttctataaaacaggtgctggggctgggcatggtggctcacacctgtaatcccagcactttgggaggccaagaagggcggatcacctgaggtcaggagttcaagactagcctggacaacatggtgaaatcctgtctctactaaaaatatataacttagccaggcgtggtggtgcacaccagtaatcctagctactcactactcgggaggctgaggcaagagaatcgcttgaacccaggaagcggaggttgcagtgagctgagattgtgccattgcactccagcctgggtgacaagagtgaaactgtctcaaaaaacaacaaaaacaacaacaacaacaacaacaaaacacaggtgctggaagagaggagtcctaacgttgggggctattgtgagaattgactgagggaatgcaccgtggaaacgtgtgctgtaaattacctattttattacacccaaggtgggcttaatagctgtcagggagtgttagtattatctcaaccaaacccccaatttacagaggagaaaacaagagcctcaggcaggtgatgtgacttgccaaggctgcatagctagggagcagtgatgtccccaccgtactcaagtttgtctgtttccagaagctaaggtcttagcctctctacagttagaaagtcctaggtttgagtctcgactctgtccattatagctgtgtgaccttgggcaagtcacttttctctctgggcctcattttttttcttcgtctaaagaaattagcatctgtctcataatgccatggggaatcaatgggaaaatacaaagaaagtgcttagcagagtgccaaggagggacagtgtgcatgctcagcaattgaaggctgccaagttcctgttatcatcaggggcagtgttccatccatcaaaagggctaagaatagtcttagcccggccaggcgcggtgtaatcccagcattttgggagtccgaggcaggtggatcacctcagttcaggagttcaagaccagcctggccaacatgtcaaaaccccgtctctactgaaaatacaaaaattagccaggcgtggtgacgggcccttgtaatcccagctacttgggaggctgaggcaggagaatcacttgaagccgggaggcaggggttgcagtgagccaagattgcgccactgcactctagtctgggtgacagagcgagactctgtcttaaaaaaaaaaaaaaaaaggaatagtcttagccagtgggggtagggtgaggaataagtaagttactgtgggctaagctttagcccagtgcccagcacatattataaacttcataagcagttgctattttaaagggtttttgttttgttttgttttgtttttgtttttgtttttgagacaaggcctcgctctgtcgcccaggctggaatgcagtacttttaaagttctgaaccctgttggaggccaatatgagaccatgggggaccccaggccccaactggcagtggctccaggcactgcctccgtgccatttggctattattaggcccggcgtcctcatctcaaatccagatggggatcgagaagggcgggtagggcagggcctggctggcggaaggctgggaacacggcttggaggctgggtttgggtttgggccccaccctgcctgccttcccttgcttgcagctggtccagccgccacgtctacacttggctctgaggttgttgcagagcactccctcccaccgtggccgcctcctctgggaagatgcagagcccttctgcagcctcagcacttttctccctgccccagagaggccaggcctgcgtggaaactctgaattggacactgcgtgccttcagaaccggcaaaggagccatccaccccgctgtctacaggtcttcatgcctccagtgaggcttactggatctgctgagggggaagggcctatatacctgggttcaaatcccttcgctaccaccaacatgcagtgtcaacttggacaaatgacttcccctctctgagcctcagtttctttgcccataaaagggacagaacattagcatctgctttatagggctgtggtgatggttacatgagtgcatggtatgccataggcactcaatatgtgtcagttatttcatgcttaagtgtgccaggccctgaggaggaaacaaagttttgagaggttgagaatctgggatgcagaatggctctgctcctgatttgctacactacctgaagcctgtcccttgtcctctctgggactcagttacctatttgaaccataaggtgggtatctaggactctgtgatgccaagattcaggtgctatgttcagaagtagagagaagggtttgctgggatcccacactgacaggttggtaaaatattcattctcggactggactctggagccaaaataccctcagcccctgagctgctccagatactccctactctgccagtccagagctgaacctggaagaatctagacccttcttgttacagttttttgccctaggagggcctgaaggaggcgagtcaaaccccctcattttacagatgggcagactgaggcccaggtctccccagtgctcaggcgtcatccaagtggagcttccaaatggtggatggtagaatatggtgattaagaacaaatgttctggccgggcgcagtggctcacgcctgtaatcctagcactttggaaggtcaaggcaggcggatttcttgaacccaggagttcgagactagccccggcaacatagggagacccttgtctctacaaaaaataaaaaaattagccaggcatggtggcacgtgtctgtagtcccactgtgagcctgggaggtcaaggctgcagtgagccatggttgtgccactccactccagcctgggcgacagagtgagactctgtctcaaaaacaaaacaaaacaaaaaaaaaaacaacaaaagaacgagggttctgagcctgtctccttatctgtataatggtggtcctacctcacaggactcaagctgtgaaggtcatagtggtaacaaaattgccacacatgtagtataagcatgatcaggagccagtgtccaacccatcaggtagcaattacatagtgtcccaccatgagcctagacccccactccctgcgcccaggcatcagggactcccagaagtctaaagaggtccaggctggcacatccagaactctctccttcctgttccagccccttgcctctcctttgtctgtgaggctgggtctcctggaattcactgctgcccagtgggcatctgaggccccttctcctcctgcagggccagaagtttgcctggcactgttgcccagagaacacagcggctggatgacatcctggagatgatggccttgccaaactggtttcccagcaggtcctcagtcccactccgagggctgctggccatgacctaggacgcatccagttctgcacataaggaggaaggtcataccccttggatccagccaaccccaacaagaaccatccacctctaggggctccattctccagcctcacctgcctgtctgttgcccaacaaggtcgtcacaatcctacttccgttcctttgctaatgctgttcccgtctccagaatgacagtgctgtcctggggagagaggcttagagagcccaaggcacagctcctccattgtgcatatgagcaagttgaagctccaagagggccaacccttacctagggttggagccaggggtaagacacccatcacccttcttgcctcctgacccaaggcctgggctttctctgaaggaccctgactgggtggagggttagccagggtgacttagggatgcaacacagacagcttggtaaaatagtcattctcagacttgagctctggagcaaaatattacccctagcctctgagctgctccagccacttcccattctgcctttccagggttgaacctggaagaacctagagtagaccctttctgtgacagccccttgccctaggaaggcttgaagcagaccagtctaatcacctcattttacagggggcaggctgaggcccaggcctctctggtgcccacaagatacattcatcctgctcatctggcattcagaatccttggcaaagagaaccacccacatttcctgctccgcccacagcctatcctcctccttttcccagactattggtctttgctcacactgttcctctgccacaaatgccctttcatgcctttccccctcttctatgtgggatgaattttaaaaattagctgggcgtggtggtgtgtgcctgtagtcctagcctcttgggaggctgagatggaaggattgcttgagccaggagtttgaggccatggtaagctgtgatcatgcgactgcactccagcctgtgggacacagcaagaccctgtctccaaaaaaaataaaataaaataaaaacaagtgtgacacacagtttatacaccacttccctaagaagtcttccagagcttcccccatcctagtggcagcaaagtggagggaaggggcttcagcatcaggcagaattccactttagtctgaatgcctttactaggccaaggtgccttcacctccctgagcttcagcttcctctgtcgaatcagagtgtacctatcttgcacagtggtcacctggcagtagtgggagccccacgtctgacatgcaacaggtgttcagcaaatgctggggccctcgtcacgggatgtttactctttcctcggctgtagctgtaaacttccctagcactgtaccggactgccctttgatctctagatcacccccactcccttgcagagaggaagacagaggcaggcgggtatgtctggaggtggacccaggcactaagggcttgaaggggcaggacccacacatcccttccatagggccaagggctagtgagcgcatgtgccagacagtaaatccaagcatggaggaactcacctgtaccattcctcctagcctacagtagggcagggagaaaggagggcattagcacaaagcaggccattcattggagctggtgaccgccattcaggcaggccctgaaaatcagaggtggcctaggtgtgccctgcatgaaggggaggtcccaagggacgcgtgaattttgaagtattcagaattggtcttagagggcgcctgaccctcgttctggataataacatggcatctcgcccaggtagagaaagcctaggaccttgaaatatgtcctccgaagtgagctctgtttgcctctcctgctgtgtagcattgacaagtcgctttcttctgtgccttgattttcttttttctttttttgagacagaatcttgctctgtcgcttaggctggagtgcagtggcacaatctcggctcactgcaacctctgcctccaggttcaagtgattctactgcctcagcctcccaagtagctgggattacaggtgcatgccacttgcccgactaatttttgtatttttagtagagacggggtttttgccgtgttggccaggctggtctcgaactcctgaccttgggtgatccacctgccttggcatcccaaagtgctgggattacaggcatgagccaccgcacctggcccgtgccttggttttctgatgtgtaaaatgggaccacttctcaggggtgtggggatgaaatgaaatgacacatggaaaagactctcagtgtggagactgggcctttccttagatgggggctggggggtgtcacagaggacctgaaccggggctcttctgggttaacaggctgaaaccacctccccagaatcccacattatagtggttaaaagcagggtctggactcagaaggtgctgggtatgaatcacagctttactacttatcagctgttgtcctcatctgtaaaatggggcaatagtcatggtctcatgtgcttgttatgggcattatatgcctggtacatggcaagtacaaaataaatgatttgttattgtttttatttgacaggactccagaccccatcctcccaactccacccactttagtctccatggagacccaagggcggctttagggcctctggcactgaagatggaatagctttgccttgtggatctgacctcctgggtaccctggctgattccttgtttggtcttggacatgtcagctctctctgggcctcaatttcccccttttgctgaatgacagcctggactccatattccctatttaggactccagcgctcctaaaggcagactctcagggcttggaaggtagaagcatgctacaagaaggcaatgtctgttcaaaggtgtgtgggctgggggaggcgtgctgtgtgattgattctgctccacctgagatggtcccggcactccaacacagggtcaaggtgctgccagtcactcagtccctgctctgaggtggctcagaccaggtgtcccgaaagcagcctagggacggcggccaagcttaaacactgacgcgagaaaggggtggagtcgagggaggggacgtggtctcaggaacaaagaggagggcggagaggggctgtcctgaaggctctgagactcctacgaccccaggaaacttacctcggctcggggcgccccccccgacttggcgcagagcctgcgtccccctgccgatgcccacccgactcgctaaagccaccgaggcagacgaccccaagactcccaatttccgacctccctggcccgcgaggggcggggccttcctctcggggcgtggccgtcaaattgaattttcccaatggggcacgagagtgggaggtacccaatcgagggttggctggcgcgtcggggcagggcggggccagccgggctgctggcgcggctggacgggcagctctccgcagaatccaggggacggttgctgagcgggcctgggacagcgggtcgcggcacctccggcctgcgcgtgtctaatccgtctgtcgggtcccgaaagagctaagccgagcctgcgccggacgggtgggctggactgagaggtgggtgtgcggacctcgggggggatcctggtgctgccccaacgtgtccgggggtggaacccggatgtctagacaggagttctggaacgtccagacctgggagcccccacccatacgagaggtctaagccatgggataaagttatgagactgttgggggaagacgcccccggattcctaagagactccacgccccacaggggcgctagtctgtggcggcagaaaccctggggaagctgccacagaatcctgaggcccctcacaatgtccggcgaccccagactgtgtgacagggagattggagaagagcagcggcagggatcttcttataatcccatgggtgtcctagattaggcattagggtcagctgccccatagaagaacagacatggggggaatcagaatgtccgcagaacctaaggctggtgaccactggacagtcttgaagaggtttaacccagacagagtaactaggtaagaggcaaggatcctaacaggcagagattgggaggttgacacctctgagcctaccaggatgggagggggaacaagcagtgacttgaacaggctgggacccacacaccccaactgtgtggagcggtaaccctcaccccccacccatgcaccgtatggggtgacttcccaagtgactgttctgaagagagggaagggatgattgaaagatgaatcaacaggaggtggggggcaggcctggggccacacattagtcagtcaccatacattaactaagcatccacagtgtgccagaccagggcccctcaaattccagacagacattagttggggctacaggaggaaggagagatctgcgctgggaggctgggccaggatttaggggtccattttgatgggcagcactggggcaagatggggctcttgcctctgtcactgagagtgttccaggcccttgagggcactttggaagggagcttcggaagccggagatgacgaagattttgattacatccttctctgccctctaagtctttggcttcctccttgctcagtgacaaatccttggccctctccaatcttctcagtttgcctgaaatccaggggttgggcaggtcagcttctgaaagcccttccaggtggggaattgaattctgtatgaattggcaggaggtgctgggtgcctggacacctggcttcaggaggtctggacagcagagctggctccaagaatcggaagacacagtgtaccttcctatacctgggggaatgacagtggtggtggcagcaagaactacgggttcagcccacagccagaagctgagcctgcggagtgggtgggggctgggtaggccctgtggatgggtgggtggggcaggaaactggagactggagtgcaccccctggtggtaagcacagcttgggtgggtcttgccaggccctggcttctcaatccaggtccctgccctccctgttttgaggtttagacaggatgagagtccatcccaggccacacagcagactggcggccaagctggcagggctggaaccagagaccccctaccctgggtttggtgagttttccagcaaaccaccctagggcagagggcagcttccagccaggagccacattataggatgggacagtaatggacgctcctaggttagagagggaaagtaaggcacagagcctaagtgcctgtggtttctggaagccccagcatgcctgattcatgtctgtcccctgcagaattctctgagctggtgacaggtgccacaggcactggggatctcaccagaaaggaaccgacggagctaggggccagcgagatggcggacgaggccttagctgggctggatgagggagcccttcggaagctggtaagtggccccatcacccactgtggggacaggaaagccaagccagagaggcagggtcaatccagggtacctctcagctgacaggaagaagtgatgggggaaaggtcaggaggagggggacatgggaacaggggtaggccagttccatgtggctgatgcagaggcccttgtggcatgtgcctgtccatgcctggtactgaagcctagtccctcccaaccctccacagccaccacctgtttaaacagtaactgctgtagactcgcccgtatgcagccacaggtgtggggaggctggatatgcctctccagagcaatagctcgggcaatgcccacccctggaagctggcccagtgataatggtagcagcaatgattaataatgccaaggcctggcagggggcaggctgggtactgggtataccatgtcacagaataatcacagcagctctgaaagcctgggcactgcgactcaagagagttaaaatcacctgctcaaggacacccatctaagaaggagctgtgccaaaatcccaaccccatagtgggccacgggggaccagagtcctgggaaagtcaaggctggacgaggccataagagagagacaggttttgtgggcccttatggattctgtggcttctcatctcatttttctactcttgagtctcagttcctctacctgtaaaatgaagggagggagggagatgtgtttgcacacaagctctaggtcctagagttggcatggggacagaatgaggcatggacccagatctcaggtggaggaaagatgagcccactccatcccctttcttgttcctcttcctgagagccctgtctacctccatgcacagaggccgtagggcaacccagtggggcagggctccttccccaaccccaaaggccaggcagcctgacctggaggaggggccagaggagctccatctcctcagtccctgacccttgtccatgggggtaaattaaagatttactttacctagaagacaagtgacccaccccactctcataccttcccccgcaggcagaggctggaaccaaccagcgtagcccagccactgggcagtgcccagctgctgccatgacctccccaaggcactctgcctgtatgttctcggaccagcgcattagactctctgggtgtctgcctctccactatcaccgcaggatgtgtgcagcctggaggggatgaggttaggtttccaaaggtgcccgccagtcagttcgaccttccctcaggaagtccaagtcccagtgggggtcgtagaggcagcacagtccaaaaagagggaatgccaggcctggttcccgcacatcctcatctcaaggtatccacaggcaggctcagggttcttcagccgccacctccctctcttaagcgaggctcgggcggcgctggaaaagagttttggagagaagctggagcagtggttgaatctctgggaaaggacagatgagaacctgccccggtctcgggatcggtgcctctcgaagtctttccgaccccgggagcggctcctccagcacccggcgcccgccattactgcgccccgcgcgccggcccggcccccgctggcctcgtggcaagaacgggggcgtcccgagccgggctcctccccgcggggccgggccatataaggaaaagctaggcccgctccgcccgccctgcgccccagcgtctggccgatttggggacgcgggcagtcgcttccggccccggctcccgcacattcttgaggattgggccggggatgggaggaatggggacgcctggggacttgcacgccgcgtgcccctccaccacccgccgggacgccctctgcctcggtcccgagttcgagttcgacctccgccactcagctgggtgtcctggggaccttggtttcttccctttagatccggacactgaagcaggcggtagcgggtgtcttcctacctggctaccccttcggcgcctagcgcgaggcagggtgggcgaggcgagggcggcgccctgcgagggagggcggtcgcagaacctgcgggccttcagcgccccctggcgaggcttccctccaccgccggcgggacccccatgggcaaccgggggagctgggactgaaagcctggagagccccctccgttgtgctgttggggagactgaggcccagtgagacctcagggcctgccaggcgttcccaacagcgagggcagagagtacacggagagccggctccccagggggaggaagcaccctctttcctcccgggagaatttcactgggcagtttcggaaaccgccccatccccttccccttccccctcggtagacaatggcgctttgtacttccttccctccctcccacagctccctccttacacagcggtggggcctgggcgggtggaactcgggacacacagaggagacactgtggtccaacctttgcctccaggcccaaagggaagggtcgtgccagagggtgaccagtggaatgaggttgtcagtctccagccttgcccacccactttgggggatcagagggaggctcccattttccagatggggacactgaagctccgggggttgtgctgtagaggtggccaagttcctacatcaggcttttgtcagagacaaggaccccatctccgagcccagagcactgagaatggggacctaggagacaaaaggctagcccttgcccctctgggcctctttaccctctgtacagaaggggctggaccctctgtcccctccagcccccagcctccaaatgtaccacagaaggctctaggcctgagacacagccagcaccgggggctggggagtgagcctcattccccccgcctctgctataaggcctccttaggcctcagagcatctctagtccaggctagaggggtctccaacacagtgccaggatccctgaggtccccaccatgacacacagaccccagtagcagagctatcttcagcctagggcaggccctggagtcagagagacctgggttcaaatcctggctcaggtcatttgaccatgagcaaatcacatgtcctccctggacttcaatctcctcatctgtcaaatgggaataacagtagtatctagggtttttgtgggcttaggacaagtagggggctcagcacagggtttgactcacaggctctccataaatgttactgatgcctcggggtatcctgcccttcccatttgcccccttgtctctctccctcctcctgactggctagaaccaagtatgggggtgatgcttattgcaactgcagctatgtacaggagaggccaagtcactgttcccaaccccacccactggcaaatgaaaaaaccaagacacagagagtttaagggatatgctcttgatcacccagccaggattggactagggctggaaccaactaagggctctggcctgagtttcagggggtcttctcataattcctcaggaatgtggagcctggagggctcttcccccaagactctccctgctctcttcagactaggacaagctggctcatggctgagttgggccagcccacactccctgctgaaaactatctccatcccatccccacccttgccacctggccttcccgctaagcagaaaggaatgacgggggggcgctaaaaagggagatgatagagggttctttggccctacccctgaatgatttggggggtggggacagaggaaatcaccccgcctttactggctcccgtctggttatcagacccacactggaggcttatctctgccactatcttccaggggaaccctgggccagtcctctctcccttgagccacggaggatctgtatgtagcaggtggctctacatggtggaggtgtgggggaggcaacaggattggctgactcactccagagaaggtgttctttcctgaacctggttagaccagtcacccccaatttcccgggaactgaggggttgagaaccggtagaagcagctgtcacccagggatgccctctataaggccctggggtggcccctagtgccagccaccttatatgtctgggggattggtcctcccactctgcaccctggcttcttccatggtggctaggtccaggccagtgcagtggggacaatagccctcagccaggcaggactcctgagcacctgtcctcagtttccccatctgtggatgaagcagtcaacccccagctgggctgtggtgtttggtgactagaccagggagcctcccttgctcagagggtggacttcatctgtcacctttccctctagggaccctgttagtgacccacagggtggcctccctcctcctcctacaatagctccctgacttttggggatctgggctctgagaggcaggaatcgagttgtagaaaggagtgcctggcttggcacctggcacaagtgggcagtttctggctgtccactcacagttgtgtgctctgtgaaccacaatgcaaagtggactacccaagatccctgaaacagtgggctgggtctacccccgggaccctgcgtgggcaggcaggcacgtgaagagcttgggacacagggagtggacacaggccacacattgtgccctaggcagagccgtgggcagctggtgccagccctccgcccctggcagccaaaatgacctgcctctcgcacccactgcagctggaggtcacagcagatctggcagagcggcggcgcatccgctcagccatccgggaactgcagcggcaggagctggagcgcgaggaggaggccctggcatccaagcgtttccgtgccgagcggcaggacaacaaggagaactggctgcagtgagtagcggggggtggaacatgcgggtgagaaggtgagtgtgagccctggctcagctcatgtgtgcaggcaggcgtgagcacaagtgtatctgtggattgcatgtgctaatggcagtacgtccacacacgcttctggaaaaacagagatgtttgtgggcatggagcatgtactgattgtggcgtcgcggccgtgctgatgtagccagcacgtctgagtgtgtggtattagtgcccacgtccatgggcatatgtgtatcagtgtgcagttagagggtgtgcacagccacatgcccttctgccaaggttctgggtactctgttctggctcctacccttagcccacatcctccacgacctggccatggcagtggtggttacagtcatgatgtctctgcagctctcagcagcgggaagctgagcagcgggctgccctggcacggctggcagggcagctggagtccatgaacgatgtggaggaattgactgcactggtgaggcccaggctggggcaggggatgggggcagggcaggtgaagacctggactccacagcccaacacccgcgacctgtctcttacccacagttgcgaagcgctggtgagtatgaggagcgcaagctgatccgagctgccatccgccgtgtacgggctcaggagattgagggtatgtggcctgtcccggccccacccctgccctgctgtctgctgtccacagcacctccctgtcactcacctgccacttgctccttcccttccagctgccaccttggctgggaggttgtacagcgggcgtcccaacagtggctcaagagaggacagcaaggggctagcggcacacaggctggaacagtgtgaggtaaggagggtgggagagtggcccagtgtcctgtgcccatggataccggtagcacagagtgcctgagtgtctttgctaggctggtatttcactgtaaggggcccacccctgccatccagcctctatttagcagtcagagggatctcccagaaatgcaaatccggccctggcacctcccctgcttcaacccgtcccagggctgcccctcaccctccacacagcccacatctttaccttggcttatggggcctgcatgtcagaccccagctggctcacagttcactctattttccagagtgtgggtgagaggtcaggccatgcaggttccccaagtggccagcagaggccgctgggtccacggtcctggcaggaccccactcccactccagatgaaccaggctgaggccaggagtcaggaacctccactccagggatctattaaggctcccgtccccaataggtctcctgccatacccacccactgacatcaggacctggtcctctctgaacccctttggctaggtagtgccaagagattgggaagtggggatcagagactgcccttagcatgccagtgccagtgcttgcgcaggtgtgcctacaggaagccatgccccaccactctgctttgcatgccctgccctgggcacttgccagcctggccctcagtggtgggggtggcgttcaaagcctagggagccttggttgcatcctgtgggtcccttacaggtgccagagcgagaggaacaggaacagcaggcagaggtttcaaagccaacccccacccctgaaggcaccagccaggatgtgaccacagtgacactcctgctgcgagccccacctgggagcacatccagctcacctgcctcacccagcagttcacccacccctgcctctcctgagcctccattggagcctgccgaggcccagtgccttacagctgaggttccaggcagcccagagccaccccccagcccacccaagaccaccagccctgagcctcaggagtctccaacgctccccagcactgagggccaggtggtcaacaaggtgagtctggatgaggggcagggatgccaggcaagtgagcaggtctgggagtcaggccttgctcaggccctgttcttctcccttgcagcttctgtctggccccaaagagacccctgctgcccagagccccaccagaggcccctctgacaccaagagagcaggtgagggtcccagcaggggtagtcacaggcatctttcttcccctccccctgcctccctttccctgcctagaaaatgggctcttgtgcctggcagctctagcttcctcaggtccatgcagtccctgatactgcaccccacccctgaagtgtccccgcccccagctaggccagcctccccctccacccccatggctagaggcctcccctgcagccttgaaaggcaacgggcctcaggcacattcttctccccaataagggagtccacccatctcccagctggagctgtgggcagcactggccaggagggctgtcccccctccccatctgcagaaaggatctgggcacccttcctccagcctaagcctcgcctggcccccaggagtgtccaagtcatcctagggtcagtgtggcaggagaaggaggtgcctgtaggagagatgcagccgagtggggatgccggagtgtgggagatccaggaggggatggagaggtggggtgggggttgagtacaggaaagggtgggaagctagggaggtgtagaggagaggattatgaaaggtggacacccactatcccctgtcttttctctttccccacatggccatcaccccctccccaacctgccagacgtggctggaccccgaccctgccaacgctccctgtcggtgctcagcccccgccaaccagcccagaaccgaggtactacctattctcaccctgcctaggatctgtgcagaccctgtcccacccagttgctgacagccctcctgttccttctagagtccaccccccttgccagcggaccttcctcattccagcgggctggctctgtgcgggatcgtgtccacaagttcacatctgattctcctatggctgctaggctccaggatggcacaccccaggctgccctaagtcccctgacccccgcaaggctcctgggcccctccctcaccagcaccacccctgcctcctcctccagcggctcctcctctcggggccccagtgatacctcctcccggttcagcaaggagcaacgaggagtagcccagcccctggcccagcttcgaagctgcccccaggaggagggccccagggggcggggcttggctgctaggccccttgaaaacagagcaggggggcctgtggcacgttcagaggagcctggtgccccgctgcccgtggccgtcggcactgccgagccagggggcagtatgaagaccacattcaccatcgagatcaaggacggccgtggccaggcctccacaggccgggtgctgctgcccacaggcaaccagagggcaggtaggcgccccccactgcctccccaatggggatgagtgcctgcaaccgcacttctgcatgcaggacaggtgctgcggccaggactcagggtgtctccaaagggtgtgctgggagcgagggcattatcaaccttgtctggcactgccctcactccacctgatcctcctgacagccacctttctccccactcagaactgacactggggctgcgggcgcccccgaccctactcagcaccagtagtgggggcaagagcaccatcacccgtgtcaacagccctgggaccctggctcggctgggcagtgtcactcatgtcaccagcttcagccatgccccccccagtagccgaggaggctgcagcatcaaggtgagcccctcctcaccccaccagcctcaccatccgtcagcctcacatacactgcttcagggtgtagggctagcagggttcctctgctcctcccctactgcacacacagagaaaccgaggcccagagagggaaggtggctgctcacagaccacagccagtcggtggcagagctaaggccagaccctagcatatcagtccctaagtgtgtcggaagcttactctgtactggcgttaagcttcctggatgctgatctctgatccttagttcgaaattggttggttcattcctggtgaacagatggggaaactgaggctcagagagggtggtaagggcttgctcccctcttcctgtggcagccccagtgcccctgcgcccacccacactggacatcagccccgaggtatagagcagctcatctgctcatccaagatcagcctggcccattaggagattggagattagtgattagcatctgcgtcaacctccctgtgggggttgggcagaagctctgaggggggacagacaggcagaggggcgccaatcaggtgaggcagcagcctagcaggtgccttgggaactgaatacgcagcacccttccattattcattcccaagcccaggatccactagccgggagctcagccgggaaagggatccccaagcgggccacccggctgcccaggtaatgccctctgtgctaaaccagggactgaatgggactttggctgaggtgagatggctagaccagctttgggccttctcaggggagacagggagagagtgagggaaataaagcacccttcctttccaaaaaagcaggatccagctgccctctgacaagggattgtgtggggtggggtggggggacccgctgaggcccttgaggtggatgggaggtgccacagtgagacctgggtctgacaccaccaacttgcctcagtttacccatctggaaccaaaggggacaggtgatgtacccataatgtgcttgctcaaagtctgtggttggacgtgagcaccatgggcaggccagagggcatttatgtaagaccaagacactttttatagcagatcactcaaagtcctgcctccctgtgcctccatttcccccatctgttccagctgtctaaaacagctggagttagggtaaagggtaaaggagtacaggctgtggagtccagcagactgattctcacagctaatgtacatggtggctaggccaggtccattccctgttccctgcctcagtttccccacctgtgaggcatggggccccgatctcagtgatcttcagaacccatgcagtcttactgtgctgcaggcctatgatttctgtagggctatagccaggcctggcgatccgcctgcttgggcaggccccccctcccccactgccccttccacggaggagcccagaataggtttctatttgggctgcagctccagctggctggtggcgggctgggaggcaggggcggggcaggcccgctgcccttgcctttgccctcggaccagctgcaaagactcagacactcagccagagacagcagcccctgccactgccccaccattaccccccatagagtccccaccagcaccatgccgggggtaccagggcctgggcctgagctggccgcagcccttgaggagcagttgggccgggcactggaggagctgcgggcggtggctgaagcaggccgggtggcagtgacccaggcagccgaggtagctgtagccaccgtggagccggtggcccgggcagctgaagagctgcgggcagagagagcagcactgagccggcggctggatgcactgagcaggcaggtggaggtgctgagcctacggctgggggtcccacttgtgtccggccttgagcctgagctggagcccagcgagctgctcctggctgccgccgaccccgaggccctctttcaggctgccgaggatgccgggacccccgtggcccacccacctgccttcagcacccgccgccgctcctccaccggcaccacccgcagcactagtctcgtaagtgcttctgggttggtgggaggggtagttttgagccaggctctgcctcctcttgactttaggtatgtcaccaccttctctgagcctcagtttatctatcttgacaggggactggggcactagtgctctaagactagggcaagagggtgccaggctccagccctgaggcatgtgtggcagctgccttggcagcccctggcatgacccaggccccagcccccagctccctgccgccctgcaccctggccagaccaagcctccctgaaacagctgccacctcagctctccttacccttatagcagacggagaggccctgccaggagaggaagggccataatagttggcttggggccttgtcttcaaggggctagggagatgccctgggagggctgcagggctagagactccttagaggatggtttccagcaggggcgaggcagggggaggtggtacagaggagagcttcatagaggtcttggctcagggcagccccagtcagacacctggtcaggagcctacaggccccgggccagccctcttggcaaggtagcaggcagatggggggcaacatgtgctgcctgggcactggcccaggaggacctaggcctcgggaactggcagcacagagcagagcctgcctgggagggggctgggaacaaagcagcaaaatgaactaaggttcaggagttaggctgccttcagctcagatcccaggctgcatcacacttagagagagactgtgggcaagtcagttagctgccctgagcctcagtttccccttctgttttttttttttttttttccggtcttgttttctttgcaacagggtcttactctcttgcccagactggagtgcagctgcatgatcatagctctctgcagcctctaactcctgggctcaagtaatcctcctacctcagctttctgagtaggtgggactacaggtgcacaccaccatgcctagctaattttttatttttgtttttgtagagatgcggtctcgctatgttacccaggttggtctcaaactgctggcaacaagtgatccctcccacctcggcctcccaaactgttgacattacaggcatgagccactgcgcccggccttcccttctgttaaatagggacagtaaagtccctagtgtttatacaacacttactatggactggaaatcatcattattatcactatccattgtattaatacaattcggggtacgtgggaagccctacaacaaaactgtcagtgcctcttccctgactgacgctgacatggccatctttgggcaggcaggctggcaggctagtggttatttccaaggcgtgccagcaaccctaggatctgcttccctatccattggagacatgatgagtttcacccatacccctgcttaaagtccatgccctctccccaccctgcagatggaagcagagccagcagagcctctcgctgcagcagtggaagcggccaatggggctgagcagacccgagtgaacaaagcaccagaagggcggagccctctgagcgctgaggagctgatgactattgaggatgaaggagtcttggacaagatggtatagccagatccggtgggctgggggttggcagaggccagcaggcaccaggtaggcaatgatgggctctatatgcagctggatcagagcacggactttgaagagcggaagctcatccgggctgcacttcgtgagctccgacaaaggaagagaggtagagagccagttgccctaccctagatccagctgccccattccccagctgctcccctcatactctggggtccatttgtggacaccccagcttaataactgccctacccagcttctccttctctagacccagcagttcccttggctattccctgctggatccagctgctccttccctagctccttctctcccgctggtgaccccagttattctccccaaccagcttctcttctccttcctagacccagatactccctcccgcagctactctctccttggatccagttgcctctcaaagtactgtcaacgactccttccctgaatccagatactccttctccctgctgctcctctctccctgaagtccattgatggccatcttagcctctgccccatccagcttcccttttcctggacacaactacttcctcccccagatagttcttccctggacacatctattcattcccttagattctgggttcaattgcttctcctctcaaacactctcaattactcctctgaatctagctgcttctgccagggcccactgatggccaccccagtctctatctctacccacctacttctattttaagcccagttaacccccttcactagcttctctcccagctactcttcccctggatcagattgcttctcagatcccatcaattgctcccttcctggatctaaatattcctgcctccagctgctcttctcctccaaccaaagacctgctgatggcccacccagctacttcctcactcagcttctccttccttggactcagctaccccctcactagatctagatacccctcctgacttagctactcatgcctatagaaaccctttttggatccatacccctttgagtttagctactccgtattctctagtttctgcctgagtccatcaaacccttcccacactccattccctgtcaagttatggctgtcccctcaccccagctgctcctagagaggcccttgttacctgtgtcattcatgtttctaacaagccaccctccaccccgtcttgtgtgccccatgcacctgtgcatctgtgctgtgtgggtgttggtggcccttttgcgcatgcatggggcatcccctgcccagaccagcgggacaaggagcgggaacggcggctgcaggaggcacggggccggccaggggaggggcgcggcaacacagccactgagaccaccacgaggcacagccagcgggcagctgatggctctgctgtcagcactgttaccaagactgagcggctcgtccactccagtaaggggccaaatggggccggcccagggctcagggtgggaacacatcctcccccagccccctgtgcctttcacatccttctcatcccctgcccctgcagatgatggcacacggacggcccgcaccaccacagtggagtcgagtttcgtgaggcgctcggagagtaaggccacctggtgtcgccctgtgcctgcctgcctgtccgcccacctcctccggctcttccttgagctctctctccgtgtcttcaactgtgccgtcactttctcttctctgcctgcggctatcaccacccctccatacagcctcccatcccatctcctgatgtccagcccaggccctcacctggtgccccttccccttttttgcagatggcagtggcagcaccatgatgcaaaccaagaccttctcctcttcctcctcatccaagaagatgggcaggtgagcaccagcacccaatccctgaccatagaggagtcagtgccacaggggacctaactgcaaacccgttttacagaggggtgggctgggcacagtggctcttgcctgtaatcccagcactttgggaggccgaggtgggcggatcacttgaggtcaggagttcaagaccagcctggccaacatggtaaaacctcatctctactaaaaatacaaaaattagccgggcgtggtggcaggcacctgtaatcccaactactggggaggccgaggcacaagaatcacttgaacctgggaggcggaggttgcagtgagctgagatcactccactgcactccagtctgggcaacagagcgagactcagtctcaaaaataaatagataaataaataaataaataaataaataaataaataaaacagaggggtagactgggatgctgggaggtaataggtctatagccagggaggggcaaagtgagagttaaggatcctgctctccttgggatctcattttattctcaaccacaccacaggagaggtggatgctcagggaggccagtgagttgcttaggggctcacatctctgagtggctgcaatagcattgaacacttacagaggcctacctaccacactgagctgcctggtggcactgccacttcccagtatctgcaaaccatgtcccaggtcacacagcacctttataccttagccccatgagaaaggagggtacccccatgtaacagaggctgttggggctggcagaaagcaggaacaggatcagaatccaggatgagaaccaaaggggtccagagactctgaatcagagagaccttgttcaagttctagttccgcccatcacgtcctctgaaatcttaggcaagttactgccagaggtctcagtttcctcacctttagtggaattggtaaggcccctccctgctcttgtgaagtttaaaatggcacacaggaaaggatcaacagagatgaattattattattactattattatgctagtcatcatttttattatcggatagtgcccagaagctgaactcccctgtaacttgagggtacaatgaggcttctcagagaactactcgtgggtgggggagggggaggcggaaacctgttgaaaaccttgctgtcatttgagactcagtgtactcctctaaaatgcgtgtgatgaggacgcctccctccctggcaggcgtttgtggcagtggagatactagtgtgctacaagaccccccctcctcctcgcgagtggtggtccaggctggggagcagccctgctctccctgcctaacatgcgcctccccaacccctagcatcttcgaccgcgaggaccaggccagcccacgggccggcagcctggcggcgctcgagaaacggcaggccgagaagaagaaagagctgatgaaggcgcagagtctgcccaagacctcagcctcccaggcgcgcaaggccatgattgagaagctggagaaggagggcgcggccgggtgagctgcagaagtgggctgggcagtggggggcggggcgtgataggcagtggggggcggggcttgatagttggcccggcagaggcgggaagaccgcgcggctagatctgtggtgcaaaggcccgaaggtcatggaaggcggggcctgggatccactgggtgggcccaccgaggcatgccccttatagtcgtgtgacctggtcctgacaccgcccctacagcagccctggcggaccccgcgcagccgtgcagcgatccaccagcttcggggtccccaacgccaacagcatcaagcagatgctgctggactggtgtcgagccaagactcgcggctacgaggtgagccccgggaggccagggggcctggaggcctccccagaccccagctcaacacctccttcttagcagagctcctattacccagtacacttcctgccactgtgtggcctcacagggaacatggaaaggctcttggggtgaggaaactgaggctcaaagaggacacaaggcaagccctagattccagaatcagtgatgaagtaacagggcctcttgggtggtgggcagggttcaaggccggatcccactcttggagtcccctccttgttgctctgtaggaggccctgagtcaatttctctaaatgagggaaggagtgatgaggcatgaccatagccttagctgggtggcgctgggcctctcagtagctctgtcccttgaaattgcaaatatgggagttgacaggctgacttggaggaggctcatgttccaactattcactcattgtgcaagctacggggcctctttgtgcccagtgccctaggtctggaataacagaatgctgaggggtagacagcaggggggagttgcccccaggttcctgaccagtcctcctacggcttatagcacgtcgacatccagaacttctcctccagctggagtgatgggatggccttctgtgccctggtgcacaacttcttccctgaggccttcgactatgggcagcttagccctcagaaccgacgccagaacttcgaggtggccttctcatctgcggagtaagtgtgggccctggccctgctaatgttgctgcacatctggggctggacatcgggaccaggcccagttgccctgagaacccctggagcgggccagccacattgtcagtcagcggctgagacccccttccccagagagtccccgtccttctccatccccacccccccgctgctgagcgtgccaggtgcccgccggaacgaaggagccgcaggccggcctaccagcccgggccaaagcccaccaggtggccctgtccatatcccctccatcctccctctgcccccttctccctctctctccctttctctgtcctgctctcctcccactatcaccagagcttcctgctcccacgggatcccggctggagattccaaaaggaggctcctggcccgggcaccgtgcccgcccagcctatatagtgctgccagaggcttatataggacctcagcaagccctccactttggaatcgttgccccgtctgctcacctcaccctcagcacccttctccatctgtcttcccttctttccccttctctttctggtttccctcaaatttcttcctcctcctccttctcctcttcctcctccccccacctcctctcacgcctccctcaccccctctccccggggcacagccctcctctccaaccttggtgccaacgccatcgcccccaccccgcgttcccgcttgcccctagagttctctgcacctgtgactggtttggcccccacccttgtctgcattgcacaccattagtgatgggtagtgagcggcacgtccacagtggggaggaggcatgcggggggctggcagactgcagcactggaatcgtaattgaactcatgtctctgtgtgtgtgtgtgtatgtgtgtgtgtctctgtttcctcccctctctcttctctgcctcttccctctcttccccacccggggccctggcctcctgcccccgtcccccaccccttcccggccccctaccctccccaggacccatgcggactgcccgcagctcctggatacagaggacatggtgcggcttcgagagcctgactggaagtgcgtgtacacgtacatccaggaattctaccgctgtctggtccagaaggggctggtaaaaaccaaaaagtcctaacccctgctcggggccccacggtgagaaacgccgcctctaccacctgccccgtttcaccagaatctgctcagcaaggccagagagggtccagggaggcgggtgggggaagtaaggggggcatttagtcaagccagaggagccagacatagccctgtcttctggcagttcagggcccagcaggtgagaccattctaaatgggcagtgatgacccaggtgggcagcactgtgatgggggaagcccaggggagatgcctgacccaggctgcaggtctgggccccccatctgaaaaaagtgcaaactaagctgggatctgaacaagttcaggctaaaggagggagagggagttccaggcagaggaatcagcctaggcttagcagggcaagagagctggagagcacagcacatcaggaagggaagaaacttgagtctggatatgagggaggagggggccacagttagaagtttgaccttctggccgagcacggtggctcatgcctgtaatcccagcactttgggaggccaaggtgggcagatcacgaggtcatgagttcgagaccagcctgaccaacatggtgaaaccccatctctactaaaaatacaaaaattagccaggcgtgtggcgcacacctgtaatcctagcgactcaggaggctgaggtaggagaatcacttgaacccaggaggcgaaggttgcaatgagctgaaatcatgccactgcactccagcctgggtgacagagcgagactccatctcaaaaaaaaaaaaaaaaaaaaaaaagtttgaccttcctcctgaggacaacaggagttataaagggtttccaaacagagaagggatggatatagcattctaggaccttcctcggatgaggcttggatgagagatgggatggactagatgactggaatagcttaagagctagagagacaggcttcccaatagatctggtttggagagggagagggaaggtcaagaagtctgccaggctcctgtgtgggcactggggagttggtggtgccatactccaaagtggggagctcaggagcaggaccagttcaacaggaagatgtttctggctggggactctggatcctaagccagctgtggcatttcctctctggtcacctcacctcagtaccaaagtaaagaattcagatcctaaactaactaccccattacagacaaggagctcagagagagacgtgggctaagactgtcctgggggtgggagggagagggaagatggttaggtcagagctggggccagaaactgagactccaaactccccacttagtggctgttttccttgccccatcactgtgttcccgcccattttgtagagaggattgaaaatagaggcccagaaggagcaaggggattggctgaaggaatgtgagtcagtgacaggtaggggcacactcagatgcccctcagggcctggagccattgtggggggcagtccacatgtgcacacacacactcagagaaggagcacagatgagtggcggatgggcttggtgctatctccagatcatatatggacttaggagctgctgcccagcaagccagcttggagggagaggggcccagcccagccctgatccagttggaaagtgtgactcagccgtgctgttgctcaagttgcctggtgtttggcctgtcactggggcagcctgagccctgagccctgagccccagtgtaaacaatggctttataaggtctccagggaagggagtggggcgggagggagcaccaggttggagagggcggtcgggatccccaggacgatagccacagctggaagaagcttcagagagaggctgcctttgcatcatggtacagctcgggaaacaagcccagtctgggatagggatgaccctaggggcacgtggcacatcagcagcagacccagaaccctctcactcatcctaaattcttgtaaggtctcaaatgagatagagaataactgtcctgttctaaagagggggaaacagtcatagaaaagggccttatctagcacccacaactggttagggatacagtctggactaaaacagaggtgttcggtgttctgcctcccaggtttcttctctgaaggagtccaggtgagctgggggtaggcccagccctaccacagttctgagtttgtccataagggcacgagatgggaggtggtcttgggttctcaggtgtcttgagaataaggagcaattgttgccattatgccttccctgccataggaaactcattcagcaacattgaatgcttgctatgtcccaggtatggcagataggagggatcaaggcagaagaggtcttgctctgggggttgagggacaggggaaaaggagccagagagcagactccagcttcagagctctgggagctgtcagttgcttaataggcacaacccactcactccagagtggggaaaaggctttgccaacacccagaactgggggcctgggtcccatgcggcctagcctgcacttactaagccatggggcttgaaacaaatggctcctctgctctgtgactcagtttccttatctgtgaagggcagctagcattctgaaggatggccagaagggtggtccccccgagcatggcatagatggtccattggtattggctgggatcctcatctgcctcctctgctctacccaaggcaggtgataagggttagagaacccctctgctgcccacacgttccctggcctccatctccagcagcagggttatccccaccccctgtcaaagaataggggtccctgggcctctcaacaggaagtaccagatcaggcagctagcagacaatcatcggtggaccacagggccactagagtgagacctatccatagataaagattggccagtgatgaagcccatctgggtgcaaaggccgagctgagaggcttctaccaactggagtgtgccagtgagggtgagcagaaggtggtctccagggagaacatgggcagggtttggagccagcacctccccagggttggaggaagcagacccaggacctgcctgactgggatggggctctcttctgccatctccgcctccacctgcctagctctgctcccccgccccgagagatgcctccaggcttgggtagatgaagccaggggcttcctgccttcctggaaggcttttccctgtctggagtttatgaaagaccagcaggcaatgcggcaataaaaaagaccttggggtagaggggcgccacgagaggcgggtctggcgctgacatccaaccccgtgccccctccctgcaggatgctggtggactgtgtgcccctggtggaggtggacgacatgatgatcatgggcaagaagcctgaccccaagtgtgtcttcacctatgtgcagtcgctctacaaccacctgcgacgccacgaactgcgcctgcgcggcaagaatgtctagcctgcccgcccgcatggccagccagtggcaagctgccgcccccactctccgggcaccgtctcctgcctgtgcgtccgcccaccgctgccctgtctgttgcgacaccctcccccccacatacacacgcagcgttttgataaattattggttttcaacgatcctgactcctctctgcgtctcctgggggtggggagggggtttgaaccgaaggcagctccgcaaggtctccaactccagcagggatcctcagaggttcttcttccgacctcccaccccacccgcccgcagcaa

SEQ ID NO: 1269 - DNA, 9220 bp, Homo sapiens
aactccagggctagtgagctggaccggaagtaggtttctacccgaccgcattttacgtggtgctgcatttccggtagcggcggcgggaaatcggctgtgggagagaggctaggcctctgaggaggcgaatccggcgggtatcagagccatcagaaccgccaccatggtaaggagggcacaggctggcggcgcgggagcttccgagtctgttgtggagtgggaaccgcgactgatcggggaggaagccgtgggttggagccacttagggcggtgaaggcctgggccgaggccgctcggtctgggcgggaaagaccaggaccttggcggttcggctaggcatggggtcgaggaaaaggttggaaccggtgtcggaggccgaggtcgctcggcaggggcgagggtagaaccgcggctctcgacaccgctgtagccataattcctgggacccagtaggcactaagttaacttttgccgaataaatatatgtcccgggcttcggagcaggcactggagccgcagggggacccggtaaaaggctcagacttgcggaagtttgtgagtctgagaaagagttggcggaagtgggtggaaggggctcgtggaccacgctagagtctcgctaggtctgctggatggagaggagggcggaggagggtgatggcgaatggaggaagagctccactcagttgctcatcacgtttccgtgtttgcctgtgcctgacttctcaggcgctggggctactctctgaaatatgtttgcttccttcacagaggtagctggggacacataatataattcagtgtggtcattcggtaaaagtaacggcagcggggcggggtaagaatgttttctcaaatagatggttcctgagcagattcctaaaagattagcaagaatgttcccggcgaaaatggggggaatattacagacccggagaactgaaggaacaaaggctgaagggtaacaagatttaaaaagttactggatttttctgcgtttgttgactgagaaaaagttgctggaggagaaaggaagaaagaagggaagacgggaagaattggcaggaggctagttactaaaggccttgcatgttaattttacctcagtggtggtgaggcatgtcattgaaggatttaatttaatttatttttatttttttgagacggagttttgcttttgttgcccaggctggagtgcggtggatcgatcagggttcactgcaaactccacctcccgggttcaagcgattctcctgcctcagcctcccaagtagctgggattgtaggtacccgccaccacacttggctaattttttgtatttttagtagagacggggtttcaccatgttggccagactggtctcgaactcctgacctcagttaatccacccaccttggcctcccaaagtgctgggattacagccgtgagccaccacaccctgcccactgaaggattttaaccagcaaaatgacataagcttagtggtgtttagaaagattgctctagctctggcatgtatattcgatgggactggaagcagggaaacctggtaggatattgtttggataactggttagaataggcgctggattcattttgtctaggttccaacacagcttcccagctgtgaaactgggcaagttacttaacctctcctagcctcagtgacctcatctgtaaaatagggataataatgggcccaattttggggattaaatgagatgtactgtgcttatcacagtgccagatacacagtgagcacccagtaaacattagttgagctggaccagtgaatgttgccctaaaggttcagatcccttgtggttagaagctggttaaaatggtcattgaatggaaactgaaccacctaacctgagggaggctcgcagtatctttgtgtggagtcaagttttgtttttgtttttttgagatggagtctttccctgtcacccaggctggagtgcagtggcatgatctcagttcactgcagcctccacctcccaggttcaagcgattctcccatctcagtctcccgagtagctgggattacaggcacctgccaccacgtgtggctaatttttgtaattttagtagagacggggcttcgccatgttagccaggctggtcttgaactcctgacctaaggtgttctgcccacctcggcctcccaaaatgccgggattgcaggagtgagccactgagcccggccatggagtcaaggttttgatctgcatatttgcaggttcagaactttgttgtctgagctcacagagatgaacagatgtccatagaaggcacttggtgggttaggacttgggtatagcagtcagactgatgggaggatgatatacagatcaaatgccaggtgatttgtttatagagagaaatacaactgcttagggtacctgacagttcacaaagtgatacctatatagtcacttctttattttagcacattggaacccaggttatgaaagcagaaatgtttgttgggttaaagaccattatatgtccaaactggttagcaccctaaccatcagaagtttccctctgccaaatatagtcttggaggcacactaacaaattcttgatatgtggatttcatttttcaccttgaagctgatctccttcctgataacaagcttcttgttgattagatttttagtttcagccctattctagctcttcctttactcagtgtttttaatgagatttgaatgttccatagcacttgagtcacatatctataatctgcacactggtagatggctctagtatgtatgcattggattattttggggacaccctatactctcatccctgcaactgacacgacaaggagaaaggcaattataatatgagaaagaccgatttcaagggaagagagaatagcagattactgggtagaggtcagggctaaaacagggtggcatgggagaattcctaggaaaaggctgtgggtgggagactgagctaagaatctgttgagaaagttggacacatggacaagaacgccatgggaagttttggggagggccagaggtgcttgggtccaaaagagcagagtctcatccctgtccatttctccttgcagacggtgggcaagagcagcaagatgctgcagcatattgattacaggatgaggtgcatcctgcaggacggccggatcttcattggcaccttcaaggcttttgacaagcacatgaatttgatcctctgtgactgtgatgagttcagaaagatcaagtgaggagtggactgtggggggcggagactggaggatgggaatggattgagtgggtgggccaagcaatagaggtggtgatgtagctagttggttcttctctgtttattctccagttttagagggcagacttaaatggggacattgaacgctaagaaatctttttgagtccagcaaaccttgctctctagtctagcaaagtacaagttgtgaagggctgctaggctttttgtttctctcactttgcgtgcccctgggtactggggtaaagggctctcatgttctccccacaggtgtgtgaggggggagagcttgagtttctggcctcattgcctatttgtaaagctgtagcctaaagggctctcccaatgcagcctggtctgaaactgctttaagaagcctctgaccctcttcagggtaagtgctcagctccccatgtgggtttggggccagtgatttttgttggcatttatacaaacaattggagatattgtctactttgctacaattccgtaagttattggctaactcccttgccttgagtctcacagatcttaagcttttggcccattaaaagatatgatttagcttcccatcatgttttacattcaaggctacttgaggcacaaaaagatgatgtgacttccgtggccagcagctcttttgtcatatgcagtgtccatattattctgtcactcactttgaattccctttgattctccttggggctgatttcttctgtgacccaaggtcaagaagtatagtttaaaaatgtggtagggatgccttggtgccaggtacgtattagagaggggccaacagatgagcgtggagctactccaaagttccctcctgattataaaaaatgtttattggaaaatatttttgaaaatacaaagaagtctatgaatagaaactaaaataccccgaagggtttttttctaattatgaaaggacaatacatggttattattttaaaaaataagaaaatgtgagccaaaaaagggaaaaactgtccatccacagacaaccagttaatatactgtaaaatatcaaaacaaaatcttttgagttctttttttaaatcaggctattttttcccctttatttttaggatctagctttagcttttttccccactttcctatcctgttgcagttatttttcctacttcacatttatattttgttcatctttttctggttgttgctttttgggggtttctgtttttatgcttttgaggaacagatatgaaatttcaatttctgtgtatgtgaaatttctcttaaccttttccttctatggcttctcctatttctgatgtaagatgaggggcagaattataggcctgtgaggttgaattgatattagaaggacactgcacgtaagtgaggtgggtgggagtcatttgattggaattgtttaggcagcctcctgatgttggcaagaccttaagctgaagggagggaatagggtcctaagaaagaagacttggctgagggaagggccttcacggttgctgtggaatagcatttgggcccgggctgggctttgttgaccttgtcctatctcttggtcagtgtgtcctcttggcatggtaggaaacaggtagatagccacctaagaggttatgtgttcagcctgtagagactatccaggagggctatcttgggaaagtttgtgtactgtttgttaggagatgcagtataagcaaatcttggaggccactaggcaggtgaactttacccacctctaacactttttttgttccttctaaacctctctttaggccaaagaactccaaacaagcagaaagggaagagaagcgagtcctcggtctggtgctgctgcgaggggagaatctggtctcaatgacagtagagggacctcctcccaaagatgtaagtcagagcaggaagccttgtggaggaggggaggccctactgtgagccaggctctgtgttagattctgtttcattgcagttctcacaggcatcctctggattttgccccctttttcagataataaatgaaatcttaaagaggttaccctgcaagaggccgggcgcggtggctcacatctgtaatcccagctctcagggaggcaagaggcgggaggatagcttgagcccaggagttcgagacctgcctgggcaatatagcgagaccccattctccagaaaaaggaagaaaaaaaaaaagacaaaaaaaaaaaaaagaggttaccctgcaagaaagaagtggaaaaggggaactagaatttgggtatctcagactttaaagctctacctgtttctcagttgatgtacatagtgagtcagtggaggaagcacctgaagccatctgggtcagttcttaatgtgacgacaaagcctaggtagaccttaaaaagttgtaactccgaaacaataggaaatgtgtgtattttgttttgtacagttacagttcatagttactgagaatctaccttgcgccaaccacttcagtattttatttgatcctttaggtctctttagagataaattctcatcttataaatagaataaaccagggcttagtaacttgcccaaggtgccacagccactaagtggtgaaactgacatttgatctcagacagtcttgattctgtaaacaccaagctacacatagaaatagagcaggctttagagacctagtcaaatttgttttccctttccctttttcatttgaagggttttttttttttttttttttagatttttagatggagtctcgctctgtcgccaggctggagtgcagtggcacgatcttggcttattgcaacctctgcctcccgggttcaagtgattctcctgcctcagcctcccgagtagcggggattacagatgtgagccaccacgccctgccaagacgttattttaatcaaaagagaataatccttttaactttttaaaaatccacatatattatctggatttttttgtacttaacacatagtgggcatatattatgttgttctgtgttttcacttaatgttaacatttttctagttgctcaacacttttaaagtcaagttaatgactgagattttctcaaatgagtacagagtagtttatcctaatcattttcttttttggagatttttacgtttttgccttttccagttaaaaatgtctgcaagggatgttagcatatcttggttcaaagtccatgtacatattcaaatctcttagtacctacttccagtagaattggctggtctaacataacccatcataaacctttgtgatcacaaccagttgtaccataaccatgtcatttgcagataaggcaactcagcccgggattgtgggattatttgtccattgtcacctagcggattagaatcagctgggaatggatctcatgtccctttaatgccttgcctgctgaaccctgagtggaaccctggccctttgctcttggtttaactttcacaggagtgcatataggtggttgagttgtggcatgtttctctagacttactcttaagttctaccctgcttcagggataactcatagtcttggatggaggaagaatggtgttggcacacatggagaggtagtatttataagctatttcgatagtatttataagctatttcgaggggctctcttggcaatgatattccaaagtatacttctgatcttcagatcactgggcatcagagcatatttgtttatttttcagactggtattgctcgagttccacttgctggagctgccgggggcccagggatcggcagggctgctggcagaggaatcccagctggggttcccatgccccaggctcctgcaggacttgctgggccagtccgtggggttggcgggccatcccaacaggtgaggagttggggaaagggtaccacctcctggtggctaaaataaaggataaaggggagggtccatagttttaaaagggtccagagtgaccaacctgtgattgtcagactatcagtgtttcactgtggtttatacatggccctagaagcaagtgaaaaggataagttgccattgtaaattatgttgatgctattaaagagatgtacgaattagccaactgtatttaaggaaaatatttccatgacagcatttgaaatcatgagtcatatttgaaaatgcagttgccttctctcacttggattggacatgcttacattcaggtctagaagatgggagttgggcattcaagcttgatctttcccgacatgtggttttggatgggaagtctggtgctgagagttgtagcattaagggatttggtgtctgttatttcccactgtccttccccaagttggggaggagagtgggaagctgcattgtactgtactcttctaactctttcttcttatgtcctcttaggtgatgaccccacaaggaagaggtactgttgcagccgctgcagctgctgccacagccagtattgccggggctccaacccagtacccacctggccgtgggggtcctcccccacctatgggccgaggagcaccccctccaggtgaggagcccataaggagaccagtgctaattgatagaagatgccttagctggattaatgatgagatataaccttgactgaagctgatgatgagtttgtataattaagcaggattactctgagatccagcgtggctgactgatgagactaggtggacaagagccattgggagccctgggtgttaggctcaaatgtcagttttctgggagctgctgagagggtggaatggtccatctatctcagaacttggtggaaagctttgtagtttttttgctaccttttcaagatagacacttgagctatattcttggggcttttctcttgcaggcatgatgggcccacctcctggtatgagacctcctatgggtcccccaatggggatcccccctggaagagggactccaatgggcatgccccctccgggaatgcggcctcctccccctgggatgcgaggtaagtgcctgcagtggtgactttggcttctttccctagagcctagtgggataggaaatggagggaagattgcatttagatcatatcccatgggctttcaagccttaaatctagggaaatccagaaaggaaagagaagagggaacatttcttaaattgggcttacctcccctcttagaaaagttagagcagccatgcacccagggtgtttctcaatatctaaggcagcggcctcaggacacaatgaaataatgcattctgaggatccctaacagaagttatgagattgtcttatgctctttggtttgacagtgcctagtaattaagagggggctctgggctttgctgtactattatggatttctctttaacttcagttggagaaattctgagatcagtccccacatggatgagaaaataggcccccagggagtttggactccaagcccagtgttctttccctataagataacccatgggcaaacttggtgacccctgtttctctagtctggattattcctctatgggtttttatagacataggaacccagtcagcctcagagtagtccctagttagcacatatgccatgtatacccctctcctcactcgattactgcagggcgtgggaggctggggcagggttggggattcaagttgcagatcaggcactgactaaacttcttactcttacttcaggccttctttgacccttggccacagagtatggaagtagctccgcagaggcgtgggctcgattcctcagggccacgttaccacagacctgtttgtttcttatgctgttgttcgtggagtctcatgggattgtctggtttcccttacagggccccctcccccgggaatgcgcccaccaaggccctagactcatcttggccctcctcagctccctgcctgtttcccgtaaggctgtacatagtccttttatctccttgtggcctatgaaactggtttataataaactcttaagagaacattataattgca

SEQ ID NO: 1270 - DNA, 110106 bp, Homo sapiens
gtgtgtggtacaagagatttccaaaagtttctaggtgccttcagtgggcaaagtgcaaggtattaaaaaaactgagagggaaggaccctgccaagaaggcggctaccatgagggagagatggaaggtgaggctgagacccagaggaggtgcaatgccagagggtgcagaggtgagtttgcttcattgtggaaaaagaacacaattttcaccggctgttgactttagaagctgatcccacaggatgaccgctgtcctgttgaacaagaacgtttctctgcaggttagaaaggacacagagtgtgcagccatgcttcccgcacgcaagtgcggtgatatccgcaggccacttccggaggaaaaggcatgggtgaacccttaagagggggcggaagcgaaagcccggtgggacccagggctggcgggaagttcaaacacggaagttactgaatatttatccagaagaggtggggcagcctgatagagcctaaaacttgcctttcattgccaagtttagggttttttttctgcataactaaaggagggtttcggagatgagaacacttacagaaaatatgagagtgtggtatgtatattttcagcactactatatatatttttctcttacaattttgaaacatctttttatgtgttttgttttgtaaaaaataaagctgattaattaaatgtaaaataatatgactcttaaaaatatctctgttgggctgcgggcagggaggaatggggagttgtttaatgggtacagggttttagttttacaagataaaagagtcctggagatggatggtggtgatggttgcacaacattgtgaatgtattttaataccattgagctatgcacctaaaaatggttgagatgataaattttatgtcatgtgtattttacccaggtaaaaaattggaaaattggaaaaaagaaaattaaaagcacatcatctgtcacatttaaaataaaacgattcttttaaaaaacctgaaaaatttcatttaaatacaatatgaagaaaggcaaatctggaagggactggagtctactcctttcggtagcttggcagagagatgtcaaaaggtcagagttacctcaacagaactgaccatctgacactgactccagaggtttcccctctctaacaaagtcacttctctgaccagggagtgttcataattgtatagttgcatagacattccctgtctccctaatcctataacgtgtagagcattgtgagagtgggcatctcactactgggctgctggccacggggtgtgcagagtacgtatgtctgccctaaatatgggataataagaatttggagaattgtattggaaatttccctccaataacctttagtttgtatctacaccacgtggtgcccataatgtctatgaccccttttcataacacaataatgaattcataaactatcctttgtcagatcattattcaaattttgggttacagaaagtatggtttctttcatttttttttcattaaaaaaaaattaatagctaatttgtgccaggacattaccatctagcctagaagagacacattatgtaagtaattacaatagagtatttggaaccttccaaaagagccagtgctgggtgctgtagaaattatgggaccagcttggctaatttaggggtcagagtatgtattcctgagatagacataagtcaacacgactgatgaaaaggagataactaaacatttatggggagtagtgtaggttcagaatatagcatccaaagagaatagcacatgccaaggatcaaaggggagagaaatgaaatgggaagaaatgaaagttcagagtggttgactggagttttgagtggaaagagatatattaatagttggagggtaaggcatgagttagactggatagaactttaacaatcacattaaggacagtgaacattaccctaagggcaataggaggccatggacaagatttaagcatggaaataaactaattagattttaatgtagaaaagaagagggtgaaccaatagaccttgtcaatatgctaatagagttcagttagtcacggatgactaaggtttttgcttggcacctgggtagattaagttcctcatttcaagttaaactacaacaggctcccaagggcctgtgaaaccctacataatctgattcttgtttactttttcacttcctaccaccttctttcttcatcatcaccaacaacactggtctttcctctctgcctcaggttctttgcacttttgagtccctctgcctggaccatccaatccaaagtgactcccaccccaacctgcaagtcactattgtaatcctatccattattttctttcatcctgtcatcagtacttgaaattatcttgtttatgtgctttctagtttatattctttccttcccccagccaggatgtaacctccatgagctttcccctttgttttttgcttactttcttactttctctctttaaaaaaaaaatctgtcttcagctttcagaatgggtatatacagttagtgctcactgcatatttgttggaataaatgtctgaatggtacttagaagactaggtttttggtaaagaaggtgaagttaatttcaggcatattgagactgtagtgtcaatgggagacttgcaaacaaagacgcccagtgtgcagctggctatgtgtttcttgaagacaaacctgagttgaagacgtagagttgggagccatcagtataaaggtggtaattgaagttgtgagagtgattgacaaagctcagaagtgtgagttgaataatctgactagtttacaatgaaccaaggaggcccatagagaatacacataacatggtgagagggcattgactaataagtagaatgggggagaaagcagcttgtctctccttcctgcccaggaaggtcacttacttttcttagaatggaatcatttctgttaagtgtcttaaaaggacaccagccctgtgattttggacactgggatcatactaatgataaactaagtcagggaagaggagctttaagccactggcttaggctgccatctattgctctgtttccttttacagctagagttgtctacatatgttatcacctcccattcattatccttcccacacaactggctcctgcctccatcaccaaaatttttcttaaattttccagtgattctttgtgaccaaactcaaggccctcttctctgaatttatcttagtctctcagtatagtcaaccattccctcttggcttgctaacatgttctttcttggtgctcctctgtcttcactggtctcgttccctcagtctgtcttgctagattcctcttccactgggattacttagagcagggctaggtctgtggttctcttttcttctcccatagatcagaatacctttattttattgataactcatatatatacatatatctggtccagatattatatattatctggtccagattttatatatatatatatatatatatatatatatatatatatatatggaccacactttttcagtgagtgccaaattgccatattgtggggaatataacttcctgatttctcagtgttcctgtaaaaagccctagtcccggagacacagaaatgtatgcaatataaatataggaaatacttgctttcacttccccagaaacattttcctcttcccacaccatgagaattagagctatagctatttttctagttaattactctgatctagagggagaatagaacctctcttatctcctgagatggccaaatgggttcacccaggactagcttcctaggttaaatcctaaagtaccaggaaaactggagtggtctttccctaggtatttatatatcacaaggggtaaagcccagaacttggagacatctttaggttgtaaaagccagcaacacctagagtttctctggcctttggaaagatgcatttaaattccaaaggttaggatggagagctttggaacgaggatcttttccattttatctcaaagcagcaaagttttttcttttcctttcaggaggaaaggatgatggctatccctctcatgtatctaaacagaaaaatccatcattctacatcccttatacatgagttgtagtctattttgaatagaaagattccattagctctcttagcattgcctttgggtttgtgtatgggagacagacgctgcaatattgctctggctgataagctggttgtgaatatcagtaaagaattattttccctgaccagataccttgtgttcctgcagcactcatatatataaggagataccaatgcaagtggagtaacatcttagaccctttacagttcttgacaaaacacacatctatacacagctgcatagatggctagcagaaacctctaaaggaacaggtcaataattgaactctaagagttatcccccaatatatttgcatcttccctcagcaatgggcattaccacttacttgttcaagccagaaattgaagagtgggccttgatttttctctttctcatctgtagctaataatatgtcaaatcctgtcaacaatacctgcaaaactgatcttgaattggcactcttctctgcatctccactgtcagatctgaatccaagccaccaagaactctcatggcatctgccccaaaatggctgccctgcctccattctttcccagctccaactcattctttacaccgtagcaaaattgagcttacattgtgtcacttcactgactaaatctcttcaatggcttcccattgcatttagaataaaattcaaccctccacagcttgacctacaagccctgcatgagctgtttccagcctccagcttcctcttgtactctcatcttacctcctgggaggctttttttcttatgtctcctttttggagttgaccagatacatctttttcttttctttcctaaaaagaaaggataatgttttatagttacaaacattgatctcccaatcttgtatgtcaatgatattcagcttttacttttggtcttcaaaccacattgctagaagttcattggtgaccttaggtgatggtacttcagggagtaataggggaagaaggactctaaaatgacagaggaaaaggagaaacgaagaaatagagacagggagtttaggtagctcatttctagaagtttggttgtgaaatgaaggagagagatatggaagtagttgaagtgagatgagaatcaagaaaaagcattttttaatgagctgtgatacatgtaatgcagattcttgtgtgagacatactgctttaatgaatacttgagagagaagggatcatggatactataagatgaggcagaaggattgtcttagaagagaaggagggaactcggagaggagggagacagatgtagttagggtttgtaggactagcagcacaaataaggggattctcatctgatatctccttatggtgcaggagggaaagtcactgattgagcaaaaagcaggaggtgagggggtcagaggtttgaaaaatagggcttgaggtttgaaaggattattgcaggaagtagcattgtcacacagtaaggagagatgatttgtgctggaaccatgaagaccagtgagtgcactctgccctgctgtggaactctctccagcactgctggctttcagatgcagtgtacaggaagtaggtaagtagggtcttccaagacttgccagagagttctaggaaaaggcagagaggaaaggcaggtttaagataatggcaatagattactgaaatgatgaatcttggactgtgagttagtgtcaatgttaaaaagctgggaagcaaagaaaagcagatgatggcttggaaggaggaaaggccagtggactggtgatccaaatgaggttgaaggacaacttcagaggaaacaacaaataaataagcacagaaaaatatatttttgattctttttcttttgttaggattgggctgggaaagagtgatcagaggttgaatgatagctataaaaggagaaaagctcaaggacaggtatcaaaaaaggaattctgaaattaactgttgggaaatcgagccaggtttgaatgacgatagggtctatagcttgcctttgggtatgggaggccaagaattggtggaggaaaaagtcatggaaaatgagaagatgaaggatttgaggggccagagtattggataacagagttgtctgttatccgtgtgtaccctgaaggcatctaggatgatgctgggacttgaaatgacagaaaagcagcttttgaaaggattattggggaaattattggatgatattgatgatgagtgagtgaacattttaattgaatggttaagactcaaaggagaggatcagggaggaaggggctggatggggccagtaggcagcaaaggacagacatctaacctgtctctcaccatgaggtgtgagtgatggatggcagagaatgcctagccatgtcttaagaggaagtgggttcctctctggggaaccaactttcagttaaagagggaagtgcaattaacactctaagaagttgtgaatataggagattgattttttcagaacaggcaattccaatggcatatttcaatacccccaaatgccttctggtttcctgataattttcataaaggcctttttggaagatgcagcaaatggaaactgcagaaacgaactgtgtgtggcatcaggactgtggtcacatagtggtgctcttgacaagatacagtcagaaaaacagaaagcaactctgaattcacccttctgacctctacagaagaaaggcttttcttacctttcttgtctgaaggtgtgctggacacctcctggggctcttctgggtcatttggttctggagaattatctcttatctctgacaaaagaaatataagtcatttcagagctcagatccagtgaagagaaagtgctgagggaagtcaatgcaagaactagaaaagtagaaagtacatgcagcccagggccgggaatctgcttgccctaagaattccctggctctgtcttgatttttgccaacttgtggttattgttacctgtgcgaccatcacagggaactagggcacaactgccccacagcagaggctcagtctgatccttttagagagattatcttatggatggaagagaagtgagtgaagaaggtgcaatgaatggaaattgcaggaataaactgtgctgggtatcatgactatagtcacatggtttctgctcccagcagcccctgctcaaggaatgaagctgagagcggaaagtggtgatattgaaatctgatgtccatgatgaaggggaatgtctttgctgtatgaaaaatacatcttattgctttgacgtctatgtgtggatattctttaactgctctatctgtggttattttacttggagaaatagtggagaaggctaaatgccttatatatttctgtatataaggattgtttgaagaaagcaggagctagcctgtgcttgctagcacctgttaacagcaaagacatataaagctctgctagtttttgctgcacaaagaaagacagagaacttgaagccataacaaataaaggctcatctcacatgaagctgtcacctttttctttacacactgcattgagattggtctcaaatgctggcctgcttaggaataggtgactgaggcaggtggcaagcagtcattagatctttggaataatttattacctttcaagttatattcataatatcaactcttaaactccaagtgatatagaaatgaccagggttgaaagtgaaaattccccacagtcaggtgggggcttggaaggaggaccatccatgtctgctgcagcaattcactattagggccacacagtgtttttgttcatttgctttgcattttgacagagccgttttgagcactactttattgaagtggcctcagaagagtggctctgtcaaacagtccagcctgactcagttcccttgctttcccctggggttcctgccacaaccctttgtggcaggtgaatgtttccctttcaggcgctttgtggcatttggagtccaaacctacaggcactggtggggctctgtccatcatcatccgtggccctatccaagtctaccttttccagacttgcctcctttgccctcccccagggactctgtatccattcagaggtcgggtctcctgcctgttcaagctcccaagtgctgggtgaactggaagctgggccaagattgctgagaggcaggaggagagccccctctctagaagatccgaatggcttttcctcttagtaaacacagaaacaaaggcaagcttttaggttgaccaaaccaagattacctggcatagagcccaagggagagtggggcatctcttgagggtcttctttatctcttatttgggggatcaggttgtcactggccactgaatggaggaagaaaaagttttagatctcaggaacagcaagcagggaccagaatgaggagaaaagagaatgctctattccaacaagtaaaaatgacggggtaacagcaaccaaggcctgggaaaggatggcatagagtgggaaagtaagcaaccattcactctcaattagccacttgttcttccattgctgttagcttcctgattatgttaacctttttggatggtaggtattagaggagtggatgcaatattatttggatcgaagaggacccctcttctcagtactggagagctcagaatccatggtatcatttttgacaatgcccaatatcataccattcttacgtttaatgtaatcaaactccattatgatgatggtttggggaggacaagtgatacaatttgagaagctaaatattaggtctagcagacctttaaacattttatcatcttttctagtaattttgataacattgttcttagaatccaaaccatataaaaatgaagaatgttgaaactctaaggcccccataatcaggtgggggtgaggaatcagctaagggtcactagtgtgagtgttacgcaggttacttgtcaattcagaatggtgttttggttgttggtttgttttgcattgctgcgttggtgaattggccccttctgtttcttttcctttgtattgctcagttctttttcccagggttcccaccatagcctcttggttggcagacgcatgttctcccttcacagtcaccttgagctaagcggtatcagccccagtcagtgttaccttgcacagtgctagtgaggaggctgggcatctcttctgagtcttcttccgcattcattttggatgttaacttgtcattggtcactgaaggaggaaaggaaattattacagattgcagggactggatgtcagggagaagagtgaatgttaaaagtgcctggggcagatagagcatcaaggcacaagggcagagggttggaatgtcccgggagtgggaagcaggtgttctggactctaggtcttacccaccccccggcagtgctcataatccctcttgaaaagggttgtgtttgggtagatgggtgcaagagaagaactaggacaataaaagtcaagatgctgggattggcggcaacatggcacaggcaccttaggctgaggatatacaggtgttggatgggatctgtttctcacctgaagtgcttcttccttcctggatgagtgcagggagaggcaggacagggtcagatgggctgggcgactcactcaggatctcatcgctttgctgggaggatgttccaggctcactgactcttggcgcacagggtgaacagcttggttgagggggttgtggtgggggcagcgccagtggggtatggagggagcttccttctgctaggccagttggggcttcaagtaggattggtgtgtctctgctctgccattcataggaagcaccaactgggattggtgaagggacacacatcagtaccctggagactcagaattacttggggaaggggatttcttaatacatgccttccaataggatgggggcatggagctattcattgtcccccaggtgcagagaactgattcattgtcatcattatccatttgtggccccttaatattttatttatctggtttgggcattgagtgctacaataagtgcatctaagccctgatctaataccaaaatggtttcacacataaaagttgagtttgggtttgtacccaggggtttaacttttctttaatcttggtgtcatataatttagtcaataatgaacatgctatagttttaaaagaggtctctgttttaataaataaacagatcatacttccccgaagcaaataagagaaaataaaaattccttagcagggtgtattaggacatttatattctggtttctgctcatttctgcagagtcagcttctgtgccttctattgtaccctgtgatctggtcacacccagctttctctcccatccacaataccccagacccttggctttctgcatgctattcccttgcatggctagtgctgggtttctcttaagattcttctccatcatttatttcagaagtaaatggtctcaaccagtgaatggaaaaaggaaagtaacttcaaattttggaaagggattcagaacaaaatcatcaggttgaagatcccggaagatgactgaagctcagccaggtcaggggcacatcagtgtgtgggtccccatggttctcagatgttcttaccatagcctttaaggccatgcctctcctagtattgcccagatgctgccaggacagtgggccctctgtagctgcccctacctggaggtggacttgcccctttcactgtccatgtagctcaagaaatcatctctcccttcagggggaagccttttgatggtgaagtgtcagagagcaaaggaggaactgtcaacaatggtgattccactaatgaaaatatccaatgtgagctggtggtcctttgcttgttgttctgaggtaagtgaacatgtgatttggccacagtgttttacttccaacctaaaatgactttactgcctctctctttccctggctgatttcttcccaactctgccactgttctttttcctactcctttatttatccagtctcttttctttctctacgtacttcatgatccattctttctcagaccctctctttctgtggctatgtttgcgattcactccctttctctgtagctaccttttttcccttctctggctttacaatctgccttccagctgtccttgtccggactagtggttaaaatcttgggccctggtattgggagacccaagtaggactcttgctctgcttcttaaccaacaagtaattttgggaagattacctctgggctttaatttctctgtcagtcaaatggggttaaaaatgacttcaaagggttgttttaaagatgatgtgagataatcaaataaagtgtttgcgataaggcaccaaaaaaagatacttattattatccgtccacattcattttttcttcctccctggctctccttgtccttccaccagacctgatctttgtaactttgcatttctgtcaccttatgcattccctatagattttccagtatgccaaattgtatgatttttttccaaattcatagaacacataagaaatgtttatgtcctctagaagttcatcttagagagttgggatcagctttagcaaggggctgctcctgcagctgtaccaatgagagaatatggtccattccaccccagagagaaggcgggggattaacgtgcatattccacagggctagaagtaaacccagacttttaccatagcaactttttaaatgcaaaaagcacttgagaaatctcattaccacgtttgaagcttctgtaaatcgtcaccagattgggatattcacgcaggttaatttgactgaacaatgtcaccagaagagacaggttaaaagtcctctccagttgggtgagaatgttgtgcaccactctggatacagggatcaaatttctacaggcttccagagattcctataaaaatggagtgaaggtttttataaatgactataaaattgaatgggaagttatacatttatggttttctaagttttaagaaagctaccttactcttttaagaagaaattcaacataaaatatatagtcacattctctaaggtagagcggtcacagttttacatgcttatttttgaaactttacacatatttggatgactagcaacaaaaataaataatttagctttcttaaagtaagtctatattctgaatccaactttcaggcacatttgagacgagagaaatttgaaggaaggaaagtggggttaaaggatgctactatgtaattgattctttaaagctgtgggcaggatacttcagcaatggttctagtgatggtcacagaggcaattctgctggttgcttgtgagcctctgctcagtctctctctgtgtctctcaaacttgagataagcctgaatggattccagccacagagaagtcaccctgagaattttccttgcctagaggatggacaaaaggagaaatacggcaagagagaactgattgcaaataattattgaacatctactaggctcggtcagcgagtctttgggtacacagcactgaataagaccaacatggagttgcctatatttgggggtcagggtaggcactgtcaagtggagaagatgagcattaataaacacaaataaatacccatttacaattgagagtagtgttacggagggaaagcatagattgctatggaactgaataactaaggggtcttcatgagatgagttggccaaggagatgtctctgaggagtgctctctgggctgtgatctgaagagggagttggggccaaccagactaagactaagggaagattattggcacttccttgagtctagggctcaattaatgcttttaaaaaccaaaattatataaaaataggtccacttttgtccacatagcatatctcccagtgcctgcctgtctcacatcagaatgcactgtgagcaatattagctgttataaattgggatgatgcctgtagtgagttgaatgttggatggatatatctcagccaagatatatccatctagaatctgtgaatgtgaacttatttggaaaaagtgtctttgcagttgtaattaagttaaggatcttgagataaaatcatctttgattagggtgaccctaaatccaagtgtcctcagaagattaggtagaagactcaaaagagaggtgatgtagagatgaaaacatatcagagtgatgcatctacaaggcaaggaacactaaggatttccaacagctaccagaagctaggagataggcagctatcggattctcctcagggcctctagaaggaaccaaccctgtcaacaccttgattttggacttctggcctccacacctgagagaatatatttctgttgttttaagctacctggtttgtagtcattgttacagcagtccttatgacaccctagaaaccaacatagcccctatgacaccctctctcctaactacccccaccttctgtgataatgaacatgcctgggctgggccttccaaactctggaagccctggtggtttgtggtttgagactttaataatcaggcatattggtgggggctgggctgccatggaagggttcaacatgactcaccatgtacattctcttagtgatgatggagttgtctaggaggccttcaaagaagggaaatggcttgtgtatggcataggcgatccccagcttctggtgcatgaagtgctgaaaaagagcctcttccatggctcttgtcatggtgaacatcctatggaaagaggcatgataaaaaatagaagcaaaggctgggcgcggtggctcatgcctgtaatcccggcactttgggaggccgaggtgggtggatcacctgaggtcaagagattgagaccatcctggccaacatggtgaaactctgtctctactaaaaatacaaaaattagctgggtgtggtggcgcacgcctgtagtcccagctacttgggaggctgaggcgggaaaattgcttgaaccggggaggtggaggttgcagtaagccaagattgtgccactgcactccagcctgggtgacagagtgagactccatctcaaaaaaaaaaaaaaaaaaaatagaagcaaaaccttgaggaatgtgggaagcttctctctgcattaaatgggcagatctaaaggtaagcattctggtcccaaaggcatccttagtagcctgcaaagcaatgtctgcctaaaaggctcatgggtataggaaacaaggacaattcccagcaacaatggaggctgagagtgactgaaaatataatgacagaatcccaaggcgctgcaggtaaacataaggaaggtattaaaagtagctaatatttatggagtgtttcctgtgtgccagactttgttctaagggtttcatatgcagtaacttatctgattttcataaaacccttgcgaggtggttcctatgactgcacctgtttatactgttgaggaactgagacacagaaatgtttaataacttgccccagggttgcacaactagagagtggaagagctgggagcaaatcctgattccaggcttacagtgctaactatgtgttctatggccacactgatctgggttaaacaagatgacctgggctacggctgaagccattaactagcaatgctcatgcaacagggaccaccctaaaatgggtagagttcagctggaaacctggtaatatttggaaactttaacgaaccactcccaatcttcaacacaaatgggccaagcataaataaaagcatgagggctgagaaaggcatacttagtaaaagtgacttaactgacttgttcactgcaaccatttcatgtctcagacatgcgccttttcccatgcccatgcagcatgtattaaagattggccatttatggactgtgaggagatatcaataggttataatgggaagaaagtttacaaatgacattcttgacaaattgtcaagaaaaggaaaagcactaacaaaacattcaatcaacttgacagtttttaacaaacagaacaaacatggattccacttttccaacttcattttgtgttgaacagaaaagtaaatcgtaattaacaactgtttacagggatttaatcccagtggcagattaagcaccctagtctctttctcctcattccccaatttttttaacttggcagaaaaaaatactcatgaaaagaataatccgcaatcgcataggaaaacaagaaaagatgccattgagagtctgtggtggtaaagaagtcttggaagatagagaacagataggagagaaatctactatccacaatatgcacaggggaaggagatagtgcaaagatcagtgcaaagtcagagaaaggcagagtaaacatatactaagaagaggaaggggtcttggaggctccttttagaacaattcattatacagcagcgctcagaacaggaagtctagagcttcctcattcttcatctgtcatgagtcccaaagatgaaagggaggcacagagaggtttagtaactcacccaaggtattcagtggcaaagcagagcttgtctgactctaaagccctgtttctttctatgcaagatactacatctcatatatgactgttcagatttttattatgtaaagagattttgcaaacgaataagcaaaagacaaacatccaactagaaaataaaaaagcaaaatacatgaacagagagtgataaaagaataagccaaatgtgcaatgaataatacgataagcatgttaactagctagtagaaagcataaagaaggccaggcatggtggctcatgcctgtaatcccagcactttgggaggttgaggtgggcggatcagctgaggtcaggagttcgagaccagcctggccaacatggtgaaaccctgtctctactaaaaatacaaaaattagctgggcgtggtggtgcacatctgtagtcccagttactcaggaggctgaggcaggagaatcgcttgaacctgggaggtggaggttgcagtgatctgagatggtgccattgcactccagcctgggtgacagagcgagactccgtctcagaaaacaacaacaacaaacaaccaaaaaaagtgtaaatgaagacaatttgataacatatttgtctatcaaattggccaagatagaaaataatagtaataatctcagacactgtgagtgggaaggtcaacaggtccaaatgttctgaaggctgatttagtaatcagtgtcaaatgtcctaaaacatgtgctcctttgaatttccacttctaataatttatttcaaggaaataatcatgtatttagagaaaatatataaaaagttcatgatacactagagacgaaattaaatgtactctcatttttttcttttccaccagcttcccaagtacctctagtcatttacacaatggataacagatgagccgcctattgcgggcactgaaggatcagagcttaggtgagggtagagggcaaatctcggctccattcacaataacaggctggactctggcgaaaaaaagaggtgtcagtgttccctccatgtgcccccttttaacagtctcctaataagtaccacatgtctgagctctgagagagcctcagagtttaaatagttgaactccaccctgcagctgctgccgcgaagttaactctaagagctgcagtcaccaagagcgaagaataaagcagcaaagacagaaactcacctggactttgagtttgtcgttcctgcccctttccaggggctgggacagggatcactcctcaagattgggagagttacagggagatgctagcaggcaaaacaggaagtctgtgctttgacaaacgcagtaaggggccgggcttccgagaaaagaaaagtgaaagttttcggagtttgccaagccggaagctgaaggcaggtcggtgcctgcagcctctctccacctcctcatgggcacttgtgaggctcccaggacgtcttggcagttggggtttgggggagggcgtgttgccagttgggatcagcccagagagggaggtatgggaggaggaggcataagggtacagccccagcggcaataggaactgggaactcagcgtccaaatgcttccctaaccacatctattttcccatgacttgtcctcattctgtacattttaggttgatgaaaatgttctcaaactggattgtggtgatgtttacataactgaatgaattcactggaatttatccagtgtgttatcaaactctaacaacacacaaaaaaacaaagagaatgtgccagaaatgcctagaacttgtcaggataagattattacaggaagaaattgaaatgaaagggaacctgcacatgaactggaattgtgcagaggcaggcagacctccaggcagaaaaatggctgagagctgggcaggtagttgggagccaggagtctgaggcagaactgggacctgctgattccagagagcagtaactcaagggctggcagggacaccccttctcatgccccttttaaagatccctaatgtacattgacatgtggggcctatgaaaaatcctaaactattggccaggcacagtggctcatgcctataatcccaggactttaggaggccaagatgggaggattgcttgagcctaggagtttgagaccagtctgggcaacatagtgagaccccatctctacaaaaaataaaaaaataaaaaattaactgagtgtggtggcatgcaccttgtagtcctagttagtgaggaggctgaggctggagacttgcttgagcccaggagttcaaggctgcggtgagctatgattgcaccactgcactatagaaatctgtgtaactttgggccaggctcggtggctcacgcctgtaatcccagcactttgggaggctgagatgggtggatcacaaggtcaggagtttgagaccatcctggccaacatggtgaaaccccatctctactaaaaatacaaaaattagccagatgtggtggcgggaacctgtaatcccagctacttgggaggctgaggcaggagaattgcttgaacccaggaggtggaggttgcagtgagccgagatcgcaccactgcactccagcctgggtgacagagcaagactccatctcgaaaaaaaaaaaaaaaaagaattctatgtaactttgattaaatcaataattctcaaatgtatttgacccacaagttcccctaccaggacatccacaaactcctcagataaaagatgggagacatggatctaaagtttaagaagctttgaaaccaaggctaactgcataagagcaagcccttctatgcaggcacaaacagcatatcccaccctagtatgtacagaatagcagacccggccttgcgggtaatggctgtgggtgaaacagaggcatggaagccacagccaggaaaaattcaatgctaacagctgaggagagggtgcattgatgcctcagcatgcagtaacatacagcgctgtgatgcaggggatggcggtggtaaaggaattaaggttattttatgcaaatgtcacatgtcacttacctgaagcccctccccatcacctggaaagccccttcatgggcatctgaggatcctggcagcaagaacttcttcctttagatctattcagagatacaccaggcaaatgcaaaacaaacaaacaaaagtaaagcaggagtgggaaaataaagtcaatgtcaaatcaggcaaaaattgttacatgaaaaaaagacagctgcgaatgaggatgaaagatgtttattctaagccatatatgcttggctgggcacagtggctcaggcctgtagcttagctagcactttgggaggctgaggcaggcagatcacttgaggccaggaattcaagaccagccttgccaacatggcaaaatcccgtctctactaaaaacacaaaaaaattagctgggcgtggtggcacatgcctgtaatccgagctactcgggaggctgaggcatgagaatcgcttgaactcaggagctggaggttgcagtgagctgagactgcgccacagcagttcagcctgagcaacagagtgagatcccgcctcaaaaaaaaaaaaaaaaaaatgcatgcttgagaacatggtaataatgggaaaacgtcacctgttaattcacatgctagtgattatgtactgagataaattatacataattctttttagctccattttattgaggtataaaatttattcattgtaatgtacattttaccaaatgtagttactacaccagtcaagatgtagaccatttctaggcctggagagtcgcttgtgcctataatcccagcattctgggaggtcaaagcaggaggatcgcttgagcccaggtgtttgagaccagcctggacaacagagcaagacctcgtctctacaaaaatacatttttttaaattaattgggcatgttggcatacacctgtggtccccgctatcagggagacagaagtgggagaattgcttgagcccaggaggtccagtctctggtgagcagtgacagagtgagaccctgtctcaaaaaaaaaaaaaaagatacagaccatttctgttaccctagaaagttccctgtgacctttgcaaacaatcccctccttaaggccagcaccaggcaaccactgatctgctttctatcaccacagattagtttcgtgtgtattaaagttttttttttttttttttttatcaatgaaggcacatggaatgcatttttggtgtatggctttcttttcctcatcatcatgcttttgagattcatctctgttgttgtgggtcagtaatttattcttctttagcaggtatgctagccaccaagatcctgctcatcctgtctgatcagcatgatgtcatcaatcagtctgacttttttttttttttttgagacagagtcacggtctgtctccaggctagagtgctgtggcgcaatcttggctcactgcaacctccgcctcccaggttcaagtgattctctttcctcagcctcctgagtagctgggactacaggcacgcatcaccatacctggctaatttttgtatttttagtagagatggggtttcaccatgttggccaggatggtcttgatctcctgacctcgtgatctgcctgcctcagcctcccgaagtgctggggttataggcatgagccaccatgcccagcccagtctgacattctatgggatgtccaggtgatccagatatctttcaactatattatgacaaagggcaagtgagtcaatataacctgcctggactgcctactttcttaacctagtcctctggctttcccatacattctgtgagctacccaatatagttctaagaaattgactttttgcctgagttagccagagtcagtttggattacttttactcccaaatcctgactgataaaaatgttgggcaccagaggttgaattataggcaagagatattcaaggaaatatgatcaatctgggattggttatctgacataattggacataaaaacagtgaacatccccattagcgttcagagtcaggaattttggagttgtgggcaaataggggtaagttggcaaattaaattacagcactggattgtgatcaagactctatacaattcatttccccaattccaggtgtcagattctagcatgcttagcaaaatgaagagaaatcttccaggtagaatgaaagcattgatttacctttggggattatgacctacttggcctaaatctggatgggggaacagagccaggaggcaggccggagccttctgactccactggtcacgtggcagtaaaggaagacattgggaaccagagatggtctgatggtcctacatatgcctggcccaggaatcccttacccaggagaggttctgtagtgagcatagggaaaaacaagatagtgggaaatagaactgaaatttcaggctatccttacctgggctaatgcatggtgttgcaaagtagggctttctagtagtagcagcagtacccctgaagtaccaatcttaccaccagtcagctgaggaacaccaatggccttgtgcttataagcaaaagaagctggcacattttcaaaaatgtccagttcattggtgtcctgggtctgcctactgcctaagggcagagagaagagagagaggggatgctggagcaggcggtatagtctgtaccaggccttgttggagccccatggagactgggaggagaggacagctgtgtctaacagaagcccagcatacttttccttcttgttttaaagagggagggagagggagggagagagagggagagggagggagagggagggagagagagggagagagagggagacagaggagagagaggacagagagagagagagagaggagagagagagagatactggaaaaggtgtcctcatcagtgttctagagtttgtctcaaccagattggtgtttgttcctttggtagaaagaaagcagaagtgtggaaggggtagaaatttcttgcactctgtattttgcaaacttatgtatgcaaatttccttgcatatgtgtaatgaaccagaaaaagtaggattcaggagcacatgttttggaaaaatactgctttgcctctggcttttcaatcctcactactgttctgtcactggccctggattctacccataccctggctctcatcagccccctgtctttgacccatttttctgcctggatttctagtcctgtggttatattttttatatttgccctttgcttccatttgtttatcactcgactttatgctgatatagtgtgtttttgtaaattgtttcaaatcctttacagaatgagggctgggtataaatgaaaaattgtgtgcaaacataaatgtaatacagctatcctcctgtatcatattgtccttgaaggtctagataatctcagctccaaaccctttccccatccagtgagaaggctgtcactctcctcaagatttcagtgaaatggttgaagctcatttttttcccagtcacccctggctgctgttgtaaagtgcccacatatttgagaaaacttagaattgcacctcatttctctgcccaacctcagcacttgcctttggctggaggagttgagagagttgtcttttacctctgtctgctttcatggagtgctaagagcatctcccccactttctaatgcatgctatttcagttctccctggccccatgtccaaacactgggcctaagccatccagcccaggctcactaaggtgcatggccagccctggagcctgactgaagatttgaaatgtctggtcttcacttgtccttctcagccacctcagcaaggggtggggacaaatacagagtttacttcctcctcatgatgccaccttacctcaaaacaactttgatctgcttgagttgaatgacttttccaccctctttccttggcaggaacaagtgaccctgtcttccgtggcctcgtggggctggctctgctcctcctcccttgactgagagacgtcatggagattgggtggagggaggactgtagagttggtgcacccacgtcagctagttaggcaatttcacttttcttttcctctttgactgagcaccgaggggcagttggcagcttcacctcagagctgcaggaaggaacggggcagtgaaaatcgaatcgggtgtgatcctaggccaagctcatggcccagcagggccagcaggggcagatggcaagtggagacagcaatctcaacttcaggtgggtcatcgtctcctttcccgtctgtccttcatctctggtagggttccctttcatacttgttatttaatgtctacccagcttcactctacaggtatacaatagaattcagttacaaataaataacgaggcaatcagattttttaaattgcagggattggctgttggagaaactcaaggatgccgtgactcacatcatcttcctattctcttacatctgcaaatggctggactggagctgtttgaacatcatgcctgttctgaggctttgtgtaggattggatgattccccgtgacctctgaaccctctcttctcccccaggcctcctttatccccactccaaaagacaactctgtctaaaaaggatctttttagaagaattaaaatccaaacgcctgtctgttgtcacactttccaggctgtgtagttggggaccggttctgctctgagcccatctatgtggctcttagccctagaatcacttcaggatctctgaatacttggtaggaggaagtgaaagcagatgagacccaacaaaaaaggcaagcaggtagagagtgagtgctgcttctgctttttttattcttctgttctggtattttttacatatctggtcagagaagcctggaaatcatctttaaaaaatgtaagacaatgagaccagtctgaccaacgtggagaaaccctgtctttactaaaaatacaaaattagctgggtgtcatggtgtatgcctgtaattccagctactcaggaggctgaggcaggataatcgcttgaaccagggaggcagaggttttggcgagccaagatcacaccattacactttagcctgggcaacaagagtgaaattccatctcaaaaaaaaaaaaaaaaaaagacaagtacatcaatacggtcatttcttcttatctgtggattctgtatccatggatctaaccaaccatgaatgcaaaatattttctaaaaattaaaaacataaataacaacaataaaaagtaatataaaaatttaaaatacagtataactatttgtatagcatttacattgtattaggtattataagtctagagatgatttaaaatatacaggaggatgtgcataggttatatgtaaatactacaccttttatatcagggacttgagcatccatggattttggtatccatggagggtcctggaaccaattccccctggataccaagggatgactgtacattcttgataaaaatgaaaatgtgtggaatgtaaaaatgtatggaaacttgtctaattgggactctgtgctaaggctacttctggcgctggtacagccccaagaaagcaaaagctattgctattatcagcagtagtggtggcaccagactggttttcagtgcccagtgccaccactcccagacaggcatccctgtcatctctctttcacttgctctctagtgaagggaagatgagccagcggagctcaaagtccagccagcccatggtcaccaagcaggaagaagacggcactgagaggtgacaatgggctaatgctaacctcaaagaatgagttaggaagtgttgcctctgctcttatttttggaggaaattggggaggatgatgtcatttcttccttaaatatctggtaggattagctagtgataccatctgggcctagtactttcctttctggagggctattaattatcgattcaaatttctttaatagatgtaggcctattcagacaacctatctcttgtgcaagttttggttagtttgcctcttaaagaatttgttcatttcatctgtgaccaaatttgtaggtgtagagtccatagttttcctttattacctttccattgtccatggaattcgtagtgatgacccttctttcattctgatgatttccgtcttctctatttttttctttgttaggctggctagaggtttattaattaactctttgaaaagaaaatcagcttttggtttcattaagtttctcgaatgttttcctgtttcaatttttttaacttccactttaattttaattttttttcctgcttgcatcaggcttaaattgctccttttttctctagtttcctcagatgaaagcttagattattgacttagatctttcttcttttctattgtatgcatttaatactatacatttccttctaagtgctgcttttgttgcatcccattcattttaataagttgttttccttttcatttacttcaaaatatttttaaaattcttttaggacttcttatttgaccctagaactcttttggttaatctggaaatattttggaattttccagctatttttctgttactgatttctagtttatggtctgagaacaaacttttaggatttctattcttttaaatttgttaaggtatgttttatggcccaaaatgaagtacatcttggcaaatattctatgtgagcttaaaaagtacatgcattctgctattgttaaatggagtaccgtataagtgtcagttagaccaagctgattgctattgctcatcaggtcaactacacccttactgatttttctgcctgtgtgatatgtcaattaataaaaaagaagtgttgaagccttcaataatagtagtgaatttgtctatttctctttatagttctatcagtttttgcctcatacattttgccattagtttgttagttgcatacacattaaggattgtgtaccttcttggagaattgacccttttatcataatgtaatgtccctctttaatccctgacaattttccttgttctgaagcttctttgtctgaaattgatatagctactataccttttctttgattagtgttggcatggtatatcttgctccatccctttatgtttaacctatctgtatttttatatttacaatgactttcttatagacaacatatagtcgggtgttttgtgttttttatgtactctgttgatctcttgtcttttaattggtgttttagaccattggcattaaagtgattattaatatagttagattaatatctaccacatttgtaaatgtttcattgtacctatcgtttttatcttttcttccttttttcctgccttttctggtttaattgagcattttatgcttctattttctctcccttcttagcatatcaattatacttcctttaaaacatttttagtggttccctgaagtttgtaatatatatttacagcgaatcatgcccattttaaattacactatatcacttcatgagtagagaatacaccatgcaactgaatgtcccaaattctgccctcctgttctttttaacattgtgaaatgactgacaatgttaaaaagaacaggagggcttccagtcattccatttatttatgtcccataaccactcaatatgttgttgattctattaatttgaataaatggcttcattttaggttaacttggagtaggaaaaatgaaaacattttattatatctgcatttatttcttctctggtgctctttctttctctatgtaaatctgagtttctggcccacatcatttttccctttgcatgaagaaattctttttttttttttttttttttttttttttgagatggagtctcactctgttgcccaggctggagtacagtggtgcaatctcggctctctgcacactccgcctcctgggttcacgccattctcctgcctcagcctcctgagtagctgggactacaggcgcccaccaccacgcctggctaattttttgtatttttagtagagacgggatttcaccatgttagccaggatggtcaagaaattcttttaacattttcacatggagtaggctttctggcaaagaatttcctcagtttttgtttgtttgagaaaatctttatttctactttacttggaaggttaatttcacaggatatggaagcctacataggctttttttttctttcatcactttaaatatttctttccactttctttgcttgcatggtttttaatgagaaatctgatgtaattttatccttgttctttcacaggtaggggttttttgttttttttccctaccccctggcttttttcaatattttctctgtctttcgtattctgcagtttgaatataaaattgtaattgccaaactagactcttcttgtccattgcccagaaaagccacacattgagaatagtaggagttgcaggagagagagaatttaataatcgcagggccagccaagcgggagatgtttctgaaatccatctccccaagaattcagagactaggctttttaaaggatagttaggcagacagggggctggggaacagggaagtgctgattgcttaggttgggaatgaaatcacagggggttgaagctgtgttcttgtgctgagtcatttcctgggtaggggtcacaggacctggttaccaatcctgtggtattagctgttccattagaatgcaaggtctgaaaaatacctcaaaccccagtcttaggttttacaatactgaagttatctataggagcaattgcggtggttatggatcatgtgacctccagctacatgactcctgaaccataattctaatcttgtatccaatttgttagttttacaaaagtggttttggtcccagagcaaggagggggtaagttttgggaagggattgttataatctttgttttaaagttaaactataaactaaattcttctcattgttagcttggcatacacccaggaatgagcaaggacagcttgtgaggttagaagcaagatggagtcagttaatttagattcctctcactgtcatgatttttgcaaaggtggtttcaatatgtctaagtctagatcatttgatatttatgcagcttggtgtttgatgagtttcctgaatctgtggtttgttgtctgtcattacttttggaaaattcttggctatcactacttgaatatttcttctgctctattttctctttcttctccttctcgtattccaattacatatttgtcacactttctgaaattattccagcattcttggatattgtgttctgttttgttttttcctttttttttcctctttgcatttctatttgagaagtttcttttgacatatcttcaattcactgattctttccttggccatgtccaggctactgatgaactcatcaaaggtattcttcatttctgttacattgtttttcatttctagcatttcatttttcattatgtctttgagttgtcatctttctgctcacttaaccatctgttcatgcgtattgtgtgcttttttctttagagcccttaacatattaactaaccatagttattttaaatttctgtctaaaaacttgaaaatccatcatatctgagtctggttttgatgattactttgtctcttcacactgtgttacttcttgccttttggcatgtcttataattttttttttaagtcagacatgataagtcaggtaataggaactgaggcaaataagccttcaatgtgaggttttatattaatctgggtaggaaatgggccatatctaatgtttgttctagctgtaggtggcagaggtgtcaaattcctctagcgttcttgtttttctttcccctgctttctctgggtttctctgagaactcctttttaaatagtctgtttcttgtagttcttccagctgtaatctgctcttattatacaggaaccctgttgatggaatggtaacgtgtcagagggggaagtggtctataatcttatgattacatctcgatcttttaatggaactgcaccttgggctattacttttaaaagaatttctccctccacccttttttttcaatttttttgagatggagtcttgctttgttgcccaggctatagtgcagtggcgtggtctcggctcactgcaacttctgcctcctaggttcaagtgattctcctgcctctgcctcctgagtagcagagattacaggtgcctgccaccatgcccagctaattttcttttgtgtttttagtagagacggggtttcaccatgttggccaggctggtctcaaactcctggctttgtgatccacccgtctcagtctcccaaaatgctgggattacaggtgtgagccaccgtgcccagcctcacctccaccctttttagaagtgacaagatggccagaaggggctagattttggtagtcacccttcccctagaatggttaaagcattttccctggagagcaggcccttgtcatggagaatgctttggctttttaaaaacttttcttttccctcttcttgccagaaggataaagagatttttcttggggtttgtggaggtaaaatccataaaaggttgggggcctgccctgagatgatgacccccaggagtttctcatgctcatgctcctccacactcagcctccagcaattcatcaaacataccaggctatgacttcagtgcctgctgcctcagatagttgatctcggctaattctctggatttgcctgtatctccagattttggggcagtttgccttgtgactttggttatttgagagatagaagaaaagttgttaattcatagtttgttcagcagggttgttgttgttgttgtgaggatgggagcgatgacttccaatgtctttgcgtgttgaagctgaaaccagaggtctagtgaacttttacatttttgaagtttagacttttttcttaagacaaactttctttttgttttaaattttggttttattatagtattatcttatagccagagcatgtaacctgttcaatttctcttcattattatttattgaaattacttcagggccaaatacctggtatgatcttgtgtgtttaacacagtgttattaaaaatcaattttgccagtttttaaaacttacattttgtgtatctttgttcttttatttttatctacttgagaagctaaggactggaagtaagatgttttttaacagccttgaaagatttccccattagtaatctttaatcttactttttaaatgtgagtattgagaattttaccttctttctcatttgtatttgcttaatgaaacttatccatcttttgactgttaacatttttaatgttattttatctctgttatgtctcttgtagttagattctattttgaccatttataatttaagatggtagcttaatctgttttaaatatcttgttgcttatggattttttatttttatattttatgcctctttattttctataagaaaaagagcatgtttttctttctcattattttgtaaagtttgtagcctcattttgactctatttgttacacttgggtttctaattaattctttaatgtatatttctctaactgagaccatcaaatttataactatatcatttgaatttgtatttgaaataagttacttaactcaattttttacttgtcctcactcaatttaaaaaactttaccaagatatcgcaccactgcactccagcctgggtgacagagcgagattccgtctcaaaacaaaacaaaaaaaacattaaaatagaatctaaagtttaagattgaaattactataattttattatatgcagtatatatcctctctttttagaacagtgcttctcaagtatttgggttcaggatatttttatatttttaaaaattatcgagaaccccaaagaactggcttttgtttattgggttatatctgttgctatttacgatattagaaattaaaactttgaacacttaaaatatgtatttattcatttagaaataatagtagtgaatttattacccgtgaatatgtgatgtgtttttatgaaaaataataaaacttttcaaaatagaaataaattagccagaggattagcattgctttacatttttatacgtcttttaaatataagtagaaggcagctagaccctcctatctgcttctgcattcaatccgttgtgacatcacaggccatttagcctctgaaaaatttcattgtatattcatgagagaatgagaaagataaagggaaaataatatgttattatgtgaagagttttacttggtgacacctgaaagggtcttgcacaatcctagggggtccctaaccccactttgagaattactgttctaagataatttatacatttgagacatcagtattgtaactggttttaatgatgcttccagttcctctacaataaggctttactgatactgatttcttgattctgttaatgtagtacatcatcaaataattcgtcctacacagtgtcagtaaaaatggagtagggtgatctataggaacaaacaattcccaaatctcaacgggtcaccagccctctgcacagaggaccctcatcctggactctgtctctggctgaggagcagccaccccatctgaaatgacagtcactgtggtagaggaacagagagcatgcctaaccaggtgctgcctctgagctcttctgccagagtgatacccattgctccaagggaggtacaatcttaccttggcccagaagaaaagaacattgaaaaatgtgtgaccaacacagaaggtgcatgagcaaaatattctttgagtccttgtctatctaagtattgattctgccctcatacgtgaatcattgaataaggtatacatttttccattttaatttttttggacccattctcaagaactgaatgggtatacactttttttagtagtttcctcttacctctaggtttataggtttgcatcattgctttagacatttagggtttcaaattcacttatttttccctttagggcttttccccatatgttctgggaaattctccctcctttatcttataaaaattttcattcactttttaaaaatttcacaatcattttgaatttccaaggtcgttttattttctggttgtttcttttctgcatggaatttttggtacaatatattctctttctgtgtgataatatttgttgtttagaaattcttttttgttccctgaaacatctgtatttccgctagggtaattttttgccttttgcttatcttggttttactccttaatgttgtaggtttccacaaatgctgtggtctgttgtagtctgttcatgcttaccagcaagatgctgaaaagtaaacttgaaactccatttaatgagatgggcttgcaaacttgtgggcttcactgagcaaataccaaatccctgaaggtaaaggccttttctctgagtcatttatatttttcttaagaggaaacctccagtcttctgcctgattgtgggtgttctgtgtcgtagagcaaactgtttttaattttgcctttggaacaatctctcgattttcatctctgcatctccttctcaaccaccactgcatctctgggaggctgcaggacacgctggatccttttctgacctcaggaagcatcctccaccttcaatagcaatgagtacccctcagaccactttttctctttcatacttaggttaaaatttctcatctaattcctttctcttcatcattgtaactttaattcctttactgtcattttaggagatattctagtgaaagaggagaaaaacagttgtcattaatcaacgattttaaaccagaaggctttttcttttttaaaagaattcaatggataaatggtgcatgtctggagaatgggaaattttagtgatcctctattctatcctgatgcatgtttaaggaatggaaagtcccaatgaccatttcctggtgggataaaaaaaatcctggaagtcttcataccgtttagaaatacagataaatttgttaaggcctattagcaaggggaacaatttagcaagtaggaatcagaactacaaacttttgtgattaaaaattagtttcccaggcacagccttaatgtctgaaatccagaggtctccaagtttagacagattaatgtgtcctagttttgcatatccacacaaatctccatgttggaccagagaaagagtgattttcttgtgactgtttttttttttttttttttttttttgagatggagtcttgcctctgtcactcaggctggagtgcagtggcacgatctcagctcactgcaagctccgcctcctgggttcacgccattctcctgtctcagcctctcgagtagctgggactacaggcacctgccaccatgcccggctaattttttgtatttttagtagagacaggtttcaccatgttagccaggatggtctcgatctcctgaccttgtgatccgcctgtctcggcctcccaaagtgctgggattacaggcgtgagccaccgcgcccggccttcttgtgtattcttaatcaaaccttaccagatgagagtctttgaaccaattttatgatgcagaatgccaccctccttttgcagttacagatggaggagatacatctcctttacatctcctgagatttcctctctttgttgttaactaagaagacttgcagttcagtgttaggttctgtaatatctcagccagatttttatttctttctctgtaagttaaagttctccagagaaacagaaccaataggatgtgtatatacagagaaagagatttgttataaggaattggctcttgcaattatgaaggctggcaagtccaaaatctgtagtgtgggcctgctgtttggagacccaggagagctgatggtgcagctccagtctgaatgcagtctactagaggattctttctttcttggggacactagtcttttggttctattcaggctttcaattggttgggcaagccccacccacattatggaaggcaatctgccctactccaaattcaccaatgtaaatgttaatcttatccaaaaacaccctcaaagttggcatataaaattaattaccacagtatcatgtcaattcctataaagattttgacatcttttaattgcatattttccctagagagttcaggtgaaggtctctttataatagtttgattggaacagggtgagcctttttacttctatgtacaggtctttcttaagttcactgttttcatcttttccaccttgatttttcccaaaataaataaattccattcattctggtctccctacaagaatgcttattttatacatgttggctctccattggccatccttcatgtctaaaatcttctaaccaccacaaacctcttggaaactcagtgtctacttccacgttgtatctttgtttcttaggatggtcgcagagatccagaacgtagagggtcagaacctgcaggagcaggtttgccctgagcccattttcaggttcttcagagaaaacaaggtggagattgcaagtgcaataacaaggccatttcctttccttatgggcctccgagaccgctccttcatctccgagcagatgtatgaagtaagtaagaatttccaaatgatgataaaccaggtccatactcaattatgccaaacttcaagatgcaatgagcaggctaaagggcctcctgtgagtggggaccttcaccattctgtaggttaggaggtgacaggagaagcaggcatcacagaaaacctcccttcttctgtagtaaatgttgggggagggccacagtgagggaggtggggcaggagagagaatgggaatgctgtatgggtgcagatcatcctaggtacttgtaaacaatctactaatggtagccataattaaaataaataagtgacctaggcagcattttattccaaagcctacttatttgaaacacttgaaactgagatttttttgaaactcacagtgaagttgtgtcattttaggttacatttggaagtggatgcttgctactgtctctccaaatcattgtttgatctttggacatttctagagccctagaatgcaagttaatgttagcagtggatgcccttagggatactgaggacaaggcttcttcttgtctttgtgaattttctgtgccctttggccaggagtcatagtgggggctggttgattggtttcctggagctcgtcaggccaggccaatcctagtagtggttattgtccatgcaacagaacagccttgttaaggccactcctgaaataacctggccaggctctaaagccatacacaacattcaactttgaacccacacttattatttaaaattactctctccccttaagtgtacaacaatgtcagagagtcaggttcaaaaaattagagtgtatttttatggtggaggacatttaagaagtcatccaaatatacgcaaaattctaacatttcacaagagaacagatgttctatctacaacctaaaagtcttttgtaacccataaatctctagctacataattctccatttaatatttttaagcattttcaagaagcttttagaaacctggtcccagtgacaagagtgatgtattgtgtactcagtgaactggagaagacatttggctggtcacatctggaagcattgttcagcaggattaacctgatggcctatcctgatttaaacgagatttacagaagcttccagaatggtaactatagctctcaacagctttgggggattcaagcccatttcattcattgattcattcattcactcttcattcatatttgacaaatatttgactgagtgactattacatgccaagcccagggggaatataatgatgaaaaaacacacatgtcccatgtccttatggagtttacatacagtgggagtgacagacgttaaccaagtaatcctgcaaatggttgctcagccaggacttgattttgatgctgtaaaacatagggttgaagtctctatttttttgaaggaatacatgagtgatgtcttttcatgggaaaggaggaagccttctctgatatttgcagatatgttcaaagataaaacaattttctttgtattagaaaatttatcatccagtgcagtcctgtgtcaacttgtttctccaaacaaagactggagaagtcacgaagagagcctagcacatactggtacactgaggaggagctgcatgtgaaagctatgaagacagaaaagggggttggtgggggcctttccgaaccatgtggttgaattgcagactgtgggaggcagggtgtgagagctgactctggagaaagaagttgaagtggattctggaaggcttgacaccctgtgctaaggaatctggagtttaatttttggaaaataaagaaggaataaagggcatttaaacgggaaaagtaaaagaagtcagtatgaagaatgggatgtgttgatttgtgaatactataccttgattcaaaaaagaggtatcttgttttcatattatgatacatccaagtcagagaaaggtctagaggaagtcaaatactgtgcatgcctcctttggtatccatgagggattggtttcaggaatacccaccactctcagtcctgaatgcttaagtcccttatataaaatggcgtagtatttgtgtataacctatgcacattgcaccagtatactttaaatcatctctagattacaatacctaatacaatgtaaatgctatgtaaatagttgttaaattgtatttttcatttgattatttttaatttttgtattgttattttatttatttatttattgagatggagttcactctgtcacccaggctggagtgcagtggtgtgatcttggctactgcaacctccacctcctgggttcaagtgattttcctgcctcagcctcctgagtatctgggattacagtcacccaccaccacacccggttaattcttttgtatttttagtagagacagggtttcgccatgttggcaaggctggtcttgaacccccgacctcaggtgatctgcctgccttggcttccccaaatgctgggattacagacatgagccaccatgcctggcctgttattatctttaacttttgtcccacgtttttaatctgagggtgggtgaatccacagatcccaagccaactgtacctaggcacaaattttgagtcaatatttgtattttaaccagggtgttccaggctgtggcaatgaagggaatgatgttacttctactgcccacatctcaggggctctgattctgtctgtggactgtggggatcctcctggccccagcatccacatctcatatgttagtatctggcacttcctgtgtttgggtgacaggtacctgaggctcacgactgcccactgcctcagactatgagtagaaatgtgagaaatgggcagaagtagaatgaattgtaaaaagattgaaaaaagaaaaaataaacctctacttatactacacaacatccacaaaaaaataattcaagttggatcacaaatctagaagttaagactacaagtataaagctgctaaaagagaaaacataagacagtgtgtttgcaaactgagagtaggcagtaatttgctatacaggacacaaaaaaacatggatcataaaagaaaaacttggtaagttagatgtcaacaaattaaaaactatgcatccaaagtcaccattaagaaaaggaaaaaacaagccatagactgggagacaatattttgcaatacacatatctaacaaaggattgtactcacaaaatatgaagaactcctataaatgaataataaaaggacacatcaccaattcaaaaaatggacaaacgatttgaacagacatttcaagacaggagatataaaatgtccagcaagaatataaagtgtatgacattattaatcatgagggaaatgcaaattaaagttatagtgagatatcattcactcactagaattgctaaaattaaaaagactgacaataccaagtgctgatgagaatatggaacaattggacctcccatcccttgctggtaggaatgtaaaatgataacgaccactttgggaaagtgcctggcaatttcctataaagttaaatctaacctatgatcttggcagtttcactcctaggtatttacatgagagaaatgaaaatatgttcatgcaaagatttgtttaagaatgtttatggcagccttattcataataactaaaatctggaaccaacccaaatgctcatcaacggagggtagataaactatgactaatttatagagtataatactattcagcaataaaaagaatgaactgttatcacatagagcaacatggataaatctcaaaaacattatgttgagcaaaataagcaagttgtaagagtacatactgcatgatcctatttatataagtacaagtacagacaatacagacaagtacagtgccagaaaggaaggcgccattgctggtgataggaaccagaacagtggtgtcttaagcacaaagcaattttctgggatggtggaaatgttctgaatcttgactgggatgttggtttcacaatgatttacacttaagatatgtgcctctcaatgaaaaaaaggggaacaaggctctgttggacctcgggggtgggagatcctggggcttggacatcaagttcatcttgagcacactgaggtctctcctctggtcactgtctgagtttggtaattttcacattgttttcctcagtatgctatgaacactcacctctccaaatgaataatgtaaacgatttagaagatagacccagattactaccatatggtaaacaaggtaactatcatttagctgatcaatgcccttattaaagttttgcttccttgccttcatggaggcaaatcttgtatttcctctcctgtcttagccctctgttatctcccagtcctcctcccctcacacagccatgtacctgcccttatctgccaacagatgtgagagaaccaatgaaaaaggagatctgatctcttgaatagatggagtctccattggtggagaatataagaagagaaaatgggaaaggtagacagagaataatacaggacaaattacatgaatggattccatcttctaaaggaacataaaagtcctaccctccgaggttgagataaggggattatttttaattaatttcatagaactattaagagaaactcagaaataacctaagccatatcagattcaggtgagagatattccttacggagatgaccagttaggggtctctagtactgtggtcacagtccaagaggggagtttggatatggagagagaggggagcctgaaagatagaattgcgcagggagacaaaactgaaatagtgttggcagatagaagatcaaagtgaaatgggagaaacagaaatggaaagagaggaagtataagacacagcagagaaaaggtaaaccgaaacatctgccaaggatcagaggtaaaaatggagagagaagtatatggaaaaggaaagatgagaggaaaataaataccaagaaatggggaaagtagagaggtacagaggcaactatgtagataaagagttaagaaaaaaagggtgtaaaacacttgagagtgaaaagtggataaaagggagagagaaacagactgggacagtgtaggtttgaggtaagagcactggatatccataactttacaagggtttattccattaaccgtaagttttcagaatgaactgttcccacatcaaagtggcacttgcatgatactcagatttcaatagatctctcccagaatagtccaatgattcccaagcacaaatctccactctaaattatctttagagtacatttattcatggacctgaggacctttactcaagggtcagatagacatctacacttgatttttttcaagaaccttaaacttggtactttgagaactgaaagccacatcttcattgctcaagttagatcgaactcctctgcagcactctttctctcagagacggatcactattatcccatggtttttcaagttggaaacctagtcaagtcatcatggatgactcctcccttgccctcaaatacatgccagttatgcagccaatgtaatcatttcatcttcaggttgcccctggcctgtccatctttgcatccccaagaccaggtctctggtccagatctccatcaccctcatgattctcagggcaacatcctttgctcatctcctccctctaatcttgcttccatcaaatgtgttatttgcacttcaactagatgggatattttaaagtgcacatcagattgtatcattttcctacttacctccttaatacactaaggattaaataaatgggtttttaagtagcatccaaaggcatccacaatgagccacctgcttacttctccagcttaatccctgcctcctgaaatattacttcaaggtggaataaaatttcccccaataatttcaattgttaaatctctctttcaaactgagcctttccctatgttttctctatgctgccttatttagaattgttttcctgtcccactatcctccatttacccttctccaatccagctaaatcctacttagaatatatgatcaaagggaggtctttctttagagaaagctagaaaggcacaattgggagaccaaggatgggagagaaagagcagtatcagagaaagcaagagaaaaaatttgcaggagcagagaagagagaaatgcatctaggaaagagaggctccaagaaacatccgcagaaaaaaacagaggcagagattgaggaaatgtacagaaacaggtggaaagacatgagtgagaaaatgggaaagagaacaaggtataaggaaaggaagactcccccacagtggatgaattattctcagcctctggtgaaggttactgaaggactgaatcctcaggtcaggttgtttggggagaggggaccttccagattatcaggttttcttagttttctcattatttgttttcttgttttgatggctttttgaccataaatcaagacatctaagggatttcattcctttcggcagagaacagcaatgcctgtcatgaaatggatgatatagcagtgcctcaggaagccttgagctcctcgccaaggtgtgagccaggtaaggaaggagtgacttgctctccctgacctgcagggtgtcaggaggtggaattcagagctggtgtttcctaatgcattttactctgagtacatgccacaggcaaaagatccattttgtccttggatcctataattctgctaaattttcctaagtgtatgttatagtagaaatatgctagagaaggatgatgtctttcatgtctactaataataaaaacttgattatacctacccaccacttactttctctagagaataaaaacgattattgtttgttactattattattttgtcccttactatagaaagccttcaaaagaaacatgttccatcagaccaactactcgaaaaactaaatgataatttttgccaaatattttccattgtgttactatcttatctagttattgttcaaagaattttggcaaacaagatgtcattttatctccacagcttatgaattttgatggataaacttttgcttatttgtattttatagctaaataaagtagaagtagaagcatagcaatgtgtaaggtcttttaccaggtcaaattagtcaagcaagaacatgacccacatccctgctgactcactgcggtgatggttgtgtgaatttggcagagatcagggtagccagggtcatggattggagttcacacaggagacccaaggaggcctgcaggttcttaggggagtgggccagggcctggtgcaaggagactcttattcagcaaaagcatttccatggccagagcagggaaaagcagagagaaacggtaagattggaatctgccatgtgggatgcaagaaatccagaagaagagaaccagaaagaaaaatggagacacaagtaggaaaatgtgatggagggcattgaagagcaacagaaaagaaaaagagagggaatcccagggagtcaaggagatggacggtgcttcatggcgtagaagcaagagtgtgtggtaaccaaaaagtgagaaggagaaaggaggtagcagagagatgatcagaaggaaaacaggcagagcaaggctgtggcggggctcaggcgaggtccttggagcaatagtgtttttttgcaaggagaagctcacttgagtgctgaacaccaggattcagcaggagcatcctgaggtctgtgctctcatcactgtgccttgtttatttccaggtttctcttcagagtcttgtgagcagttagctctcccaaaggctggtggaggagatgctgaagatgcacccagcctactaccaggtgggggaggtaattatgatttaaatgaccaattatctcattaaattagttggcctatctctatgcaaccaacacttccttctctctccaccaccaaccctgtaacacacttttgttcagcctgtggttgttttccccaggtgtgtgggaggcaagaggtaaaggacggctaagtcctttagtggaggggctcctgggcagagagcttaagggtacagagtaataaaaattactctgattggaggcaccaaatggtgttgcctaagtgggcccaattttatctacatgaatattgaatctaaatcctaccaggatggggtttgagaaaagagagagaattttaaacttacttgccagggattatttaggaataatgaaatactgtatatagaagagacaaagtggaagtgacaaagttagaagaatgaatagggatataacggggcaaagaggtaacaaacatcacgaaggaagaaagagacagaaatgcaaagaaatggtagaagtcagggagaggaagtcaagtcaaagagatcctggagttggtttatggtgcagatgcagcaatgtgtaaagacagggttagagggagaaaaaagaaggagagagagggagagaggggaaaggggcctgacaaggtgctagaagaagtagagccacttttgtttggtgcaaagatacctttattcccagggagcagttctacacccgaatattagagctcagcatggatccaggtaggtgtccaggtcactgccaattgtctgtcatgttcctctttcactctgcagtgtcctgtaaacttgctatacaaatagatgaaggagaatcagaagaaatgcccaagttactgccttatgatacagaaggtaattaggatttaaattaaagctttatttttctgtcaacatacaaaaacacctactctttcatctcccttcccattcccccatctattcatgtattcatccatatatccatccatccatccattcatccatccatccatatatccatccatccatctgtatattcatctgtccatccatccatccagccatccatcaatccatgcatccctccccacatacagacagagacagtctatgtccagcttcttcctgctttccttaagaggcacaagtagcaaaagaaggatgagctcagactggttggggctttcctgcatataggacatagggaaagagagagagaaagaaaaatatagtttgaatcgttaaataaagagagatctgagtgattgccagttttacctcaatagttgtgggatccaaatattaccacgttgggtaacatttgggtaatattaccacattgggtaacatttgggtaatattaccacattgggttataaggaaggggagataattttcaacttattttctcgaggttatgccaacagcatggatataatgagtatattgcaatatagaaaactcagtgaaagactgttgaaatgaacttcacaaagggaagggtccctgcccctttgttaatggcaaaagatgaggcctttgatactatggcagaaaaataagacagaatatacagaaagactgaagtttaaatttttagatttaaattttggattgaaaaattaggaacagaaagctaattagagagaacagatagaggcatggaaatgagcaccatggaagaaaggagataagcttgattattaaatatggcacaggaattaaaaggtggagaaaatactgtgagaggaacagagagaagaaaaatgctcgaagacagagacagtggaggagaggcacaaaagttgtacacagagaaaaagagaaaggagaataagtgaagttagcagagagtgaaaactgcttgcaagagatggggaacaatatgggacattgtagggatggagggaagattcactagacagaaataacttctggcccaagaatgagacatgttagcagcgagttttcacattatggtgtccccagcctatcaaaatggcacctgtaatgtcctcagaggcagtcgacctccccctgaggctttcatgtctctcccatctataacttaatgatttcaaaacacatatgtccagatttatcttctaagttcattcatctgagtacctgaatacgttcatgaagatatctgaaagacctctccatttggatgtttttcaggaacctcaatacaagacacctccaagagtacataccatctttcctgacacagatctgactcctctcccagtgttccctatctcaggatgaaacactattactccattcttgaagcagaaacctaggagccactcatgactcaccccacctccctcaacttaaacaccccatcaaccatccagtagacttttagtgagttctacatatctcacctgtccatttccttccaccccaacacaaaaactctggtaagatctctctcttggactggagcaacagcctctagactcacatctttcctctgatcttgtacctctcacatccattctttccaactcaaacaactctttcaaaaattgaagttggcttatcttacatttctactttaaatcaataactacttggggtcataaggattaaatctattttttcccccagggctccagcttcatgtctgcctctcctgcaattacttcaaggtttatatacaaattttctagtcattgtcattttctgatgactctttctcatctgagctttcctaaaggcttagccctgtgcttgaaaaagtcaccttgtttcactacaatctccatcatgctcactaatctagtgaaattatatggaaattacatacactctcagagatgccttttttgatccctagttctagaaagcaacgggatgatagatgcggcaaggacatacagcacagcaccaggggagaaacagggagaggaggaaggcaggaacagtcccagaaaaagaaaccaagacaaggagaagtaccaagagagtccagagggaagagacaaaggtaggaacagaagaagcagagacatgtgtcaagggtgaaaatgagagtgccaacatggggtgggagaccaggtgggcaaggtttctgacagtctctatcagattactggattgcacaagagcttcttttaccctcacaaaatctttaacatcgatatgcaaacagctgtatgtctatcttacagactgagaaataaagcacagaaatgcaagcaggatattatcacaaaggcaaagtagaaaaggaagagtgggcaccagtgtcctggatgtgtcactgggtgatggttgtgcaaggccagctgggggttcagggccaggtcacagggtcagaatagaaagaagtccaaggagttctgcaggttcccggaggagtggaccagggatcaatgtaaggctttaaggaaaaaaaatgctaatgggagggaagggaaatcatggaaacacagcatggaaatagagcctgccctttggaataggagagggatctagaataagagctaaagaaataatagaaaagggatatggtatcactgaaaaagaaaaaagacatagaaacaggagacaagagaagccagttggagagaagatcagacaatccaagcgctgctcagctaggagggaattatgtggaggcagaacggtgaggaggacactgagaattacagagaaggagaaagaggagctgcaacaaggtggagaaaaggcggaacaagacaggggtggctctcagcatttgcccatcttggatggcatgaacacactgaggcctgtgtccaagtcaccctctgtggtctgtcaatttcttgtttatctgcagagacctttgatctaaaaactccccaagtcactaatgaaggagaaccagagaaggggctctgtctactaccaggtgaaggagaaggtaattatgatttaagtttttaaatatttgagtacatctttgttttctagttggcatggaaaaaaagtttccctttctcccatcctacccttcccttcttcacattcgcatacatacagatggaattatgtcaattttctgttgtgcctttttgaaaactgtgagagagacaaaggatcaaggtgagctgagcccctgagtggggaccatatttctgcatggggaatgtagggagaacgaatataccagaggtaggctggggcgccagagaagtgcgtgggtgatgttattaaacacacattaaacctaaataacagcagattatggcaactgacgcaggggagaatgttttcagcctacttccagaaggatctggagcacagacatgttttgtgaaagaccgaaggcttgcaactgaggaaagtcatgcaggagacccttgggatggtgctgacaagggaaggacctgtggtgctatagcccctgcgtgaacagaagatcttttccaacctggaagaagataactttgagaatgaggaaaatatataaaataagggacattttaccagcatctaggagcataagataaaacccaaagaaacagaaaaggagaaagtagaagacacatagaaaggtgataacctcaaggagaaaagttagagaaaattgtacaaatggtagcaaatacaataacaacagcaatatgggaaggaagcacagaagaaattatgcagagaaagaaacagatcaaaataattaaagaacccatgaagagtgaaaactgttgtccaaggaaaggggcaggtcgagggcctatggagctgaagtcagtcactagatagaagcagctcccagcaaagggcacctctatcaatagtgagttttccaatccaggcccccctaggtagacagtggcacagaagcatactcagagagtaagagtactctttccccagtctcatctgctcaggtagtggaatgattctcatgtacatgtctgcgatgcagacctgctttccaagctcttccatccatgtgcctgaagatatttatcccaggaccctgccccttgcaatgtctttcaggaactacacacatccaaaagggaaaccaacacctcctccgaacctagaaactcccctttctccagggtttactctgtcagtaaagggatgaatatcctgtttgctcttctactcatcagactctttttctctgctttagcacaattgttctctgctttagcacaattggcaattgcaagatgtcaatcagatcattttcttttccccttagacgcggtgatctttgctgcacaggattagatgaattatccttcctgtggatttctgtggcttccacccttcatgggtccccagcccatatcatctgtcccatctctactaatggcatcaattgtttcaggagctgcaatgatctgatctttcttttatatgtgggcccttgagccacatttcccctgtactctgtattgttgccttggcccactcttctcctgatccctttccttatctggttcatttccaccatcccaaggatgcctttcctgatgcccagtatgagaaagggggtgacaaggaaataaatgagatggggaaagccaataaaaagcagagtcaggggtgcaagagaaaaaggcaggagcagagaatggagcagaaacacatggaaacaaagagaagcacctggagccactggcagcaggaaagcagggcaaaggcagaagaaatgtgcctaggaaagggggagggggagaaggagagagaattaggagtccaggcagcaagtgagctgatggatggttctcagccttggtgacagcaactggagtgcatccacttacaggccaggtgaacccacctacagaacccacctacaggccaggagggcctgggtgatggacagccccacctaggagatacttcagcttcccacgtcttcactaagttttctcttcataatttcttgagggatttcttttctttctgcagagggcagtgatgactgttcagaaatgtgtgatggagaagagccccaggaagcctctagctccctagcaagatgtgggtcaggtaaagaaggggaggatttctggccctgggctgcagagtgtcaggaggttgaatttggagcttgtgtttcctgattgtctttcctccaagtatacttcacagtgaaagaatgcaattaaatctgagatttttcacattttctatacatggatatttgagaaatgcagggaggaatcttgatatagaagtctgtgtttaacggaatgggttttattgtttgaacatatgtgtttagataatcacgtggtagttggattatgtcaaggcaaggcaatgtgttctccccttcatattctcatgcctattaatactgaagcattaaaatattttactgaataagatctcctgataccctcacaaaaccttaagatggggccagacaaactgggtaatcctattttacagatgaagaaataaaggtcagaatatgctaggaggaaaaaatgctctttgcctttatttttcttcactatcaatagtattacttgaatttaaaattctattctcactcactttttctatgggaatgaaaaagcttatcatccctctgctggtagatactttttatcattttattacaaacttgacaaagccttcaaagaaatggtatcctaccctctaattgacagaattcagatgatctctttatgagactaaatgctatttttgaccaatactcttcattatgttattggatcatgcagtatgtttttagaggactctgataagtgttacatttttaccctcagaaacctcaagatttaggcagggaaagtgctgttattgttgttttgaggagccagaaacacagacgtacatgtgacaccggtgtttgttaagacccaagaaggagggaaatgcggagaccagtgtcctggatgactccttacaggctttcagttctgtgaggcgggcatgggttagggtggggtcccatagactgagtccaatgtggatgcccaaagggtttttaggaatctgagagactctacctgggtttaatggaaagagacttttattaacaagtaaagcaagcttaaggagaggagtggaaaaattattgagagttagaaagtatgtaaatataatccatgatacgagataggagatatccagaaaaatagagccaggaaagatacacagagatagaatgtgcatagcagatgtagcatatcactgaaggagaaagagacagatattcagggagagatgtttggaagagaaagtccacagagccaaagagaaggacagttgccttcatagagtagcattctatgaaggtgtatgaagatataagtgtataccttcatgtgccttaataggcatagagtggggcaaggacataaagcacaggaccagggatgcaagagggaaatgagggaggcaggagcagtcccagaaaaagaaaccaagacaaggagaagtaccaagagagtccagcggcaagagacagaggtagaaacagaagaagcagagacatgtgtcaagcatgaaaatgagagtgccaacatggggtgggagaccaggtgggcaaggtttctgacagtctctatcagattactgggttgcacaagagctccttttaccctcacaaactcttaaacatctgtatgcaaacagctaaacgtctattttagactgagaaataaagcacagaaatgcaagcaggatattatcgcaaaggcaaagtagaaaaggaagagtgggcaccagtgtcctggatgtgtcactgggtgatggttgtgcaaggccagctgggggttcagggccgggtcacagggtcagaatagaaagaagcccaaggagttctgcaggttccctgaggagtgaaccagggatcaatgtaaggctttaaggaaaagaaaaatgctaccgggagggaagggagatcgtggaaacacagcatggaaatagagcctgctctatgggataggatggatctagaataagagctaaagaaataatagaaaagagatacaatatcactaaaaaagaaaaaagacatagaaacaggaggcaggagaggccagttggagagaagatcagacaatccaagcgctgctcagctaggagggaactatgtggaggcagaacggtgaggaggacactgagaattagagagaaggagaaagaggagatgtaacaagatggagaaaaggcggaacaagacaggggtggctcttagcattttcccatcttggatggcgtgaatgcactgaggtctgtgtccaagtcaccctctgtggtctgtcagtttcttgtttatctgcagagacctttgatctaaagactccccaagtcactaatgaaggagaaccagagaaggagctcagtctactaccaggtgaaggagaaggtaattatgatgtacatttttaggtatttgagtacatctttgttttccagttggcatgggaaaaaagcttccctttctcccatcctacccttctcttcttcacattcgcatacatacagatggaattatgtcaattttctgttgggctttttttgtaaattgtgagagacaaaggatcaagctaaggtgagcccctgagtggagaccatatccctgcatggagcatgtagggagatacaatatgccagaggtaggctgggggcaccagagaagaagttcctgggtgatgttattaaaaacacatgaaaccgaaatatcagcaggttatggtaattgaggcagggagattgttttcagcctactttcagaagtatcaggaacacagacgtaagttttgtgaatgattgaatgcttgcaattgagaaaagtcatgtggaagacccttgggatggagctgacaagcaaagcgtatgcagttttacagcccctgcgtaaacggaagaacttttccaacctgggagaagagaactttgagagtgaggaaaatatataaaatcgtggacattttacaggcatctaagaggttaaggtaaaacccaaagaaacagagacagaaaaggagaaagtgaaagacaaagtagaaagaggataatctcgataagaaataagaggcagagagaaaagttaagagaaaattatacaaatggaggcaaatacaaatgacaacaatgttggaaggaagcacagattaaactatgcagagaaagagatcaaaataattaaagtacccatgaagagtgcaaactatgtcggaggaaaggagcgggttgagggcctgtagagctgaagtcagagttactagacagcagcaacatccagcaaacggcacctctatcaatagtgagttttctgattaaggtccttctaggtagagagtgacacagaagcatactcagagggtaagaattctttctctccccgcagcctcatctgctcaggtagtggaatcattgtcaagcatttaatatctgtctgttaggcaggcctcccttccaagctcttccatctgtgtgcctgaagacttttatcttgggaccttctttattgcaatgtctttcaggaactgaacacctcacagtggaaaccagcacctcccctgaacttagaaactcctctttctccagggtttgctgtctcagtaaagggatgaatgtcctgtttgctcttctactcatcagactcattttttctgctttagcacaattgttatttgcaagatatcaatcagatcatcttcctttccccttagatgtggtgatctttgttgcacaggattagaagagttatccttcctgtggatttctgtggcttccacccttcatggggccccagcccatatcatctgtctcatctctactaatggcatcaatcatttcaggagctgcaatgatctgatctttcttttatatgtgggcccttgagccacacttcccctgtactatgtgttgttgccttggcccactctgctcctgatccccttccttatctggttcatttccactatcccaggaatgcctttcctgatacccagtatgaaaaagggggtgacaaggaaataaacaagatggggaaagctagtaaagagcagagtcaggggtgcaagagaaaaggatagaaacagagaaggggggcagaaacgcatggaaacaaagagaagcacctggagccactggcagcaggaaagcagggcagaggcctgagtctaatgtggaaagggggagggggagaaggagagagaattaggagtccaggcagcaagtgagctgatggatggttctcagccttggtggcagcaactggagtgtgtccacctacaggccaggtgaacccacagggcagaccaggaggacctgggtgggggacagccctacctgagagatacttcagctttccacatcttcactaagttttctcttcatgattttttgttggttgtatactgagacctctgagggatttccttcctttctgcagagggcagtgatgactgttcggaaatgtgtgatggagaagagcgccaggaagcctctagctccctagcaagacgtgggtcaggtaaggacggggggggggatttctggccctgggctgcagagtgtcaggaggttgaatttggagctcgtgtttcctgattgactttcctctgcatatacctcacagtgaaaggatctaattaatcctgagatttttcacattttctgtacatgaatcttttgtgaaatgcagggaggaatctttatacagaagtccatgtttaacagaatgggatttattgtttgaacatatgtgttcaggcagtctagtggtagtcaaaatatgccaaggcaaggcaatgtgttccctcctttatattctcatgcctttcaatactacagtattaaaatattttaccaaataagatctctcgataccctcacaaaaccttaagatgggggcaggcaaactgagtaatcctattttataggtgaagaaataaaggtcagaaatacggtaggaagaagcaatgctcttttgcctttattttttctagctatcaatactattatttgaatttatataaaatttctattctcaggaacaattttacactgttggtgggactgtaaactagttcaaccattgtggaagtcagtgtggtgattcctcagggatctagaactagaaataccatttgactcagccatcccattactgggtatatacccaaaggattataaatcatgctgctataaagacacatgcacacgtatgtttattgtggcactattcacaatagcaaagacttggaaccaacccaaatgtccaacaatgatagactggattaagaaaatgtggcacatatacaccatggaatactatgcagccataaaaaatgatgagtccatgtcctttgtagggacatggatgaagctggaaaccatcattctcagcaaactatcacaaggacaaaaaaccaaacactgcatgttctcactcataggtgggaattgaacaatgagaacacttggacacaagaagggggatatcacacaccagggcctattgtggggtgggggaggggggagggatagcattaggagatatacctaacgtaaatgatgagttaatgggtgcagcacaccaacacagcacatgtatacatatgtaacaaacctgcacgttgtgcacatgtaccctaaaacttaaagtataataaaaaaaatttctattctcactccctctatggaaataaaaaagggtatcattcctctgctggtagatacttttttatgattttttcacaaacttgacaaagccttcagtgtaatggtattctaccatctaattggcagaacttagatcaactatttgtgagactaaatggtatttttgaccagtactttccattatgtcattggatcatgcagtggtttttcagagtactctgataggtgttataattttactcacaaaaacctcaagacttagatagggaaggtgctgttattgctgttttaaggagccagaaacacagaaatgcatgtgacacgggtgtttgataagacccaagaaaaaagaaagagcagagaccagtgtcctggatgactccttacaggctttcagttctatgaggtgggcatgggttggggtggggtctcatagtctgagtccaatgtggatgcccaaagggtttttaggaatccaagagactctaccagggttcaatggaaagagacttttatctaacaaataaagaaagattagggagagataaggaaacattatcaagagttggaaaatacttgaatgtaatctacgatacgagataggagatatccagaaaaatagagccagaaaagagaaacagagaggcaatatgaaaagtatatgtagcacatcactgaaggaggaagagacagtaagggagaggagatgttaagaagagaaagtccagaaagccgaaaagaaccatagatgccgtcatagagtaataaaaagatatcactagtagaaggggctatcacttaggctgggtgcagtgggtcacccctgtaatcccagcaatttgggaggccaaggcaggtggatcacttgaggtcaggagttcaaggccagccgggccaacatggcaaaaccccatctctactaaaaatacaaaaattagctggttgtggtcgagcacacctgtagtcccagctactcgggaggctgaaacaagagagttgcttgaacccgggatgtggaggttgcagtcagctgagatcacatcactgcactccagcctggtgacagagcaagattccatctcagaagaaaaaaagaaaaaataaggggccaccacttaatatcaaacgaaaggctgaatttattgttcagttaagggatagttgtgcttgtgggtcagtttctctgaacagagaacgtttgtggaagtgtggatctcggtgactggcggccttcaaaagtgagatttgttagtggttagctgacctttagtgaaagcagggtcactggagtgtggctgttactgactgtctgactttcagaagcatggggaagtcaatggttggctggctttcagaggcctgtgtactggccagaagctattgttgattaattgggatgattctggttgttattgaccatatggccaaacaataatgagttttcctagaagtgtagcaactttcaattatcagtttcccctttaggaaatctctcatctaaagctgcaggaggcaccatcaagtattttccccatccaagatgtcttttctggaagaggaccctggaaacaaaatcctaggattccccttcactgagtaggagttatagagttgctagattgagagtgttatccttgcaaaggatgacataagaaaaagtaatgatgttttacaatacgttaatggaatggcagacaactgttgaaagtttttaattagcagcagaattgtgctgcttgcaatactatcctatttattcccttttgctccaagaatactcaccagccacccttgtggctgcagcgtttatcccaagtaaatttgccatgaaatatcttgcttttattattattttcacatcactctaatatattgactttggaaacaaaagacattcttctaattatagcattctggttttagtagtggtatttccatttacaaaatacagtaattgttgatcactgaaaatgtcaaatcctggaaaacgtggctttcccacatgtgctgttaacattgttactgaacaattgttggccgaagattcatttgatgaatcatatatttttaaaatagatgattctgatatggttctgtttagaaataactccaagaacagtttatatattttattttcacattgaaaatcaatcatgtttgcttcagcctcaaagaatgtgtttacgtaaaattaaatgagtgcagcaagctgcacttttttttttttctaaacgggaacagagttaaagttgatccaagtacaaaatctccagaaccatggactaatgcagtcacctgcaattgctttgaggcaactaggatgagatgtggctactagcaatggctctttgatgtctgtcacgttttgaagtgatacccctagagcatggcctgtttgtttatttatttatttatttatttttatttttccgtaagttattggggtacaggttgtatctggttacatgggtaagttctttagtggtgatttgtgagattttggtgcacccatcacctgagcagtatacgctgcaccatatttgtagtcttctatccctcgcacccctcccactcttccctccaagtccccaaagtccattgcatcattcttacacctttgcgtcctcatagcttagctcccacgtatcagtgagaacatacagtgtttggttttcctttcctgagttacttcacttaggatgatagtctccaagccgggcacggtggctcacgcctgtagtcccagcactttgggaggctgagatggatggatcacctgaggtcaggagtttgagaccaacctggccaacatggcaaaaccccgcctccgctaaaaaaaaaaaaatacaaaaattagtcaggcatggtagtgtgtgcctgtaatcccagctactagcaggggctgaggcaggagaattgcttgaacccgggaggtggaggtggtaatgagctgagatcacaccactgcactccagcctgggtgacagaacgagactccatctcaaaaaaaaaaatagtctccaatctcatccaggtcactgcaaatgctgttaattcattcctttttatggctgcgtagtattccatcatatatatatatatatatatatataccacatacatacatatataccacagtttctttatccacttgttaattggtgggcatttgggttggttccacaattttgcaattgtgaattgtactgctataaacatgcatgtgcaagtatctttttcgaataatgacttcttttcctctggatagatacccagtagtgggattgctggatcaaatggtagttctatttttagttctttaaggaatctctacactgttttccatagcagctgtactagtttacattcccatcagcagtgtagaagtgttccctattcactgcatccatgccagcatctactgtttttgattttttgattatggccattcttaaggagtgaggtggtatcgcattgtggttttgatttgcatttccctgatcattggtgatgttgagcaattttttcatatgttcattggccatttgtatatcttcttttacgaactgtctattcatgtccttagcccactttttgatgggattgtttgtttttttcttactgatttgtttaagttcattgtagattatggatattagtcttttgtcagatgtatagattgtgaagattttctcccactctgtgggttgtctgtttactctgctgactgttccttttgctgtgcaaaagctcttaggtttaattaagtcccagctatttatctttgtttttctttcatttgcttttgggttcttggtcatgaaggccttgcctaagccaatgtttagaagggtttttctgatgttatcttccagaatttttatagtttcaggccttagatttaagtccttgatccatcttgagttgatttttgtataaggtgagagatgaggatccagtttcattctcctacatgtggcttgccaattatcccagcaccatttgttgaatagggtgtcctttccccactttatggtttgtttgctttgtcaaagatcagttggctgtaagtatttgggtttacttctgggttctctgttctgtttcattggtctacgtctatttttgtaccagtaccactctgttttggtgactatggccttatagtatagtttgaaatcatgtcgtgtgatgcctccagatttgttctttttgcttagtcttgctttggctttgtgggctcctttttggttccatatgaattttagaggtgttttttctaattctgtgaagaagatggtggtattttgatggggattgcattgaatttgtgattgcttttggcggtatgatcattttcacaatattgattctacccatccatgaagcatgggatgtattttcatttgttcaggttgtctatgatttctttcagcaatgttttgtagttttccttgtagaggtctttcgactccctggttaggtatattcctaagtttttgttgttgttgttgttgttgttttgcagctattgtaaaaggggttgagttcttgatttgattctctgcttggtcactgttggtatatagaaaagctactgatttgtgtacattaatcgtgtatccagaaagtttgctgaattcttttatcagttctaggagctttctgggggagtccttagggttttcaaggtatacagtcatatcatcagcaaacagtgagaatttgacttcctatttaccaatttggatgctctttatttctttctcttgtctgattgctctggctaggacttccagtactatgttgaagaggagtggcgagagtgggcatccttgtcttgtttcagttctcagagggaaagctttcaacatttccccattcagtattatgttggctatgggtttgtcataggtggcttttattaccttaaggtatgtctcttgtatgctgattttgctgagagttttaatcataaggagatgctggattttgttgaatgctttttctgcatctattgaaatgatcatgtgatttttgtttttaattctgtttatgtggtgtatcatatttattgacttgcatatgttaagccatccctgcatccctggtatgaaacctacttcatcgtcgtggattatctttttgatatgttgttggattcagttggcaagtattttgttaaggattttagcatctatgttcatcaaggataccagtctgtagttttcttttttggctatgtcctttcctggtgttggtattagggtgatgctggcttcacagaatgaattagggagggttccttctttctctatcttgtggaatagtgtcaaaaggattggtaccaattctttgactgtctggtagcattctgctgtgaatccgtctgatcctgaacttttttttgttggtaatgtttaaattaccatttcagtcttgctgcttgttactggtctgttcaaggtatctaattcttcctgatttacactaggagggttgtatttttgcaggaatttatccatctcttctatgttttctagtttatgtacataaaggtattcatagtaaccttgaatgatcttttgtatttcactggtgtcagttgtagtatttcctgtttcatttctcagtgacgttattcgggttttctctcctcttggttaatcttgccaatggtctatccattttatttaccttttcgaagaaccagcttttgtttcatttatcgtttgtattttttttatttcaatttcatttagttctgctctgatctttgttatttcctttcttctgctgggtttgggtttggttttggtttgttcttgtttctctagttccttcagatgtgaccttagattgtcagtttgtgctctttcagtctttctgatgtaggtgttcagggccatgaactttcctcttagcaccgcctttgctctatcccagaggttttgattgtcattcagtttgaagaattactgtcattcagcttgaataattttttaatttccatcttgatttcgtttttgacccaatgctcattcaggagcaggttatttaattttcatgtatttgcatggttttggaggtgccttttggagttgatttccagtcttattctactgtggtctgagagagtgcttgatataattccaattttcttaaatttattgaggctcgttttatggcctatcatatggtctatcttggagaaagttccatgcactgttaaatagaatgtatattctgtggttgttggatgaaatgttctatatatatctgttaaatccatttgttccaaggtatagtttaaacccattgtttcattgttgactttctttcttgatgacctgtctagtgctgtcagtggagtattgaagttctccactattattgtgttgctgtctatctcatttcttaggtctattagtaattattttataaatttgggagccccaatgttaggtgcatatatgtttagaattgtcgtattttcctgttggacaaggctttttaccgttgtataatgtccctctgtgtctcttttaactgctgttgccttaaagtttgttttgtctaatataagaatagctacccctgcttgcttttggtgtccttttgcaagaaatgcctgtttccacccctttactttaagtttatgcgagtccttatgtgctaggtgagtctcctgaaggcagcagatggttggtgagttcttatcggttctgtggttctgtatcttttaagtggagcatttaggccatttacattcaatgttagtattaaaatgtgaggtaccattgcattcattgtgctttttgttgcctgtgtactttttgtttttattttttaacttgtattttatttttgttttataggtcctgtgtgatttatgctttaaagaggttccgttttgatgtgtttctaggatttgtttcaatattgagagctccttttagcagttcttgtagtggtggcttggtaatggcgaattctctcagcatttgtttgtctgaaaaagactgtatctttccttcgtatatgatgcttagttttgctggatacagaagtcttgtctgataattgttttgtttgaagaggctgaagatagggccccagtccctcctgtcttatatggtttctgccaagaaatctgctgttaatctgataggttctcctttggaggttacctggtgcttctgtctcacagctctaaagattctttccttcgtcttaaatttggttaacctgatgacaatgtgcctaggcgaagatctttttatgatgaatttccctggtgttctttgtgcttcttgtatttggatgtctaggtctctagcaaggccagggaagttttctttgattattcccccaaatatgttttccaagcttttagaattctcttcttcctcaggaacaccgattattcttaggtttggtcatttaacataatcccagacttcttggaggctttgttcatattttcttattctttttactttatctttgttggattgggttaattcaaagaccttgtctttgagctctgaatttctttcttctactttttcaattctattgctgaggttttccagagcatttcacatttctaaaagtgtgtccaaagtttcctgaattttttattgattttctttaagctatctatttgcttgaatatttctcccttcacttcttgtatcatattttggatttccttgcattgggctttgcctttctctggtccctccctgattagcttaataactaccctcctgaattcttttttgggtaaatcagggatttcttcttggttcggatccattgctggtgaactagtgtgatttttggggtgtgttaaagagccttgttttgtcatattaccagggttggttttctggttccttctcatttgggtaggctctgtcagagggagggtctagggctgaaggttgttgttcagattcttttgtcccataggatgttcccttgatgtactattctcctcctttttctatggatgtggcttcctgtgagccaaactgcagtaattgttgtctcttttctgggtctagtgacccagtgagtctaccaggctccaggctggtactcggggttgtctgcacagagtcctgtgatgtgaaccatctatgggtctctcagctgtggataccagtgcctgttctgctggaggtgaagggggtgcaatggactccatgggggtcctttggtggtttaatgttctatttttgtgctggttggcctcttgccaggaggtggcactttccagagagcatcagctgtggtattatggggaggaaccggtgatgggccagccctagaattcctaaggttatatgccctttgtcttcagctgccagggtggataaggaagagccgtcaggtgggggaggggctaggcatgtctgagctaagactctcgttggacatgtcttgctgcagctgctgtgggggatgggggtgagattcccatgtcactggagttgtgtacctgggaggattatggctgcctctgctgagtcatgcaggttgtcagggaaatgggggaaagctggcagtcacaggtctcacccagctcccatgcaaaccaaagggccagactcactcccaccatgccccgccccaacagcccccagaccatttccaggcttgaaaacctgccccaggctatctgcctcccagctgcagaagaaaaaggcttggttcttccccacctgtggagtctgcacaccggatttgcgccctcacaagagttctgtccaggaggcgtctcaccctgttcaaattgttacaaagttcagctagagattggcttctccctgtgtagttttaccccctgctcctctcccattgggtccctgtggtgccaggcaggaatggccttctaggggacccagccacctcccaggccctttccgctgcttccccctacacctgtatttccctcatctcttcagattgactcagctccaggtaaagtcggaaacttctcccacaaacagaccttcagcttctccagtgggggtgtgtgttcgggagaggagggtctccttttcccacttctgcagttggggcactctcagttttacgggggggggcggtctcctgggtcctgcaggtgcaatctgcttccttcagagggtcatgttgcctaggctggtcacgaaccatggcctattttttatgtacgtataaaagaaaaggattatgataaaggagaaagggagacaggagacctgtctcctgataatgtgataatagaagattcagtgtgggtgactgatgaaggagtattttaaaatcgtgaagatctgttccatttctgtgttccatgagaatggccccaagatatttgggtcaaatgtagggaggcctggtatttcagaaaagattgacccccattgtcttcaagactcagttaatcctagaaatcctcttatctttccttcagtcattggtcttgggaaactctgaagacattgtaacatttctttatataatattatttcctcagccaatagattatgtctgagaaaatagcctagtttttgttttgtttcattttgtttgttttacaaacttggagtttttccttagaagttttatgtccatttttgcccaactcaatgaatagattaagaaatgtctagatctatagagtataatagaggtgacctatgcatcagatcagagaagatgcaggtatgagctttgtatcccttaggccgtatttaaaacttggaagaagatggttgtgttcgtttttcattgctgcatgacaaataaccacaaatgtaatggcttactacaatacccacttgttatctcacagtcctgccagcagaagtgtgggtgggctcaacttagttctctgcttagagtctccttaggctgaaattaagatgtcagcccagctgaagtcttggctgaaggctctgagaatcttgcaatcgagctcacccaggttgttgacataatccagttcctcgtggttgttgaaccgaggtcacagctttgttgctggttgttggtcacggaccactctcagctcctggaagccaatcatattccttaatacattgcccctccatcttgaagccagcaatcttgtgtggaatccttctcacactttgaatctctgacttcctcttctgctgctggctagagaaaactccctgctcttaaaaggctcataaggttaaaccagatccactctattagtctctcttaaggacagctctgccatatcacataaggtaattatggaagtaatatctcattatgttcacagtcctcaggattagggaaagaaatatttgggggccatcttagaattctgcctatcgtcaaggaaattcctagaaaataactgtccagataagccactgattttcccaagcaaataatatttatctttatcaagtgagacattaaacaaagctgaacataaatatattaaaaattttggctttaggtgagactgaagagattgtagtaatctggttaggaggtacagggaagtgaggtatacctattttgtttattgcttgcagacctcaaatcatccgtagtgtaggtatactaatggtcaggtcaactatacatagatcatgtgtcagagaattttccaggacttctaaaattagtccttcttctgaacctttaatctggtagttctatttgcagaatagatccctacctattacatttatagaggttttgttgaaaacagtgttcctcagataatggtctgaaagtaatagattactggttgagatgtggaaacattcagtgatttttttctcttcttttatagacctacttgtcaaatgtgttacttactttggacatgacaaaacctccccattgcaagccagagtcattttagggaaaattttgccagttattaagaaaagtacaagagttagaatcatgatgaaagtatacagaggaagtgaacattttgtcggggagattatggctttggcaaagacaatcccgtgacaaacagcaaagaggccactatatttcagtataagtgtgaatggtgtgttccacatgaatgaagcagaaactgaaaaggggacatatgattaattacatgattgtagttgactccagattacatactaaacaaaatgattttctttcacaaattgacaagacactaggtgccctcatgaaggttttgatgagggacccaagaaaaaatgtgaccgaacatctttgcacagtttggctactgtctaatggacccacatccattagttttaggggctggcttgaattgaggacttatcagaccttgaccaccagctgtttgctttggatcactgtcttctaacattcagaaagcacaggaaaatcaggaacaagcacacatgaaataagactttttgtttttttggtggggttttgctatgttgcccaggatagtctagaattcctgagctcaagccatctgcctgtaatatgacctattaacaggcataagccaccatgcctggcagagataagactttttaaaaatagacagaagaggccgggtgtggtggctcatgcctataatcccagcactttgggaggccgagatgagtggatcacctgaggtcaggagttcgagaccagcctggccaacatggagaaatcccctctctactaaaattacaaaaattagccaggcgtggtggcaggcacctgtaatcccagctactttgggaggctgagacaggagaatctcttgaacccaggaggcggaggttgcagtgagccgagattacgcggttgcactccagcctgggcgacaagagtgaaactctgtctaaaaaaaaaaaaaaagacaaaagaaaggtaacagtagatgaagtagtgaaacaagtaaataagtaaataagcacattaattgagaaaatgtttgctaagtggtgtacttccaactgaaaatatctaattgtatctaattgtatacccatgtttaaataagataaattcagaactaggagctcagtgaaacaagtcagagttcgagttgttgttgagaaagattcacttggcagtaggtcagaaaaatgacctgagctggacacagtggcctgagattcatgcctgtggttccaagggtcccacaggacactccccagcaagaatcttcaagataatctcggcaggaactccaatttttgaagggctaggctactactcataatctgaaactaaaagctgatttattcctagctaagcaaggcacctagtgggaggaggccctgtgcttgtaagacacagtctctatagaaaaggaaactgcagttttatagagagttttaggaagcatattgtgtagggactccagaccttcagaaacaggagtgtttatgagtaatttagcatttggccatcaatgcaggctttgtggagggggtgttgctgactggctgggcttcagatatgtagaactgccagtaatgggctcgctttcagaaatgtgactggggatataagtagtcagtggccaattgggatgagtttaaatagttgcttttcactattgtcaaagaacagtagtattttctggaatgataagagtttccttgctttattctcaggactacaagtacaaaaataaaagtagagaaaaggaggatgaggtgcataacatggggagagcgtggctctgttatgtgtcaaatgtgattattggagcaggtatatttttttccagagaacagttcatcttagctcagaatatcagtgtgcagtatagcagcactggaaactcttctgtggtcattgtctcaggatccttggacaataattttcttgtttctcattagtgtctagtgaactagaaaatcacccaatgaatgaagaaggagaatcagaagagcttgcttctagcctgctatatgataatgtaccaggtaattatgacttaaaaatagtgaaaacagaaacagagttctgataaagagaaaaaggaggagaaaaaatagacttaaaggaagagtcaaatataaggaggagcagtgaaaggagaagatttcagaggaaaaagtaaagaagggggagcaacaagggtgcagaaaatagagtcactgggtcaaactgaaagtcttcatgaatcacaattttggcccaggagcggagcaatcagcatatgaaaatgagaagtgttcctgtgtcatgtgtttctcagaagaggtgccaggaagcccagaagcaaggacggaaagtgatcaagcgtgtggcacaatgggtaaggctgtctgagggccgtgggatgggggtggctcagtgggccccacagacccccagtagggtggaggtaggtgctccagtctgtccagaattctattctccgcatttgcttgacctgagcctttggggagctgcagggaggcaagagatcgttataaagtactatttaagaggatggactctgttgattagacatagatgatgtcatagaagtatactctttgcaatggcacttatcttgtgtattgcattagtatattaagttacacccaatcttccatgaagcccaggataccccagtgaacttctgctggtagataatagtgtcactttgctacaacttagaaaggccacactcaaaagacaactaatcccggtacttaattgtcaggaggaaagactgcaggtctactcttcttagcccaacacgtatttttgatagaagacccagggcccatcctagactcctagttctcagttcggtgggtttttggttcccctagaagaaagagaggaatgattatccaagcatctgtataaactcaagccttctgtagtatacattgtcctaaaatctataacttttatttattaatttctgtttcctcaccaccacttgttattttccagatactgtggatattgcaaacaactccactttgggaaaacccaagaggaaaagaagtaagaataaataagaatttatttgcttttggtattacaaatacgtttttaatgccagagttttaattttgtcattgttactatttctgttattatttgtaatactgtggtagacagaaggatgacctccctaagatgtctacctcctaatccctggacctgtaatctgctatcttacatgacaaaagggactttacagatacaattaagctagagaccttgaaatggggagatgatcctgggttatggggtgggcacaatctaatcttgtaggccttaaagagtggaaaacttttcctggctgtggagaaaggaagatgtgactatggaagaatcatcagaaatatgtcatgttgcaggctttgaagatggaagaagggaccaaggaatatgggtgacctctaggagctgaaaagacaaggaaatagcttgtcctttccagctcccagaaaggaattactttagccagtgagacccatgtcacacttctcactgacataactggaagaaaatacatttgtgttgttttaaaccactaaattggtggtaatttgttatggcagcaattaagagtaatacagattttggtacttagaagtagggtgtggctattaacatattcctgaaagtgttggcatgcctttgggattgggcaatggacagaggctggaagaattttagattatgatcggaaaagcctatattgccttgagtagtccttagtagaaacatggatgctaaagactgtgctagtgaggactgagaaggaagtgaagaacatgggagagaaagcctatattgcgttagagaaaacctggatcatcatgagcagactgttagtaaaaatatggaggttaactgtgttactggtgagcactcagaaggacataagaaagatgtggaaagggcctccttattatatagtggtctgtcctgtactcatgtgaaaagcagaactttctggatctatagctaaggagatttccaaacacagtgatcatggtgtgttgtggtgtcttttgctaattatagtaaaatgcaagagggaagaggtatattgaaggaagagctgctaaacgaaaaagaatcaagtcttgatgatttagaaaattcccagcctatccaggtcaaaaaacatgataaaatgaggagattcactgtcagggacgtgtgcttggtagaaacaacaaagactttttgccagttccctgggaagtagtgaaaggtcagattatacattcacaaaaaaagttatttgaagagacgtagcatgtgactcataagtccctcagccatctcagcagaagtcaaaaatagatgtgcgttgctacaaaaagaataaaatacctaggaatacagctaattagggaggtgaaagatctctacaaggagaactaaaaaccactgttcaaagaaatgacagatgacacaaacaaatggaaaaacattccatgttcatggataggaagaatcaatatcattttaaaatggtcatactgcccaaagcaatttataaattcaatgctattgccattaagctaccattgacattcctcacataactagaaaatacgattttagaattcacatggaaccaaaaaagagcctgaatagcaaaggcaatcctaagcaaaaagaacaaagctggagatatcatgctacccaatttcaagccatactacagggctacattaactgatatggtttggctgtgtccccactcaaatctcatcttgaattgtatctcccacaattcccaagtattgtgggagggacccagtggcaggtaattgaatcataggggccggtttttcctgtgctattctcataatagtgaatatgtcttcatgagatctaatagttttataagggggagtttccctgcacaagctctctctctttgcctgccatcatccatgtaagacgtgacttgctcctccttgtcttccaccatgattgtgaggcttccccagccacatggaactgtaagtccattaaactctttttcctgtataaattacccagtcttgggtgtgtctttatcaacagtatgaaaacagactaatacagtaaccaaatcaagatggtactggtacaagaacagacacatagcccagtggaacagaaaagagaacccagaaataagaccaaacacctacaactaactgatctttgacaaacctgacaaaaacaagcaatgggaaaaggattccttattcagtaaatggtactgggataatcagctagccatatacagaaaattgaaactggaccccttccttacaccatatacaaaaattatctcaagacagattaaagaattaaatgtaaaacccaaaactataaaaaccctggaagatgacctaggcaataccattcaggacataggcatgggcaaagagttcatgacaaagatgccaaaagcaattgcaataaaagcaaaaattgaaaaatgggatctaattaaactaaagagtttctgcacagcaaaagaagctatcatcagagtaaacagacaacttacagaatgggagaaaatttttgcaaactatgcatctgacaaagatctaacatccagcatctgtaaggtacttaaacaaatttacaagaaaaacaaacagccccattaaaaagtgggcaaaggatatcaacagataacttttcaagagaagacatacatgcagccagcaatcatatgaaacaaagctcaacatcactgatgattagagaaatgcaaatcaaaaccaaaatgagataccatctcacaccagtcagaatgactattattaaaaggtctaaaaacaacagatactgacgaggttgtggagaaaaaggaatgcttatacacactgttgctgggagtgtaaactagttcaactattgtggaagacagtgtggcaattcctcaaagacctaaagacagaaataccatttgacccagcaatcctattactgagtatatacccaaaggaatataaatcattctattataaagacatatgcacatgtatgcttatctcagcactgttcacagtagcaaagacatggaatcaacctaaatgtccagcaatgatagactggataaagaaaatgtggttcatgtacaccatggagtactgtgcagccataaaaaaagaataagatcatgtgctttgcagggacatggatggagctggagagtattatccttagcaaactaatgcaggaacagaaaactgaacaccacatgttctcacttataagtggtaacgaaatgatgagaacacatgaacacctagaggagaacaacacacactgaagcctatcagaaggttcagaaggtgaagggttggaggagggagaggatcaggaaaaataactaataagtatgaggcttaatacctggatgatgaaataatctgtataacaaacacccatgacacatgtttagctttgtaacaaacctgcacatatatccttgaacttaaagtataaaaaaaaaaaaaaatagatgtgtgaattcctaggaaagatctgtagggaagcttcatgtctaatggaggaaatcagaaatccccatgatatatgcaggagatccataagactcttgagggttttgtaccaagagaaacaaagatttccatgtcctatctcctagaacctataatctgttactttacatggcagaagggactttgaagatgtaattaagttaaggatcttgagataagatcacatgggccactaaagtcagagaacatatccttctgtcgagagagggatgtgtgactatggaagaatggtcagagagaatagagctggatgtggagatggatgcaggggtccatcaactaaagaatgtgggcagccttccgaagctggaaaaggctcctctgtggcctccagaaaggagcaaagccctgcagacaccttgattgattttagccctgttaggtgcatgtcagatttccaaccctcagaattatgagaccacaaatctgtgatttttttgtcactaaatttatggtaatttattacagcagcaataccttttgtaagacaaaaaaaaaatttcaccctatacggttatattcaatcttctaaactaacaatttatattttttcaaattacttacacctttatgctttttttttctgattttaaaatacttgttccctgtaaactttgctgtacatatttctatatttttttctatgctttgttagcacatttagaattatgtgatatatctaaatgaatacatttaaactgttacatttctttttaaatcaatataacatgcactggatattataaacatttaatatcttgccaacttaactgtaaaaaaaagttttatttcattcctgttttaacttacattgctttcatttttggtgcagttgagcattcttcatttgttattggccatttttgtttcttctcctacgagtgcctggaacttatattttgccagtgtgttgtctttttttccccatgctttaggacaacaggaatacttatatatgatatatactaagggttgactacgtgtgttgtcatatttgatgttattcttttacgtttctttgtggtataggcacatctcgtttgattgcacttcactttattgtactttgaggatattgtgagttttacaaattaaatgtttgtgacaaccctgtgtcaaaaaaagtctgttggtgccctttttccaacagcatgtgctcactttgtgtctctgtcacattttggtaattctcgcaatatttcaaattttattattattcttcttcctgttatggtagtatgaacagtggtaacaatgatctttgatgttactattctaactgtctatggcaccacacactgtgttcgtataagatggcaaacctaataaatgttgtgtgtgtttcaactgcttcactgaccagctgttcccctgtctctctccctctctttgactttcctctttcctgagacaaaaaaatatggaaattaagtcaattaataatcctacaatggcctctaagggctcaagttaaaggaagcgtcacatgtgtctcactttaaataaaaagctagaaatggtgaggcttagttaggaagccatgtcaaaagctgagaggctgaaaactaggcctgttgcagcaaacaatcagccaagttatgaagtgctactccagtgaacatacgaataataagaaagtagaacagtcttatcgctgatatggagaaagtatgagtggtctggatagaagatccaaccagccacaacattcccttaagccaagccttaatccagagtgaggcctaaactctcctcaattctatgaaggctgaaagatgtgagaagctgcataagaaaagtttgtggctagctgatgttggttcctgaggttgaaggaaagaagctgtctcataacattaaagtgcaaggcgaagctgcaaatgctgatgtaaaagctgcagaaggttgtccagaagatctagccaagatcctagatgaagatggctacactaaacaacagttttacagtgtagactaaacggccttttattggaagaagatgccatctagaactgtcatagctagagaggagaagtcaatgcctggtttcaaagctccacagaacaggctgagtctcttgttagaagctaaggcagcaggtgactttcccttgaagccaatactcattcaccattctgaaaatcctagggcccttaagaattattctaagtctactctgcctatgctgtataagtaaaataaagcccagatcatagaacatctgtttacaacatggtttactgagtattttaaacccactgttgagacatactcctcagaaaaaaagattcctttcaaaatattactgttcattgacagtgcacctagtcatccaggagctctgatggagatgtacaaggtgattagcattatttccatgcctgctaacacaacgtccattctgcagcccatggatcaaaaagtaatttcaacttgcaagtcttaatatttaagaaacacatgttgtaatgctatagctgtctctatacataatgattcttctgatgaatcttggcaaagtcaattggaaaccttctggaaaggattcaccattttacatgccataataacattcatgatatatgagaggaggtcaaaatatcaacattaacaggaatttagaagaagttgattacaatcctcgtggatgactttgaagtgttcaacacatcagtgaagaagtaattgcaagtgtggcagaaatagccaagagaaccagaattagaagtggagcctgaagatgtgattgaattgctgcaatctcatgataaaccttgagtggacaaggagttgcttcttaagaatgagcaaagaaagcagtttcttgagatggaatttatacctggtgaaaatgctgtgaacattgttgaaatgacaacaaaggatttagaatatattagttgataaagcagcagcaagatttgagaggatctaccgtgataaaatgctactcaatagcattgcatgctacagagaaatctttcaggaagagccaatcaatttagcaaacttcattactgtcttattttaagaaatttccacagacacctcagccttcatcagtcaccaccctagtcagtcagtagccaccaacatccaggcaggactttccaccagcaaagagattatgacttactgaaggctcaagtgatcatgagcattacatttagcaataaagtatgtttaagatatgttcattttattttagacacaatgctattgcacacttaatataccacagtatagtgtaaacataactttcatatgcactgggaaaccaaaacatttgtgtgatttaccttattgcaatattcactttattgcagtggtctgaaaccaagtatttctaagatatgcctgtatctttatcccaaagaagcttgaaatttttatctgatcaaatctgtcagccttttcatttatggtttccaggttttatgtaaaatttgcaaatatattgtccacctcataatttagaaacatgtttacttacttctagaatatttggaatactttttaatgtttaaatctataacacacatggaattcatttattggtatatgatgtgagatggtaattaagagatataacactggtagtttttttcttcatgattcaaaatactattttatgtatgttttccagtatatacagaactgtgtcttatcacatttctttatccattcatctgttgatagagacttaggttgtttctatgtcttaactactgtgaattatgctgcaatgaacatgtggatgcagatacctctttaagatattggtctcatttcctataaattcataccccaaagtgagatttctggattgtatgtatttctgtttttaactttttgaggaacctccatactgttttccataatggctgtaccaatttacattcccacttagagcatacaagagttccttttccccacaacctcaccaacacttgttatctcctgcctttttgctaatagctatcctaataggtgtgaggtgatgtttcattatggttttgagttacaattctctcatgattagtaatgttgattgctttttttataatccattggccattatatgtcttctttgggaaaacatttattaagatcctttgcccatttttaaatcagattatgacatgcttttgttttgttttgtttttttgctattgagttatgtgagttccttatatatatttaggtagtaacccttatcaaatacatggtttgcaaatgttttctcctattccgtaggttgccttttcatttttacaattatttcatttgctgtacaaaagctttttagagtgatgtaggtccacttgtttatttttgcttttgttcctgtgcttctggtgtcatatctaaagaataattgcccagactaacctcaaggagcttttcctctgttttcttctaggaattttatggttttatatttgacatttaagcctttaatctattttgagttaatttttgtatatggtgtaagccaagcgtctaatttcattcttttgcttgtggatattcagttttcttaggaccatttattgaagagactgtcttttctccattatttattcttggcacccttgtcaagattaaatgccccttcttgacatctgtattcagcatagtgatgtaagtcctagtcagagcaagtaagaaagaaagaaaaggcatccaaattggaaagaagttaaattgtctctgtttgcaggtgacatgatcttctatgtagaaaaccctatagactccatcaaaaaactgttggaactaacaaatgaattagtaaggttgcagaattcaaagatcagttgtgtttctatgcactaacaatgaactatccaaaaaataaattaagaaaacaatcccatttacaatagcaacaaaaagaataaaataggaaccaagttaacaagaggtgaaatatttgcacactgaaaactatgacattgatgaaagaaattgaaaaatatacaaataaatggaaagatatctcatgttcatgaactggaagaatagtgttaaaatgtccatattacccaaagtgatctgaagagtcaatgaaatctctatcaaaatttaaatgacatttttcacagaaataggtaaaaggaatcctaaaatttgtattgaatcataaaagactccaaatagtcaaagtaattttgaaaaaaaaggaaacaaactggaggcatcatactgtctgattttaaactatgttacaaagcaagagtaatcaaaaccatatggtactgtcataaaaacagacataaaccaatgcaattgaatagggaacccagaaataaacactcatgcatgtatgttcaagtaatctttgataaggacaacaattacagaattttctttatgtagatgttccacgcatccacttttcttatctgctttattgagctgtaatttgcataaaacaaattcatcaccttaaggtataacctaatttgttttaacaaatgtgtgcagttatataaatacctccacaatcatgacatgtatcattttcatcaccccaaagtccacttgcattcttctctccattctctggttctcgacaacagctgatctgttttttgctagtttgttttttaaaagatggggcctcactgtgtgttccaggatgaccttaaactcctgggctcaagtaatcctcctgcctcagactcccaaataagtgggaatacaggcatataccacccctaaaccaaggtgtttttttttttaatttgcaacctaatgtgtggtcaatatttgtaaatgttttctgccccttgagaataatgtacatttgaactatttgttaggctctggcttcactccatatatatcttttttatcaagcacaactttcttgtttaaatttgtgtccatagtaatttaaattttatttgctccatcagatttgcatacaaatgtgttaaattcttgcacatggttgtatatttgccaattcctctttatcttgttgctttactttaaatattttgaggctatttatgatttgtaactttttaatggatgtttttcttttatcattatacagcattctgctttatccctgttaatgcttttgccgtaaaatctcttttgccaagtactaacattgttacacaaacttttatgattttttaaaaatattttccactcactttatgtgatgcccttttgttcagttttcttttatgtctcttgtaactgcacttaacttttgtagttttgtctgatattcctagcttcttaataggtaaatttcaatttgtttacatttattgagtttccagatgtatacggacctatatcttctgtggtattgttgaccattctctatttgtatctttcgtgtctccttcctgctttttaatggattggtataaaactatatattctcccctttctccctgctggtttggaaattaaagataaaatttctgtaagcttttaaattatgccccaatcccaaaagatgacaaggatcttatcatggtttcactacaaactgaacaccccatctctaccattttggctattgtttaatattttatttttaactataaattttgaaactattatcatttttacagttgatatttacttaatttaaaaaaatattttgtatactcaccattgttctttttctttggtttcactttttgtctagctgaagtaaattctttgttttttctagtgagtgatctctaagtggtaaactctgtaagtgttgggtgtacaactttttctttactttgatagaactttttagctacattaaaaattccaggtcgataatttatttcttctcagtatagtaaggtgattactatattatttcctggaatctatggtgtggctaataacaattattctcttattgtaactaactgtaacttcttggtaaatattctgtcctttctctctaaaagcttttattccccaaaatttaatcacgaaaattttaagcatacagaagacttgggagaattgtacactaaacatcaatatactttcacatagattcacaattaacattgtatcattcctgctttatcacttttctattcatctatgcatttctctatccactcactaaccggtggtcaagtttgaaacatttcaaggctgcagacgttagcactattccccctcaactacgtcagaatgtatatcattaagtagagttcaatgtatgtttagagttcttttgttaagataaaatttacaatgaaatgcacaagtattaagtgtaccatttgatgagttcttataactgcatttttctgcaccatcaaaattcttatcaagatacagaacatgatcatcaccctggaaaggttccttacgccctttctggtgtatctccacccactatccatcagggcaatcactactcttctttttaactatgataatttggcttttaaaaaactttatataaataaggttttatagcatattctctttagagtgggatttatttcacacagcatgtttttgagattcatccatattgttggatgtctcagtagtttgttctttttcattgctaagtagtgtacattatctggatataccaaattttgtttataattctcctattgatggacacctcgagttttttaagtttttgctattatgaaaactctgctgagtacattcttgtaggagtcttcctgttttttcgtatctcctgcataaatacctagaaacaaaattgccgggatatagagtagatgcatcagttctttcccccaggacccatgaaaaggatggtgcagagcaagcccaggtggatgctgcactcataggtgtgtgcagcagcagaagaatgcttcactgaggaaacctatgggattataaggggaccaatagcaaacctgcccaaaccttacctctgagggagacattatctttttagctggaatttaagcaattctcctctggggatattaagcaaatctcctctggggatcttaagcaaatctcttctggaggcatctcctctggaaaatttctaaggagggagatgttctctactttatactggtcagggatacatttgccctataatctggaggctacatgatctctagcttccaaggccgctttggtattcaaatatccttgaagtgatactctgaggcacgtagaaatgccatggagaatggcctcccagcaaattcaccccacatttttgcttctggcaaatttccccatgaagacaccaccccatcagccactctgattattcggacccatgggtccacatccattcaatttttttcctgcaacatttaacaaatcttgacccagtgcagcggctcactcatgttatcccagtactttgggaggccaatacaggaggatcacttgaggtcaggagttcaaaaaccagcctggacaacatagtgagaccccgtatctacacacacacacgtacccacacacatttcataaactgtaaacgatctaggtcccttatgagcacctctaaggtacaagtccttatgtgagggaggcaagttagtgcctggctttcatacaagaagcacaatcccaagggcacacgtggtgctcccagaagggaagtgtatacaattgttgggcttccctgagtgggatgtacattagtaagggagaaggtgaacagtgtctcttacgtggctcctggctggctgtaagccttggggttcccagttctgtttatccttgatttgtttgtgtgtggctggggagagggtgggcatatgggggactgcttgaggacagtctgtccaatctgtcctatttgtccatgtcaccaaccaggtggcagtcccccctaacaaatgactgagaatagtggtggagactatgtctagagggttctgtgtgggacctcagaagctgggcccagcccctgccatctcatggctggtgcagagaggctgactcagcattctcagaggcgggagcgctggagtagtgtgttttccttctggacaaagcatccttgggttcttctgaaagacagatatcaccaatgctcctgttttctcccatacctctttagatgtctggatttttgctcttgcttcactgctgcaaaatctgctataccattccagtggctgtaccttcatcttttgccctaattatctccttttctcacttagactttccatctacaaaattagatagaagtagaggaaaagcattttataaaatgtgcctggagttaaatctgaatccctaggcactttgaaggccatagccaccaggctggtaggggaaagaatgaggcatcatccctaggaatgaccagggtcacaacagaatcctgaattttcaagataggtctacagaacactcgcaatccccaccacttttgtcctggtcactatccaggaaggagatgatccctttctggagattgctcccttcaatgagcctactgccctcccatagtgtgcggacaggaggagatgagggacagtcagaaaatcagtgcactgtggagtcacttttctgataaagggcacgtcagactgcaaatggcccagatggccagtttgaggacactgatgagtttctggggtcaccatagcgttcctggagtcagctgctctgcagcctgaaggagggctgacagtgtggaggcagtgctgagattatttaaggaaactatatagaaattctataatgattatgtaattacataatgaaaactctccatatcagagttcagaatatctcccaatttccaacacagaatattatccataacaccatcaacctcaaggaggatgtcctctcattgcacatttgaatttacacaacaaacacttgaaaaagcaacatgaaacagcagttatcattcactttaaggtgccagcaagagttaattttccattaaaaattttgttcaaaggaacgtcatctcctgtagtctctcccaagcccatggcccaaggctcatgcagaggtaaaatataactctgtactcaacctccacgctgctacactgatcataaagtattttgccccattcctgcggaccaaagtatgaaaaaaaatctttaatactattggcatataaaactcagagaattatatttatacctctgcataattaactttattctctttggtttgaaggaaaaaagagggggcatggctggagcagaatgagaatgagaaggcaggaaaacagccaacaaaatggtaagcaggcaaagtgaagtagttacagcttttgagtttattagggcactgtccattgtattctggaaggcctgcagttccccagagccagagttctatacctcctgtatccattaggatgtagactaacaggctgtgacaaagaggcctgagaatgcaatggcttcaacaaaatggtttctaatgcatgtaatagtccagaggcccacagttaatagggaggtgttatcatcctcagtatgactttctttcctagctcaaagtatttttattaatttggaaagacattcctaagagggctaaatgaagaaatcagggtgtatgtgtatgtgtgcacaatagtaaacatacatatatgtataaccatattttatgtgaaattcatacttgtgaagtatatttttatgtatcctgatatacacatatgtaattatttatctgtacatataaaaagacataaatatagaaaaatagatggcagttcattcataaaaatatatgcagtggttacatttggtcagtgtaatagaggtgatgtttatatatttttatctgtggtttttaaatgtatgtgtatatattaaaatattataaatcttcaacatttttaatgaaaaagtgttattcaaaaagtaacatatgcaaaaagaaaagactaggagaatatttttgcacaaatcatcatctggagatagccatcctcatctgtggctatctccaatggtgatgtttcatatcattttattttctgaatttcctgtaaatatatttattctttataatcaggcccctgaaattttcaaaatttattttagccatggtctgaggacttccattcttctagacgatgaaggctaagtctcattttctaaatgattgtcaattttgaatcagtggatctaaatagtaagattttagagtcctattgaaagttattaatttttaccaatcttgccagttgatgtggcttcctggttggtggatgtgacagctttgtttggaaagaaaaaaaagtggctgcgtgcattttaagaatggctgttttcaaattgaaaatttgtttggactcaatcattataacattttcatttaagtctgaatcattataacattctcatttaagtctgtgtgtatgtagacaaattctaagagacttcaatgtgcaattaaatcctgtgtgtaacttaaaagtcgacactcccaaaagcaaaaaatgctctggacacctgctcgaggggatccagaatgagacccaggactccctcacttgcgtttgttcctgcctgacagctgttgttctgcccagttctattaatacattttcccctgcctatccccagataatagcaaagccgacggccaggtggtctccagtgaaaagaaggcgaacgtgaatctgaaagacctttccaagattaggggtaagataaagtttgtccgctttccctttgccctacaggtcaatacaaattttactgaggtattgacgagcctagatccaccttaattgtttactcatcaagcttagtcaattggagagcagtgaaatctaaaagagcaaactcattataagcaggggttgtaagttgattgtattcatatcatagatcttatctgcccagtttctaaaatagttttcctctgtgttttatctcattttcctggaaattcctttgcctcaaatcattgttttattaaaatggctggacctggtaaattgtaagccgaatacaggtttattctctcactgccctttcaagtcctcctcctagatgagttctttcctgtcttgagcaagctctgtcgctttcttgttcccttttaaaaacagtaagagtctcatttcagtagttgggacctttctgacctagtattaaactacaatgtcttccccagtttaaagcaccttcgcttcttcagcctaggcaagccttagtctggaacacatatagttgggggtgacatggtcagtgtcttctcttattctgtcttggccctacccccactccatagctgttggcttggtcccatccaggattggggaggtgagagagatgggtgagatcagagtgtggaagtgtcttgcctgacaggtgcagccgtgaaatgacattgcaagtggttgatgcacaatcactagctctttcttccatgagatgctttcatcaagtccactgcaagggaaggggaggggtcaggcatcacagcttgacttattttgaaagaaatagagctttacttctacaacctggatgtgagtgaagggctgaacctggcataatcagttccaccaactctttctaaggttacatatgtggcctggtgcattgtcctaggatgcgggtgctcaactcaacctacttgcttgggactttctcaattttcccaatgaaactctcatttccaagccataggtccactttgggtctgattggtcctttttactttggtggcctaatatgctcatgatatgcttagaacttatagtacttaggaatgcataggctggaaaatatttcctcatgggcctacatgaccctgatcagcacccccagatggtggtcattggatggtggacatccagcacaagaaggaaggaacattttgctttcctgccttggaaaataaaacacatttggacaatagtaaacattgagatgcccattcacagccaattaacatgcacttgggagaatatcatcggctgcagtgtctgccatgtcaatccttaattactatttggaatgaaggctgcggaaatctcaattctacccattcctcatggttaaccttcttctgattagtttcttagatcctaatatttattttgtccaaagccatgtggacaaagccctggtcacatttactattactttcagcacgagggtacaaatatcttcccccaatgtgacatgtgcagcatacatctcacctatgggacacctaatagggtttcccttaagtcacagaactgtcatttatttgtgtctctgctgagagaaactgaaacgccttcacttaattttgtagttttgtctcaattttctctgaatattttagtttctgtaatgacggtaatcatcattttgatcttgcaaagattaaataaattaatggatatgtaagtgtttaatgtgtattatatgtcatatatatttcaaatatatatgtttggaatgaaatatgaaatgaaccttcaaaatatggaatgaagcatttatacttttgcttgagatatacgtgaaatactgatttcaattagtttttttcctaacataagaataggaaaatgaaatataaagtgaacctaacattagctatctaattcttcataccttaaaggctagggtttaaatctttttatttatacattaaacaggcttttggaaagttacatttaaatggaatttttgaaaagctgtaatatgtgtaatacagctgctcataaatgactgtgattatattattctactttctcagggagaaagagaggcaaacctggaacccgcttcactcagagtgacagagctgcacagaaaagagtccgatcaagaggtaaaaaagaaaacaggaatgaactttcaataactaaacatctaatttcctgtgcggtacactgtactttcagtaataaacccatttccttaattgttttatgaagctgtactaactagtgagaaatgtatcctatttagtcattttccaaaatgtgtcaaggaaagaaggaagtaagttggtgatggatctacaaccagatcccaggggcccaggggccactaaagtgctactttcactgaaatgataaatttcaaggctggagatagttcattgccgtataaagggtataacccataagtgatttaactgaccttcctctgactactcagaaagccacaggttgcacactaagggtgaaaaagagttgtggttagagatctgtgtcctaagactttctttttctttgtgtgggcttaggctgatcatttgactttctttgtctcagttttctcatctggaaagcaagagcatgaattaggccaactatctttctttctttctttctttctttctttctttctttctttctttctttctttctttctttctttctttttttattctttaagttctgagatacacgtgtagaatgtgcaggttctacaacccatcatctacattaggtatttctcctaatgctatccttcccctaacccccaaatcccgacaggccccggtgtgtgatgttctgtccctgtgtccatgtgtccttattgttcgacttccacttatgagtgagagcatgtgatgtttggttttctgttcctgtgttagtttgcccagaatgatggtttccagcttcatccatgtccctgtaaaggacaggaactcattctttttcatggctgcatagtatttcatggtgtatatgtgccacattttctttatccagtctatcattgatggacatttgggctggttcctagtctttgctattgtgaacactgctgcaataaacacacgtgtgtgtgtctttatagtagactgatttataatcctttgggtatatatccagtaatgggactgctgggtcaaatggtatttctggttctagatccttgaggaatcgccacactgtcttccataacggttgaactaatttacactgcaaccaacagtgttaaagcttacctatttctccacatcctcttcagcatctgttgtttcctgactttttaatgattgccattctaactggcgtgagatggtatctcattgtggttttgatttgcatttctctaatgaccagtgatgatgagcttttattcatgtttgttggccagataagtgtcttcttttaagaagtgtctgttcatatcctttgcccactttttgatggggttgtttttttcttgtaaatttgttttaagtttcttgtagattctggatattagccctttgtcagatagatagactgcaaaaattttctttcattctgtaggtaggccaaccatctttcttattagtccatcctggtcctaatagtctgcctttctaaaaatttgtctcaggaccaaggacagctcccccgtttatcatgacttctgttgcccaggctggagtgcagtggtgtgatctcactgcagactccacctcccaggatccagcaattctcctgacttagcctcccaagtagctgggattacaggtgggcaccaccatacctggctaatttttgtatttttggtagagatggagtttcgccatgttggccaggctggtctcgaactcctgacgtcaagtgatccacctgccttgccctcccaaagtgctgagattacaggtgtgagccaccacgcctggccctacacctttggttggaagggaaggattcactgctcaccctcctggagttcctttgaagacctttcacccccttctctgtgaaatcaggtctccagtcccccacctgcaaccccatataattttcagattattctagagctccctgagctcttctcttagctacggggaaagcagacaggacagagaaatgaactaaaggagagaacaaaaatagaaggcagacatcatctccattaggttatcccatcattaccctctccctgcttgccccgtcagtgctcaaatggggagactgaatatgatctctggagtcatctaaggctacccacctgcagcaaaacagcatagctggagagcttctgtcagaacagtgacagcaactgtgtttcattgtcatataagaatcagtggagcttacgagattaggagttaaaccagttttactgaagtctaatttctctgctaaagcattctattttgtatgaaatttgaaaggtgaaattggggtagacattctgtaattatgtatcaaaaatgccacttggaagaaagactttgaaactctagagggttttggaatagaatttcctaagtatccctcgtgtctttataggaattacctcagtagggaggggggacgtgcctttgcaaagtgagacagaatgaagaaatcctctctttcagcttcaagaaagcacaaagatgaaactgtggattttaaggctcctttgcttccagtgacctgtggtggggtgaagggaattttacataagaagaaattgcagcaaggtaggttttatggtcttctttaatttgcagctcctatctgaaggcatcacaagtagtggggaattatcatgtgaattacacatcattcaaggagtttggtcccagtttggcttgagggaaggaggaagggatttctaagatgacgtttacagactttaagaaatcgcaaccaccagatgctcacttgcacatggaatgtccagagggtgcccaaagaaccaaagagaaggcaggaacatcaattcacagatgaaaaatgtcacgtattttactttgaatcagacagaaaaatgaagaggccctcaacctcgaccttcatattctctctcccttctggagtgccatcaccagggcagggtgcttggtatagggagatgatcacagaatttgggatcagaaagcctgagttccagcctttgctgtttcaggagtgactgttccattctgagtagagaagggaacctttctgaacctgaaatgtctcatccaagagagggaacaataatgaaaaacctgcctcatgatgtagctgtgagaattaatttgcatattgatgtaaaatatgtaaatttacatgtttttactgtaaattataaaactttgccaaaaaatgtctattagaatggccatcatctcagaccaatcttaatatgactctttggatgtcaattaacagaaatgtttgcattgtgactatttctaaacagctttactgagatatagttcacatatcatacaactcaccacttagagtgtacaaatcaacttttttttgtatagtcacagaattgtacagccatcattatcctctaattttggaacaatttgttccccactgaaagaaaagcccatgtcaattagcagtcagtgcctattcccacctaagcagccactaatctattttctgctctataagtttgcctactgtaggctttctagaagtggaatcctataatacatgccctttcctgactgccttcattcactaattgtgatattttcaaagttcatccacaatgaatgtattagtatttcatttcttttattgacaaataatatatgtcattgtatagatataccacactttgtttataaactcatcatttggaactatttccactctttggctattataaataatgctgttctgaacatttgtgtaacaagttttgtgtgaacatatttcagttcttttgggtatatagtcaagagaggaatgactacatcgtatggtaattctatgtttaatttattgaggaatcaccaaagtgtttccacagtggctgcactattctgtattcctaccagcaatgtatgaaggctccaatttctctacatgctcaccaactttgttatcgtctgtctgtctttttttattacagtcatactgtcatcctagtgggtatgacatggtatctcattttggttttggtttgtgtttccttaatggctaatggtgttgagcatgtgactatcttttacatataaattaaattttttatcagataacatttcacaattagttttttaatatcagctacctgtgattgcagggatatgaaaatttctgtttaataatgccactagactgcataaaacatgttataattgagagtgcagatgttgcgggagtgaccccctgagccacagggcacccatctgagaccgtagccccaagttgaggattctgcctccaacattgccctcacagccatctggagactcaggcctggcctctacttccaaatttgaatagcaagttggagtcctctcatctttcagaatcacttgcttttccttctgtaagtgcttttgaaatgcttaaaaggttgctcttgatgataaccatcactctcctcatggatgaaggtcaaagaaatgtgcacccccaccaggaaatatccttagaggggattttcaggctggatttggggcctctgtagtctgagagggaaggccagactctcctgctattgatctgcatcacaaattgggtggctctagatccagtgtggtgagtggccatagtctgtgcgctgggaaaaaagagggctcaggatcaagttaccctggtcttacaggaatcttggtgaagtgtatacagactgaggatggaaaatggttcacccccacggaatttgaaatcaaaggaggccatgcaagatcaaagaactggaggctgagtgtgcgctgtggcgggtggcccctacgatggctgatggaggtattccaatgacaaggggccaggcctgtgttccttcttgttccctaataatgaggagactgtttattcaccaaatatttgttaggttatagctaaagccttgatgccagtgggtttatcctctcactcaggagagagggaccccacattcataaccacactacagtgcaacacattgacgttgtaccaggggctccgtcaggatagactcagcagcttggaggaggaaagggtcattctgactagggtgcatgcagacagctttgtgcactgaaagaaagaagggagttgacagtcaagcagtggaagaagacacttcagagaaagaatggcataaaagccagaatgccatgaaaaccagaaccatggcaaaagtagctctgtggatttaggtagcacaggttgtgtgcaattaggtataatttaacaattggggcaggttgtgcagggctttaatgccaggctaaggagtttaaacctgtaattgagataacaaggattcagtgaaatcttctaggattggaaatgacatttaaaacaatattttattttatttatttatttttaggagacagtctcactctgttgcccaagcaggagtgcagtggctcaatctcggctcactgcaacctccacctcccagattcaagtgattcttgtgcctcagcctctcgagtagctggaactacggttgtgcaccaccatgccaggctaatttttgtatttttagtagaaatggggttttgtcacgttggccaggctgatctcgaattcctggcgtcaagcgggaggcctcctcggcctcccaaaatgctggggttacaggcgacagccaccccgccccgccataaaacagtattttagacagccacggggctttccccctagcaaacctatactcaatctagaatgctcagttcaagtgttaccccttcctgaatgttcattgattgacctgtcatgggccattgaccaggccttcccagggctcctgagccctctactaaggcctttcattcactgttttatatttattattttgtgagtgctttttgtccgtagactcctttaggttgtcccatcttcatgtgcccaagattgatcagaattactgatacccagtagcaggcaatgtgtgtgctgcttggatagctctggtgtaaggactccagctggagtggcactggtgggactggaagagaggtgataggtggtatgagattgtgaaggaaaacctcttaggacttaggaaagaagcacaagagaagggaaaatggtcctgaagatgcttttctggcttctattgattgaagtctagaagaagcacaggtgaagacagggagatggtttctcattagacaccttggatttgagctggcagtggaacactcaggtagaaatatttgggaggaggttggaaatgccagactcacaaaacggaaacacaggctgaccatatacctgaatctttttgtctttcagaatggatttctgcctgatcctccaagaatacgttacaggaaaaaaaaggtgattattacatagctttatacagcttcttgtcacataactgatttagcatgcacaaaatcttattttatggggtctgaaattgggtaggaataattaagctttcaccttcttcactactcaccttaaaatactttttgcatgtattccttcagagtcgctaatttgaacactaaatgtatataaagctaggtcctgtttggattcaaccatttcatatgaagatgataaggagccatcagaatatacgtcctgggagtgttttagcaatagatgcagatgtcttaagagtgtccaagttggaaagtcaagcatggtcatgggatacataaaaatatttcatagtaaggtgagaggatcaccttcaactcaaaattcagatttttttcattgaagttactattttctaactttagtgaaataggatggagcagatatttgctcacatccatttgagacatgcatgaaaccatatatcatttaatgaaatcggcaacaaaaagaatatttcttttctgatccttcacattctctttcaccttccaaaaaaatgtacacacagacacacagaatgtcttctcaaggtgaaattatttcctgttaccacaatggtgccactgaggaggaagatctccagaggcaaatgtattttataggaggggctgaccaggaaaatcttttatgttgatgccacctctttggctctaccagagggactgtgcagacctgctttttatctgtgaaagtgatttttccctctcttgaagaatgcaacaaacaaataggttaagtgcagtgtatattcaggacaaggtgatggtttttccaagactgggtatgaatgagaacctgaggagggggaagagaaaaatgtcatccttatgcacttcaggtagaaatacgcattcaagacattcacagacttctaaaacagctcacacatagctagccactaagcttcatattccactgggaacctgagatgcaggcctttacattatctgatatactggctgatttgaattttcagccactgagacatttcatccactgggtttcccgaagggaaactatgatgtcacctattcagtgactacactaaagaccagcatctctacctttcaccgggtgccaagagtaactgagtctggatgacccaaatgagctggcaatttccgactaaccgactctccctctattctggggtgcaaaacttagcagcgacaaggtgcagttgcctctatatgttgtgtctcctcatgggggagaacagaaggtcccttaagtggcagatccaggatccattatgaactccatgggtcctctgtgcctctcagagcttctcttacttgcagagccatttggctttaggaaatttcagtgtcactatgagtgccacatgatagcatctctgctcatgacaagggccacatagaccttttggtggcacctgagatattgtaaagcaatctgatatactcacccagaataattgttgtatgctaatgtttgcttaagagcctccagtgatttctaagtgaatcaacattcatttattcacccactcaacatataattatcaagcacacactaaatgccaatggacattacagaagattgacctcaaaaattatttcaggccaaacatggtcacttgagcctataatgccagcattttgagaggctgagatgggagaatcattggagcccaggaatttgagaccaacctgagcaacatagtgagataccatctctaccaaaaaaaaaaaaaaattacccagacattgtggtgtacacctgtagtcccacctactcaggagactgaggtgggaagatcacttgagcctgaaaggtcaaagctgtactgggctgtgatttcatcatagcactccagcctaggtgactgagtgagactctgtctcaaaaaataaaaaaagttttaaatttattgtcaacatggatgaattacaaatggggtggggtgggagattctagaccagttggagaggcattcagtgacaaggtcatctctcaggtgcttgtcctttgaatcacacttgtttatggcctctgtgccctgggctacagacaaaagctgaggctgcttgtatcccagaagggaaggatgccaagtcatgccatggatatccaaaagcaatctaaataaatgtagtgggttacctcttaaaagtcagtcaacctggcatcttcttgtgatttggatagaagggagagggagagagtttcaggaaaaagagctgcagcacagaggaccttggaggcattttatcaccagggctgtgtccctaggggagctgcagaaagcagtgctcttcttgtctgggacacttgcatggcctctaggactctgagtcctgtggtcccaggaggctgtgggagataagtcctcagcctgattattattgaggctcctctgggtgggatgacacaaaggccaagtttaggaaatatgcctgagggccccttgaagtaagaggacaagtagagcttctctgacttggcctgtgcaaactaggtccagactccctgcagggaatgggacttgcattgggattaacggtagtacttgcacactttttattctttcagtagatatataggtccaaaaaatcagatatgaggtaaagggaagactgtttacaaaaataaaactttagacaaaataaaatttatagcatttatttgagcaaagagcaattcatgaattgggcagcactcagaacaaggagaggttcagagaactctgctgtagcagcccagacagtgaggccaacacaggagtaagacagagaaactatatttaatgggttatcatagaaagatgataattagaggttagatggcagattctagttggtaaaatctctagtttcattttactgtttacatcaggtttcagtttgcttacttagaaacttaaaccactggagccaccccagcctactggccttctctcttcccaattattttttaacaactggttcctgaatcccttcaaagaatactatttaaatttaaataagtgatagatggaaacaatgcattcaatatcataaatcaatctttctgttttttcaacagagaatactgaagtctcaaaacaatagctcagttgacccttgtgtaagtacaaattctgaactacgacccccagaatattccactcctttctccaggcatatgttctgtgtcatgactgctgttgcctgaatcatgttcagtctcagctggagtatgtggctgtgtgaattcagttgcatcacccaagccaggtagatgtgcctgggccttggatgtctcattatgaaagcaccctttccatctgtttcagtagaaaccttccaatgtccttatttcccctggaaagtgagtatgggaggctgagctccagaccactgaggtctcttgagacagagcctgaagtggtaatgggtagggctggcctggtgattagggggaaggaacaaatgtgagaggataacagcattttcaagtaagtggtgtggatgaaagggaaagtcctaaaaatgcactccaaggtgcaggtagagttgaagatggtcataagcatcagccagaaggaacagaccaggccaagctattatgttccaggtgttgatcctgtcattagccctgtaaaggagtacatacaaggcaaggggtcctttacagagctcatttggatggtttcagggaagccattagggtgctgagctggttaggactgaaaccatcacgacctagcaaatcctgaggcattttaactcaactgcttatctggtgctcagtactatgcaaactttctgatgccacaggccccatccattctctgcttgctatatgactgcctgctttggattctgccaaaatcatggatgagtcccttctctaaatgaaatcgtgatttgattcttttcattgcagtgagatgtctgttttaggccgggtcaccttcttgcacaactctgggggacagcactcacatagaatatcatgcaatagcactgacacatgatacttaacagaggagggatgctcaaatagttttatacacaccttacctccaaagcagtcctccaatcagatttaggtcttttccacactgattttgatgtctggccaactgagggacttttcaataattaaaacagccctggaagtcagtgtttgtgtggctgattttggatggactaggcatggaggtttaggtttcacagctcacagccagatatgtgtggggagaagagggaaacagttccagcaaaggtatggtcacccctgttaataatttttccaaggccagtaacaacattgacttataatatccccatgcgtccataaccagactttgcttaggttgaatctcatattgtcctgcagcctggaatcacttgaagagctttaaaaaaatattgtttcctggatcccacttctggggaaattataatttaatcattctggactatgtatgactggaacattaggatttgtttaagatccccagatgtactaattctgatacatagaattgcctattctgtcacctaaagaagaataccagtgcctgtgcctcaaccctgacccagtgattcagaatctctggtgttgggttcaggacattagcattttatatactctcctgagaggagtctaatgtacagccaggccaacaaccaaagaaccagagaaatcaaatctcttcttgaaaagatgggtttggagaacaaaatggcagataggaggcaggactaacttgctcctcctactcagatggacagaacagcgtgttgagactcacactgtgaacttttgctccaagaaccactgcaggaatataccagcaaaactgaaggaagtcacacaccctttaaaagaagtggcttgccaccgcaaactctgggagatagccaaaaaaccgtgagtcctcaaagtgtgagagggaaaaagtccacctctgaacacatatcctcactggggaacctggaaatccagatcacaggagaaggatttcacctaacctagagctgaaatgaatttagaaagctgggtgaaatataaaagtagaataagcagcaggaagaggtgccttccccaaggatccctataagcatttcagtccccagggaagccatttctgactttatctcacagtccttggggagggcagccagtacaatttgcagagagccatggggagaaggaggcttccagctgaactttgtaataattttaaccaagcacaaattttcctggtcagaatctgggggtgtgaacctgaagtacagatataagtgcagaagccatggcaggcagggaggggtgagatctgaaagccctgcttgctttctcaatgggggtgcttcttcctggggcaagatcttagctccaggcaaaggatgcctggatataaatttggctctgttggctgttgggcaccacagcgggagtgagactggccttgctggctgcctgggtgctgggtgaagcctgtcactgccggcttcccttacttatctggtgaactgtatgaagcagcagaggcaggcataatcccctctggaacataaatccattggcctgcaagccacccctcatcccccacagtggccacagcaagccctgtctgagaatctgagctcagacacacctaaccctgcccccagctgatggtctttctctacctgcccctgtagctgaagacaaaagacaggggctcatgggagctctatgacctcacccatcacctgagaaaaccgaatacttatccagtgaacttaggtcaagcttgtatccccctcatattacttgcagctgatggtctcttgaaagtgccacctcctcgccgaaggtcagccaactcaagtcattacagacactcatacgagaaccaccttgctccaggaaggagaaaacaacaactaattatactgcctgtaacatcctggctaaccaaagatcctgagtctgtccctgtaacaacctcactgctagcataaccaacatttgagaaaaccagtgtactaaacaaaactacaatcaaggactctcacagaatccacttcactcccctgctacctccactggagcacgtgctggtacccatgactgggagaactgaagacagatcacatcacaggaccctttgcagatactccccagtaccagcccagaacccagtagctcttctgggtggctagacccagaagagcaataacaatcacagcagtttggctctcgggaagcccatccctaggggaagggggagaacaccacattaagggatcaccctgtggaacaagagaatctgaacagcagctcttgagtttcagatctttcctctaacgtagtctacccaagtgagaaggaaccagaaaaacaattctgataatgacaaaacaaagttctataacacccccaaaagatcacgttagctcaccagcaatggatccaaaccaagaagaaatctctgaattgccagaaaaagaattcagaaggtcaattattcagctactcaaggagacaccagataaaggtgtaaaccaacttaaaggaattaaaataataatacaggatatggatgaaaaagtctccagagaaatagatatcataaataaaaatcaatcacaacttctggaagtgaaagacatacttagagaaatacaaaatacactggcaagtttcaacaatagactagaacaagtagaagaatgaactacagaactcgaagacaaggctctggaattaacccaatccaacaagaaaaaagaactttttaaaaatgaacaaagcctccacgaagtttaggattatgataaatgaccaaacctaagaataatttgtgttcctcagcaagaaatctaaaagtttggaaaacatattcgcgggaataatcaaagaaaatgttgctggcctttctagagatttagacatccaaatacaagaagctcaaagaacatctggaaaattcatcacaaaaagataatcactcaggcagagtcatcaggttatctaaagttaagatgaaggaaagaatctatgaagcaaaaacatcagctaaactacaaaggaaaacttatctaatgattaacagcagacttctcagcagaaaccctacaagctagaaggctttgggatcctatctttagcctccttaaacaaaataattatcagccaagaattttgtatccaagaaactaagcttcataaatgaaggaaagataaagtctttttcagacaaacaaatgctgagagaattcaccactaccaagccagtgctacaagaactgctaaaaggagttctaaatcttaaaacaatatatcaaaatataccaaaatagaaccccctaaagcataaatatcacaggcctattaaaaaataacacaatgaaaaaaataaggtattcaggcaacagctagcatgatgaatagaatagtacctcacatctcaatactaatgttgaatgtaaatgacctaaattcttcacttaaaagatacagaatggcagaatggataggaatttaccaggcacctgctgtcttcaagagactcacctaacacataaggactcacataaacttaaggtaaaggggtagaaaaagatatgccatgcaaatggacaccaaaagcgagcaggagtaggtattcttacatcatacaaaacagactttaaagcaacaacagttaaaaaagacaaagagcgaccttatataatgataaaaggactagtccaacaggaaactagcacaatcctaaatatgcacctaactgtggagttcccaaatttacaaaacaattactcactttgggaggccgaggtgggtggatcacaaggtcaggagatcaagaccatcctggctaatgcagtgaaaccccatctctactaaaaatacaaaaaaaaaaaaaaattagctgggcgtggtggcaggcacctgtactcccagctactcaggaagctgaggcaggagaatggcatgaacccaggaggcagagcttgcactgagccaagattgcaccactgtactccagcctgggcaacagagtgagactccatctcagaaacaaaaacaaaaacaatttctactagacctaagaaatgagatagatggcaacagaatgatactgggggacttcagtactctgctgacagcactagacaggtcatcaagacagaaagtcaaccaagaaacaatggacttaaactgtacactagaacaaatggacttaacagatattacagaacattctacccaacaactgcagaacatacattcttttcatcagtacctggaacattctccaagatagaccatatcataggccacataacaagtctcaacaaatttaagaaaattgaaattatagcaagtactctctcagaccacagtggaataaaattggaaatcagctccaaaaggaaccctcaaaaccaggcacgtacatggaaattaaataatcttctcctgaatgatcattgggtccacaatgaaatcaagatggaaatgaaaaaatcctttgaactgaacgacaataatgacacaagctatcaaaacctctgggatacaggaaaagcaatgctaagaggaaaattcatagcattgaatgcctacatcaaaaagtctgaaagagcacaaatagacaatctaagttcacacctgaaggaactagagaaagaagaacaaaccaaacccaaacccagcagaagaaaagaaataacaaagatcagagaagaactaaatgaaattgaaacaaaaaaaatacaaaagatatatgaaacaaaaagctggttatttgaaaagataaacaaaattgatacactattagcaagattaaccaagaaaagactagagaagatccaaataagcccaattagaaacaaaatgggagatattacaaccaacaccacagaaatacagaagatcacttaagtctactatgaacacctttatgcacacaaactagaaaacctagaggggatggataaattcctggaaatatacaaccctcctagattaaagcaggcagaaatagaaattctgaagagaccagtaacaagcagtgagattgaaatggtaattaaaaaattgccaatactagaaaggccaagaccagatggattgattcacagctgaattctatcagacattcaaagaagaattggtatcaatcctactgaaaccattccaaaacatagagaaagagggcatcctccctaaatcattctatgaagccagtatcaccctaataccaaaaccaggaaagggcatagctcatgtcaacaaatgtgatataccacataatcagaattaaaaacaaaaattgtatgatcatctcaataaagacagcaaaagcatttgacaaaatccagcaccttttataattaaaaccctccacaaaattggcatagaggggacataccttaaggtaataaaagccatctatgacaaacccatagccaacataatactgaaatggcaaaagttgaaagcattccctctgagacctggaacaagacaaggatgcccactttcaccacttctattctacatgatactagaagtcctaggcagagcaatcagacaagagaaggaaataaagggcatccaaatcagtaaagaggaagtcaaactgttgctggtcgccaatatgatcgtatacctagaaaaccctaaggactcatccaaaaacctcctagatatgataaatgaattcagtaaagcttcaggatacaaaatcaatatatacaaatcaatagcactgttatatactaacagagacaaagctgagaatcaaatcaagaactcaaccccttttacactagctgcaaaaaaataaaatacttaggaatgtacctaaccacagagatgaaatacctctacaaggaaaactacaaaacactgctgaaagaaatcacagatgacacaaacaaatggaaacatgtcctatgctcgtggatgggtagaatcaatattgtgaaaatgatcatatggccaatagcaatctggaaagtcaatgcaattcccatcaaaataccatgatcatttttcacagaactagaaaaaacaattctaaaattcatacagaaccaaaaaagagctcatgtagccaaagcaagactaagcacaaagaaaaaacttggaggcatcacattacctgacttcaaactatactacaaggctatagtcacccaaacaacatagtccaggtatgagaatataccagtacacatagaccaatggaacagaagaaaggacccagaaataaagccaaatatttgcagccagctaacctttgacaaagcaaacaaaagcataaagggggaaaggacaccccattcaaccaatagcactggcataattggcaagccacatttagaagaatgaaattgaatcctcatctctcaccttatacaaaaatcaactaaagatggatcaaagacttaaatctaagacctgaaaccatataaattctagaaaataacattggaaaaactcttctaggcattggcttaggcaaagagttcaggaccaaaaacgcaaaagcaaatgcaagaaaaacaaagataaatagatgggatttaattaaactaaaaggcttctatacagcaaaagaaataacagaataaacagacaacccacagagtaggagaaaatatttgcaaactatgcatccgacggaggactaatatccagaatctacaaggaactcaaagcaatcagcaagaaaaaatcaaataatcccatcaaaaagtgggctaaggacatgaatagacaattctcaaaagaagatatacaaatggccaacgaacatgaaaaaatgctcagcatcactaattatcagggaaatgcaaatcaaaaccgcaatgcgataccaccttactcctgcaagaatggccataacttaaagatcaaaaaataataggtgttggcatggatgtggtgaaaatggaacacttttacacttctggtgggaatgtaaactagtacagccactacagaaaacagtacagaggttccttaaagaagtataagtagatctaccatttcatccagcaatcccactactgacggcagcggcaggcagtctgaagtggctgctgccatgaagctggctgcagtgaggtgcaggcgctggccgtgggtcttagggggcagacacagaggcaggagatccccagagccagttgccctgggagccttcctctgggagccgctgcaatggggctaggcccagctgcccgtagggcgtggtcaggcagggaggggtgagcagagagaggtcccaagatggagctgggccagtggtggttcggcacttgcacacgtagcgtgggggtcgggcccgaacgcggagcagtggccacacttcaggggccggggtgggaagtgggagtggcgcccacttccaggacccagccagcaatgcggcccctgcacccaccctgcccacagcgccaggttcccgcccctcacaggaggctgaacaaagggccgccagaggccgtgtccctaggatctgccccgagttagagtgactgctgtgcctggtgctttcagcagctgagactggggaggcaatccggtcctggaggtttcccccaggcagggtcacaagccaggagagggggtgccccaagccatccctgagccttggggccacaggaggaacttgagccaacatcacccctgcaccagatgctggcctgggcctggcaagggctggagccaccaacccaggctgcaaggaggcagacagggcagcaggaacggccagaggagcagcagtggcagcagtgggtccctgtgccctgtgtccctgaggcagggaccctcaccctcacacagccggcaggacctgctctcaggcccagagcctctatcacagcctggacctctttccccactgcatcctgggaacctgcaagcacctggccaaaggtgcagccgagactcacagaactggcccctgagtgtcaggttcctttgtgtgaggttggctggggcactgtgccacctgcacctcatccacaactgctgcaggagacacagagagggggcatggctgaggccgccccactctgcagagccaaggacaagcaggagccctgcctctcccaaattggcagggcaggagctcgccatgcgcaactgcaggtgcccaggttgcagctgtaggcctgggcctcccagtgctcttgggggcccaggaggctaccctccacctgccagaacagaagcttctgctgcctggccattccctgctcccagcacctgctgcaatcttggagcagggttggggctgagcccaggtgcagttgcagccctgttgggtgtgcacatgcttggggcagagctgacacaccaggcccctgctgcctgcacccctctggattttgggtgctgacgatcataggagagaggccaagaatgggctggggccagctcagcactggcctgcaggtgcccctttgggcaaggggcctgggcaccatgggtggtggggaaaggcagacaggctcctgggtgggaaggggcaggtccctggtgaggcaccaccttcaggcaagagagggcctgaaggctgggaactgggctgccaatcctatggaccagagtgggaacttgtaatgcctttcaaaggcctgctcatggtaacccatggaccaatcagcatacacttcctcccctctgaagcccataaaagctctggactcagtcagacttggagagaacatcctggacaaccagcagcagagaagagcttcacactccagggactacctgccagcagagagaagccacccaccctaggacctcctcctctttgctgagggctgaacactcgtcaggacacattggctgcagaaaggagctacccacagtgggtctctgagctgttctactgctcggtaaagctcctcttcgtcttgctcaccctccatttgtcagcgtccctcattcttcctggttgcaggacaaaagaacttgggatctgctgaatggtgaggctaaaagagctgtaacacaaacagggctgaaacatgccccttgatcaccgcattgtgggtgaagagaaggagagaagagctgcagccctttggggagcccagacctggaagctccctgagccagggctgtgactcccttttggaggctctgaggttcctggcatcttcaagcttctaggtgccagcacatcccctgttgccagccatggaagctgtttgcagtgtgcctggtccagacacagccttgcagagagccagtgctcatgccagcacctggagttgcctgcccttatgcaatagcaggcatgtctgactgtatgcagtggctggaccccatgcttgctcacacgcctctcccactccatgcctgacctgccccatggcaggcccttggtaggtatgcgatccaggccagtagcctgagccaagtgcagcctgccaggccaagtgggtggaaggagcccagtgggcctgagcaaaactcaggcaaaggcacaactgcttacagaggtttctggcaagaaaaagcaataccccaaggattccgtaacactactgggtgtctacctagtggaaaaaaagttatatgaaaaagacacttggacatgcatgtatatatatatatatatatatatatatatatatatacacacacacacacacacacacacacagagacacacacacacacacaccatggaatactactcaggtataaaaaggaatgaaataatgacattcacagcaacctggatggagttggagaccattattctaagtgaagtaactcaggaatggaaaaccaaacaacgtgtgttctcacttataagttggagctaagctatgaggatgcaaaggcataagaatgatacaatgggccttggggactgagagggaagggtggaggagggtgagggataaaagactacacattgggtacagcgtacactgctcttgtgatgagtgcaccaaaatctcaaaagccaccactaaaaaaattatccatgtaaccaaaaaccacctgttcccccaaaactattgaaataataattttttaaaaagattaaggattcgacatacttaaacatttggtacttcattccctccctagggttttggagatggtggaacacacagcatctgacactggacagatgagattgacagcagtgtattagtcacatttactcggtagcccggtgggggtgggcaggcatcccacgccacgcagggccacatgggggctgcgctcaggaacagaggaaacagccagtggctgtggagggcgggctgtcccctgcttccagagggagagtgtgattggcttgtttgaataattccatggctggcagggaaatgaaatcagctattcaaaaatacgcagaaggtgcaagcggtcctcttgatcagaagtgttggtaggaaaccttacctgcagcagcagagccggcggaggacttgtagatagaccattctaggccctcccagtgttaccagatgtccaggctgcacataatattgaactctaattttagtccttacagcacttttcacttgaacggcaaagggctcagtcacagactggttctttgttgtaaatacacatgtatttgtctacaatacagcatgtatgtattggtctctatatttgctctataaattctgttggtttttaatgaccgggatttgctccacaacacgtggatgcaaataccatcatattttaatttccccaaatgaaattaaatctggctaaaggtgtcacatattgagacttgtaagaaatggagaattcgttgatttaccattccttttatagaacaaagcaccagctcttttatgggcccaggaaatgaggtgagggcctctgtcttcaacactgtatggtgctgttaccattgtccttggtcatcagagatggcaccttcgcaccttacaatccaagttagctaagtcaagggggatgtatgccaggctcccagagctgaagagctctgtgcttcctggggcccacctggtcatctccacccacggtccttccccctcagaggtcggcgtagagccctccaggcacaaaacgtacagtctaggaatccctaactaggccctctcttcaactcatggggaacttatggccaagaatatgggatgtggtgatatctcagaagcttattccatcatatgtaattagctaggtctccttttcactagttgatttgtggtataggcaaattgatttaacacttcatttcaaaacctggttttatctgcagaataaggaaattattcagattcctataaaatcatcatcttgctttgttgctagtctttcttcattacaatctctggtttcataaggaagacttttcaattctgacccataccccttcctcctgaacttcactgcagaccaggatttgttctgaaatctccatgccatgtttttccttcatatcccagggagaagcatttgcctgtccatgcaggttcacacaaaggcagtgtgttctagttgcccagagggttggccttcctgaatcttgcggttcccagtgacgtggacactgttttatcttctagatgagaaacctggatgagtgtgaggtgtgccgggacggaggggagctgttctgttgcgacacttgttcaagagtcttccatgaggactgtcacatcccgcctgtggaagctgagaggtaagtgacatgcaggcgtctctctttttgtcctttaagggatcttccacctgccatgcgcactctccagcagagtgccggcttgtgtctagatggggaaagagcaggttcatcgggtactgggacccagcagtgtgatccagagagcagtgggagacgctggcagcaggaggttaatgtcctctgtgctctcagggacacctcctctgatatgctgagggcagtgttggggacctttgcctacataccggcattgtcctttccttgaagttttgcagctgggtgggttggagacaagaaacaccagttgtttatattttgtgcttattcatacaagacaggaagcacgatctcattgggctgttggaggcccgaggtccctggggctgaaaacccagtttctgaaactcaggcctgacagacagggttccctgtgctcccagcagctcagacagagaaaggagagtccacactcacggtgacaccaccttcctcagacttcctgcctgctgctaccactgatgcgagggaaaggccaatggctggagaccccatgtgtgaatcttgcatactttgggaggtgttcccctccctcccatgactgagcccatcagccattcctgaaggaagacagtggtagccacaggaacggtggccatttccaagctccctgccctctgctcacccatgtccaatctctcaggaccccgtggaattgcatcttctgcaggatgaaggagtctccgggaagccaacagtgttgtcaggaatctgaggtcctggagaggcagatgtgtcctgaggaacagttggtaaatcagatgcaaaccccaagccttctcctttcccctcacacgtgagaaccatgaacaagcgcaagggcaggggaatgtactgaaaggagcctgctcttccgcgccacacttcaatggcactgatagaacaccacaccttgtttgcacaaaaaataactcagccatgacatgtctgtttccaagagccacacatgttagagaaacttgaggaagaagggtgtgagttctgtgctgtgtctcatgcatgtgggctcattctctccaagctgcttttcatttacggcctctttcttttgcagaaatgtgagttcctcctcttgaaagtctattgctgttctgagagctccttttttgccaagattccatactattattatgtaagtaacaacagcaacccatgattacaggctgccatgacattacctgaccctgaaatgggccctcgtgagatttgtgatcttaatcccacggggcaagagcacacgctgtcgttagttgccttcaccttgttgtatttctgctggattttatgggaatccacagaaggtagacactgaactatgctggtagcttttccattggtatatttgtcaccagattagagaggcgtgtcaaggcctgaaggagcccatgtggttggataaaatcaagaaaaggctgaatgagcacggttacccccaagtggaggggtttgtacaagacatgcgcctcatcttccagaaccacagggcctcttacaaggtaggtggctcttcctgcttccatttcatttctttccatccttcccctcattttctggtgccaagaaaaatttagtttccctcatcctgtaataagcttgcacgagcaagggttctggaagtgattgattggtttcagttcagaacttaagctcttcttagcaaagaaacagtgaatcaaaaggtgtccctgcaaccagaaccccaggtccctgagagctcctcccccacctgccccagaggagacaggagctcagagagagcaattgaatcctgcctgctgcagcatataaagaggagagaatttcatcttaaagtggtattgtgcttcttatctgctcccaatcccagaaatcccaaactccagattctttgcatgtgaatagaccatatcccaacaaggattgccagcaaggagtagaagtgacagagaaaggaacagatcagtgatcttaccttatacccttccactatctgaattgttgaaagaacctagattgcttttctaacccactgaaataagcaaccaaaggcaaagaagtaataatcccagctgtggaaatgatttcacttttctgccctgttaataagaaaggatcatgctggtaagaaacggaagttactcttagctgcatgagttttcaagtttaacctggttaatgtaacttagggtgtttaagataagtgttctacttaataatagtgtatttcacacttcaacattgttaagaaagtaaatttcaaatgtactcaccacaaaaaaatgataactatttgaggtgatgaatatgttaattagttcaatttaattattccacatagcagtcataaatcacaacattactttgtactccaaaatatatgccattataaattgtagacttacagtacttttttttttaaagacaagagtcctgatcattctcagttgaaaggtgtctcatgacgctaatgatgaggagcattgtttttgtctttattattttttcagtacaaggattttggccaaatgggatttagactggaggctgagtttgagaagaatttcaaggaagtgtttgctattcaggaaacaaatgggaacaattgactggattagtggatgctgaaagcattcagcaaatggcaccctaaaatatgccgctggtttgccactgacttcaaaatgaggtcacttgggcacagcacatgcagggaggggcttttctctgagcctccttcatctgcccaaagacaaatcctcaaaaggaaattcaatcatcatgaatcacaaccccaagtatctcatcagccagggaagagtaagtgggatcacagggaaggatgttggcagcgacaccatcccatacaggctcttacctcttctcctgagggctgctccagacaacatttattacccagaagaccttttgtctgaaaaccagccaagctttattcaggacacacttcttgccttcactttcccacttccgtggccacctccatgcagaagccctaagcccacattctttcgatagctcacggtggtgcatgagtgtccatcatctgactcttctcggagtctcatattttgtgggactcctgtgcaaacatatgttattaaaatttttttcctcctgtt

SEQ ID NO: 1271 - DNA, 44744 bp, Homo sapiens
atagacagacgaacgggagtgggcggagcgggcgccggatgtgacgtttccggaacctccgggtgtcatccgcggggaaaggtggggaagggtcccgggaacgtggtggggcagggcctccgagcgtggttggactttgaaggggatcggccgccgtgagtgtggggcctgcagcctactctccccgagtcccctgcccggcctgcctcgctcgaggcacccgacggcttctgtctccgcgggctggcgcctgaccagccaggcccagcggttccccgcctactgcatttgaaagatcccgaaaaccctggatgattgtgcctggggttggcaagttcgtcttgagtgccttcaagaagggttcctcaagcagttgtcgatagagccctccctactgtatacgccccctccgctcattcctgctacttcctttctcctcctcgtatttccccctcggtcctttacgccgcctttccccctcatttgcagatgctgcatcccctttttggaattgctcaaccaggtggtaaccggcgccgcttcctggccttgggaggtggttcctttcttaacccacaagaacctctcccaagaggtactgagatgcaacaagcatcctctgtttcagttaactttcatgggccgtggactaggtttactaattacttggggaggttttagatatgcttgcggctttctgagtccctaaggaggcctcgtgagagatggactatctctgcatccctagtagtcctcacggcttttgtgctattagtgagggtgttttagaggggaaggtttgtggaggaattgtgacccgaatattgaagagacctaaagatggaattggctgagagaagactacccctgagggaagagttgtagtagaaaagaaaaactggatagataaatgaaactgaaatgtgaggatgcctgggcggattggaatcctgactgaagcaaaagatctctgttggggagggccagttgccacagggccttgaattccaagatttattctactgtagtttgtgtattctagagcatactgattagggtttgctgtaatgcaatgtgtgtcaaatgcccagttttattttggagatgatagtggtgatatctggttggaatttggaatctgattctaacagcaactatatctagaaagactagaattactggagttttgggacaccaggggtttttgcaatgcaagttaccatcgtgcctttttgttattcagtgtttagtctatgaagatgagtaaatggttgttttcaagatttaagtctcttgccatgataatgatgaatgaatgattttatagattgactatagtggtttagtgagcagagttacaattatgagcattaattcccagaccagttcccctaactcaccttgtgctcaaatatgaaaaaggataccacagaaaatgtcagttactctcagattaagtaaaaatggtcaaccttgaagttagttaacaatcctcaagaaagttcactgagtgcactctgccaggtactggggtggaggtatgtgggtatctggaaggagaaataatagaaaataaaagatgctgttcccacttttacagtgctgtgggcggagccccctaatggcaaaggatttgattaacttgaactgaacctttggttggtccactgtggttctactccttataccacctaattatggtacaggggttgtatgttttctagtctgccagtactctcatcgttgtgatttgggcttccttgagggtctcagccttcttgtaggaaagtccttatttaataggagccacagcatttggtatgtttctcttatattttcttcttaaggtagaggtctgtgagataaactgtaaaactgctgggatgatgagggcaacggtattgatgccatctgttttttctgtctcagaacttggtcctgatgtctgaccatggagatgtgagcctcccgcccgaagaccgggtgagggctctctcccagctgggtagtgcggtagaggtgaatgaagacattccaccccgtcggtacttccgctctggagttgagattatccgaatggcatccatttactctgaggaaggcaacattgaacatgccttcatcctctataacaagtatatcacgtaagacacctacagtttcctttttcctttctggtgactggtgcctcgcctatttggctcagaattgctaaaaccacagaacttcacaatatcatcaacattaatcatttttgctggcaactcctacatattggctgtccttgccgttcaaagacatgagtgctgaaggtgttattttcatgactcagtaatttatgagtaagagatttagttctttggcctatgcccacatagcccagctgttagacaaaagagttggtggttaaactagacatattatgttctgatgaatgcttttactgttctctttctactaaagcagccaatcataggattattgttggggtctagcagagccaaaattcctcacttgtacttattttgtagcaaatttagtgatacaggaaaaaattttttcctcttaacctttatcataatcatgcaaatcatcaaataattagtaactgcctacagtttgtgtggctcatcataataagacctttcccttaagttatttatcatcttagggtaggcagcataagtagaagatttcagtactattaacagcaaacaacttctaaaactccattgacaatgatacataatttagaaaggaaataatgttaaaggtcttatttatcatttctaatcttgttctttcacaatatcaggactttttaaaaaataattataatgtatttggttctgagtagctcatagtgtgtttcacctgcataatttcatttgatcttcacagttctgtgtgcatggaatagggtacactaccctacattctacatatgaggaaacaaactcagtgtttggtggatgctcatgtttgaagtgacaaaaccttggttttctgactcctaattcaggatttgttctacaacataggtcctgttcttcttgttttccatttagtaatgttctagagtcagaggtagtcttttgagatcatagtcatgagccacactggctatttttttgttatttattttactactgatttttgagtaggtaacatatatatatatatatatatatatacacatatatatggtgcacaattcagaggcacaaaagaataactatagttaaaaagtaagtcttggccaggcgcagtggctctcgcctgtaatcccagcactttgggaggccagggcaggcggatcacctgaggtcaagagttcaagaccagcttggccaacatggcaaaaccccatctctactaaaaatacaaaaattagtcgggcatggtggcgtgtgcctgtaatcccagctacttgggaggctaaggcaggagaatcgcttgaaaccaggaggcagaggttgtagtgagccgagatcgtgccactgcactccaggactccagactaggtggcaaagcgagactgtttcaaaaaaaaaaaaaaaagtctccccacccactcctcttttccccccaaaccctcagtgcttctccccagagacaaccactcttagtagtttcttagatatcttccaagagatgatatacacataccagttttatcacattaagtttttgatcacatactcctctaaagcagggcttttcaactttggccctattgaccttttggactgaatcattatttgtggtgggagctgtcctgtgtgtcacagaatgtttagcagcatccctggtttctgctcaccagatgccagtatcccccctccccgcagtgtgacaaccaaaaatgtcaccagacattatctgatgttctcccaggggcagaatcacctctgagaaccagtgctccaaaggaaagtatgcggaagaatggactgtctaggattcatattgtaattgtagagtggagaaatgggactgctattgtcttttttatttagaagtgttgcctgtgttaagaggagaaaaccttagacaagttaaatttaacagagtttaatccagtagaaaaaggttcagggaacactcaggaccaaaagtggtgcagaatgttccaccccatagtggaggttgtgcaggctatatttatagtcagagaaaaggaaatgagatacagaaatagcctgattggctacagttatgtgtttgccttatttggtcatgttttggcaggctttagcctccaattggctggaggtttcagctgctatgattggctgagactcagctatttgttacacttgtaacctaactcttatgttaagttacagtttgtttatacattaaattaggttacagttcactatctttggaggcagctttaacttaacacctgtttccttaaagatctgtagttctttaatgccattatgtcatgtcatgtggcctcaatgttgttaaggtttcataaaattataattatatttctgcttctgtttgctgttatgagtttttcattcctaggcacactatttattttcctgcacagtttttttgaccctgtcttctttatatattcttggtagaaagaatattcttatgtatttcctataagcttgtagattgttctctcagaatgaaacccaggggcacaattcctttggagaaacactaattcagaaagttcagtagaatcatggaatcactgcaccaggtatttcctgaagggccttcagaatcctattgccccacaatagaaagggctttcagggcaaagaccatattcattcaacacatgtatattgagtatacctgctgtctacatggcactgcactaggtcctgaacagcagtgagtaaaatggcccctgtccttattggtgttcctttataggtatgggagaagacaataaacagataagcaaataaatacagctgacccctgaacaacacagaggttagcaccaatcccccatgcaatcaaaaatatacatatggtcaggcacagtggctcacacctgtaatcccagcactttgggaggccgaagtggatggatcacttgaggtcaggagttcaagacaagcctcgtcaacatggtgaaaccccgtctctactaaaaatacaaaaattagcctggtgtggtggcgggtgcctgtaaccccagccacttgggagactgaggcaggagaattgcttgaactcaggaagtggaggttgcagtgagccgagatcacgccactgcactccagcctggggacagagcaagatcatgtcttaaaaaaaaaaaaaaaaaaaaaaaaaaaatatatatatatatatatatatatatatatatatatatatatatatatataaagtttttgactccccagaaacttaactactaatagcttactcttgactggaagccttattgataacatggtcagttatcacatactttatatattgtatgtattatgtactatattcttacagaaaagtaagcttgagaatagagaatgttattaagaaaatcataaagaatagaaaatatagatactatttgttaagtggaagtggatcattatgaaggtcttcatcctcgtcatcttcatgttgagtaggctgaggaagaggaggggttggtcttgctgtctcaggggcggcagtggcagaagtaaatccgtgtataaatggacccacaccattgaaacccatgttgtccaaaagtcagctgtagtcgaaataaggaaaatacttaagagtactgtgatagagaataagcaggggtttatgactagagtagtcagggtaaggtctgtctgagaagacaagatttgagctgagacttgagggatgcaatacagttggtcattccaagagcatagggcagagcattaaaacacaggtaactatgtgtttagaagtgcttagatgggaaagaccttagcatgttctggggattgaaagatcattgtgtttggagtatagccagagaaaagcaagatgactccaggtaaggctggagaggcaagtggggctggatcatgcaggactttatgggccatggtaaggagtctgttttttatcttgagggtaacagcaagccattgaaaagttttaagtgggattcagacctaaatttacttactgttttttaaaagagatgaggtctcggccgggcacagtggctcacgcctgtgatctcagcactttgggaggccaccctggagttcaaggccagcctggccaacatggtgataccccatctctactaaaaatacaaaacttagccgggcgtggtggcccacgtctacaatcccagctacccgagaggctgaggcaggagacttgcatgaacccgggaggcagaggtttcagtgagccaagatcgcggcactgcactccagcctgggtgatagagcgagactcggtctcaaaaaaaaaaaaaaaaaagagatgtcactaatgttgcccaggctggtctcgaactcctggatgcaagcgatcctcccatctcagcctcccaaagtgctaggattacaggtgtgagcctccatgcccaatcaatatttaaagtataaattttggcagttgtgtggtaaatggtggagcaagcgttaagagaaggcagggagagtagttaggaaattcttgcaggctggtggcttgaagtagtgtggcaacatggaaagagacagatggatttggtattttggaggtcaggtccataggacttactaatcacttaggaaaaaagatactgcggaggttgatgtcgtgtttctgccttgaacaacttaaacgatagggtagtccatgtattgagatgggaaaagccctctaaagagggctgggtagcgggggaatttaaccgttcacgtttggggtttttttgacatgttaaaatttgagatgcctgtgagatatccaagtagagatgtcaagtgggaggttgaatgtaccagtctgaactcagaagactgaggtctgggctggaaatacagacaagggagtcctcagcatacagatggttctgaagtcatgagaatggctgagattttctttttctttttttttttctgctgtagaaattaattttattcttattcagactattttcaaaagaagcagtggtgcgctgtttttctaaaaatacgcctttagagatttttatatatgtatataataaaatccatacatgtatttacatgattgctacatacaaaattacagcactgtggtatgtacacatctacaggtacattctttccacacatccctgctgtgctttccccgtgtgaaggagggagactgaatcagttgtgagcagccaagggctggcccgtcgtcggaacctccgaatgggggctggggtggaggaggtgaggcgattgccgaggcaggagcagcagctgttgcagggctctcctgcaggccagcaggcagcatctggaggctcccggcagcctccccctcccctccaccccgtggtgcccgcgctgccctcaaggtggggtggctgaccacagacccctctggtgccattctgtggcctagacttgcttggctgggccaagaagttgtgtatgtgaggggtggaggagggagctgtgggaggaatagaccctgtccagccccagccctgagcaggggaaagggctggatggctaaagcctgcagatgactggtgagaacactccgcttggcccggcactgctaagggtcagagactagaggctgggagggagagcagtggccgccggctggggaacagggccttcttcctccctggggctcagagggtggcctcagctgagcttgagtaagcccagctcttaggccctgcggccagaggcttggcctcctgccagcagaggtgcatgcacactggggaggggctgccatctccacttcaacccctgggccaggggctggggaagaaatggaggcttaggcctggcctgctgccctgtaggactaggtccccggggctcaggattcctgaggcatgcagagaagggcctgagaatgcctgagattttctagtgaaggggctcttaatctggggtccaggaacctcacagagattcattgatagaattcaggggatctgtgaaccggaataggaaaaacttttcttgttttttctaaccagtgactgaaatttagcatttccttccattttgaatgtaggcctcaaagtacagtagtagtaatatttgtaattttgtcaccagtagaaatcaagatattttcatattgcattacagttgttgctgacatctcaaaatagcatctaaacatcactacttcagaattacagtacagaattattagacctacagctagatcccattatcaaatgcattgataaagaacacattaggccgggcacagtggctcacgcctgtaatcccagcactttgggaggccaaggctggcggatcacgaggtcaggagatcgagaccatcctggctaacatggtgaaaccccatctctactaaaaatacaaaaaataagcctggcatggtggcaggtgcctgtagtcccagctactcagaaggctgaggcaggagaatggcgtgaacccgggaggcggagcttgcagtgagccgagatcgcgccactgcactccagcctgggcaacagagcgagactccatctcaaaaaaaaaaaaaaaaaaaaaaaaaaaagaacacattaatacagaagaatatatcacaatttttaaaatttttgaaaactgtttttccataaaattggggtattcttggtaatcctttgtactttaagttataccttaaaaaaattgttctgaaaagggtccataggcttcaccagatgccagaaggatccatggaacataaaagatcaagtatctttgttaataaggctagggaatgagaagagaaggagcctaggactgagccctgaggttagttaatggagggagagtcaataggggagactttctttgaagggaggttcaagaggcaggaggaaatccaagagagaatggtgttgtgtcatgggagccaaaataaattagtgtttgaaaaaggagagtagccacctatgtcagatgggtgaagacagaagattggcctttgggtttggtaagatgatgtcatgggtgatcttcataagcaatttcgctagaaggattacagagaccctaattagaacgggtagaaaggtgaatggacagtaagaaagtggaggcaaagggtatagacctgaaagtggcaaatttttttctataggggaccagagagtaaaaatttttggttttgtaggctacttgctgtgtctgtgactacctctgctttatagtgtgaaagtagccatagacaacacataaatgaatggatgtgactggttccaatgacactttatttacaagaacagatggctagctggatttggcacaccagctgtagtttgccaaccccggtatagacaactctttggagaagtttagatgggaagggaagtagaaaaatggggaagtagttgatgggggacaaggagcgtgtgaacatgtgtatgtattttaagttaggagattttagagcatgtttttgctgatggaaaaggatcttatggaggaggagaggctaacagtccagaagagagcttagctgtactaataaactcctcagaagtcaagaggggataggattaagagtacatggatgcctaaggaattgttttttatgacacttagtgttattttgagtgacatattagtgttaacagcaagactgatatggggagtttgtccctgtcacttataggaccacttaaaatgatgaactactaggagagttggtgcggatgagatttagcagctcatttacttgatttgtgggatttagagtttaatttggaattttgttgtattggccttacctgaagtaattaatgtagctaccttcacttttcttggagatacctttaaaatcttgattctgattctgattctgtgaacagaaaatcacagcaattgcaaacaaattctagctcactgattctcagtctgttttctgttgtattttacttagtacattcctatcaataacagtggctcagctttggcagttactacaaccgaggagaaaagagaggggagtatacatctgcctcaccactcctctgcctcccctactactgagaatcattgttctagaccttttgtggatactttctttacttcagggttttaaaaggcatgtttgttccttttcctggagcagttcaggcatcttaatgatctcaggcatatttcccccctcagtagcttccctaatgtaggaatgctttgccttttgcagaccccagtatagaagaaagagttcagcatattaaatcagtacatattttcatgatgagcgcagacaataaaccaggcagtggattctttcacagctttttatggtcatcaactaggctgcccagaagggagtgagagtattcaggcaattcctgtgtgctatgtgagcctcctggaacaccaaccctttttctgaaaatgaactgtcacctgtgttgaaaatgtttgctgggattggggtttatagactgaagaaggttccatctgtgatcatgcttaccatgctgagtaacttttaagactggaagaatcgagatgaggatccttaatgcatccatgttaaagaacctttgcttgactttttgaattagttgttttcatacaaaattaacacttattcacgatttaaaaaatttttcaaacactacaagggagatattaaagtgaaaagagaagtctcatctatcagaggtggccactattgtatttctggcatggatgaggtgtgattaagctcataggtgcccccatgtgtccttttccttaaagcatcaatgggatcttaccacgtattctgttctgcgacttgctttcttcacagtagtgtctttccatatcaggacatactgagccatctcattctgcctcagagctattccatctgcctggaacatgaatctggaacagtcccagattcatggctcactcttgtctagtccttactcaaatgcctccttcttaatgatgacttccttagctgctgtatctaaaatttcaaccattcccctatccctttctatcccccttccctattaatgactttcctagcatacttctgtttattgtctgttcccccattgtaatgtatactctatggtggggaggaatatttgactgtgttgttcactgccatatccccaacctttagaataattctggaccctgtagtagatgctcagtaaatattcactgaatgaatgggtgaatgattacattgtcttcacatttgaatgcacattattttttaaacaatcccctattgatggacatttaggggtttgttttttttttttttttcagttttttctactttttaaaacaatgctgtattgaatatttttatacatatatctttgtactgttttataatgatctctaggataaattcctagagatagaattgtgagtttaaaggatatacacattttaagttggatgcggtggctcacgcctgtaatcccagcatttcgggaggctgacgcgggcagatcacctgaggtcaggagttggagaccagcctggtcaacatggcgaaaccccatctctactaaaaatacgcaaattagctgggcgtggtagcaggtgcctctaatcgcagctactcgggaggctgaggcaggagaatcacttgaacctgggaggtagaggttgcagtgagccgagactgccccactgcactccaaccagggcggcagagcaagactctgtctcaaaaaaaaaaaaataaataaatcaaaaaaaaaataaatagtacaaattaaaaataaaggatatacacgttttaaattttgaataattagcttccattttccctcccttaagatgaaaggttatattaatttacaatcttgctaacactgtatgggtatcccatttctctataccaggtatgatcaacctttaagtcccatttctctaccaggtataattaacctttacgcctttgccaatccgatggatgaaaatggtatctcatcctaatttgaatttctttaattatgagtggattcagcattattgcatatattcatcttttgtatttacttttctgcttatgtcttcttttttcattgtttattgggtcattttgcttgtgtttttgcaatcatatctttgtttgctttggtacctttcctctctccaggcttcaaccagatataaccccagagaacagtatacatctgggccaccgctttctatccttagaaagtttctagggatagaactttgaaccatgtaatggagtctagtttataagtaaagaaaaaactcccaaacctgtatatgatgctggtgttagcatcttcatctcttattcttgctcacattttttgtttattagttaaaaaaaatcatagaaacccatagcaaatattgactatgttctagataccgtgtttagcattttattatctctttaagtgtcacagcaagcctgtcagggagtactagtttgtctccatctctacaattttatggacaggatatcagccatgtccaaccctttgaatgcaaggacttttttgcttatctatggtagcagatatcacctttttaaaagttcattagctagttagtgttagtgtattttatgtatggcccaagacagttcttcttccagtgtggcccagggaagctaaaaggttggacacccctgcaaaaaactgagggatggtgagattaagtgacttgcccaaggtcacatagctagtaaatggcaaaaccaggatttgagcccaggcacagtggctccagagccagccctactaaccactaagttcttttacctccagtatgagtaatggggtatgttgcccattgtctgtttcaggagacctttttgcccatctatccccattcagaaaactggctacagttgttgaagcaagggaaagctattcatgtacaggtctgggaggttttttttgtttgttttttgtttttgtttttttacttataaactagatttccattacatggctcaaagtcaaagtaatataaagaggtacttggtgaaaagtttcacacctactcttatctgttctattacccctgccctcatttctgtgtatacttcctgtttctttgtatacttacaaagcaaagtaaataaatacggcaggctaaatacggcaggttgtcaaataatgtcgttttgtccaatgtcgttttgttttaatgttgatgagaaaagaaaaatccattcctgcctggggccactgtctgtgtggagtctgcacattctccccatgtctgtgtgggttttctccgggtattcaagtttcttcccacaccccaaaggtctgcacattaggtgaactggcatgtctgaattgtccccagtctgagtgagtgcaagtgtatgtgtgatgccaatgggatggcatcctctccagggctggttcccaccttggccttgagctgctgggatggactctggccacctgggactgaataggcaggtaaatcatttacttacttgtttttataagtctttcttaaatgtatgtatagctcatatttatttcagtgtttaatattagaagtgttttggtctgtatttagaagtctggtgtttttgtgaccaggatagatcaaaggaacttaactcttgtttatgtcaattagtgcatggtaaagttggttttgttatatgtcattgtgcttaaagtcacaatttccaagaacctatcaacattaaggacttactgtgtatatgtacatacttgtacatatatgtaatgtttactcatcaaatatttattgagtgcctctttatacaaggcactgtgctggcttccaaggagtatacaaagaagcatgaaacacagaaatctctggcctcaggaagctcgcagtgtagttctataataagagcataagtaaaaataaaacatagtgtttatatgacatagtactttcttagctgattcaggcctcaatacaaagcacattcagcctgctaaaggtagtaaatattaatatgtatcttggcttttggggctaagatgagagttctactgaatcatctatcagtctctaaaatataagaaatatgtcttatttatcttaatagattcttcaggactttatggtttgaacaaatgaatctgtatttcttttaaatatagacttcaaggaaactgttttatatctttctttttttttttttttttccaaatagagataggatctccctctgtcacccaggctggagtgcagtggtgtgatcaaagctcactgtaacctcagacttctgggatcgagagatcctcctgcctcagcctcccaagcagctgggactacagatgcataccaccacacccagctaatttttgtgtttttttatgttttgttatatatgtttgtgtatgtatatatatatatgtatatatatatataaattaaaaaatataaatagagacaaggtctcaccctgttacccaggctggtcttgaactcctgggctcaagcagtcttcctgcctcggtctcccaaagtgctgggattacaggcatgagccaccgcacccagcctcttttatatcttcttcatgaacccaaaaggaagctttttaaagaaccatttttattttagagtccatccctgccttgaggagccttatcaagttggatcaaaatgaaacttgtgtgcctaatatagaactgaaggatgaggacttatctttagaaagtttgttttggtggggatcatcttttttctttattgaggattcttcttccaattacttctgccccatgggcagtaagtagaaaagagtttatcccaattacaatataatattttagagctatcagcaagctaccttcaatttatttttttatctcagtttctgtgtattacaacttaattctgttaaaagacatctttgttcagaatccctccagtagttctagacattccagaatccgtatggaagaagtatggtgtagtggttaaaagaataggctctggagccagcctgctcatactgaaattctgaatctgccactttctttctgtgacaggttactggacttttatttattttcactgcccctaagtagatgtcttaaatgttagagatttgtgaattaattaagtttattctccccactgagctttagagccatggacaagaaccaaaagatgaaatctagcatcttatatttacctaagcacttttcatcaaagacagtgcatgctaacatgtaatatgcacatactacatgcatagaacacatgcactaagtatttccatgcatttttgtatgatgcaaagtagtattcttctttgaaggaacacgaatcccaaaggaaaaaagccaaagttaaaggttacataagagctagaaggagtaaggaaacatggttttctcttgcttcctgcccatggctgccaaacggttctctgaagactgctatgtgacagaagccctttcctttgaaaacctgtcacgtcacaacaagaaaaagatctctttctttggaggtacatttttgggcacaagaaaggctttttaaaatttttttggccatctttttcattgtaggagtctggtgcttgctgcctagtttgggagtagaggaaaagactctggctctttagggggatagagatgggaaaggagcatggcccagctgggtgtattagctctccctccgctgcacttctggaacctttcatataagggcttcaggataagggggttgcatagctttagggtcttatggacatttggaccatttgcttcataatcattttgaactgtttccttaggctctttattgagaaactaccaaaacatcgagattacaaatctgctgtcattcctgaaaagaaagacacagtaaaggtgggtcttcactttcattgttgcccatctaaaagcttcagagcagcacagactgacttcaagataaaagtagtagtctctgcatctgagtaccagatcctgcaataggagataaggccatttcaccacaacagttctgaagtagcaggtatggtacagtagggggtattttaaatcattttgggaaatgttgcagtcaccaacttgacttaagtcttcttttggattctgtaattttctggcattgttctaattctattttctgttttgtgtctcagaaattaaaggagattgcatttcccaaagcagaagagctgaaggcagagctgttaaaacgatataccaaagaatatacagaatataatgaagaaaaggtcagtatataacagctaagaagaaaattattttgcttttttaggctgtgccctgggattgtaatatgacatttcaatatatcctgtgcttttaatgtgctgtttcaccttttttgggcaaagaccagaaactcaaaaaagtagaacaccagtggttaggctcagggttgtaacacagatatagcctatttgtcgaagagagtgacttgagggacagaaaatctgtcgcctacctgctatgtctagagtgagaatcataagaacaatgaacattctctccaaaacataggtttttagatcagagaatttgagggttggattcacatttggttatacctgaagctatttataagaattgacttttcaagctattttttttttttttttttgagacagtctcactctgtcgcctaggctggagtgcagtggcacgatctcagctcactgcaacctctgcctccccgactcaagtgattctcctacctcagcctcccgagtgactgggactacaggcatccgccaccatacccggctaatttttgtatttttagtagagatggggtttcaccatgttggccaagatggtctcaaactcctgacctcaagtgatccgcctgcctcggccttccaaagtgctgggattacaggcgtgagccgctgcacccagccatttcaagctattttcaaatgattctttttaggaagtcagttaaaacatgtggagaaactgccagggcgctgtcagtggccagctgtgaatacatactgcagccactcacaggctgttgtgtagctgtctgctggtctctattctggactctgatgttgaaaatcagcagagggatgaacagctatgaggtatatacttctaaagcaccaagtgagtgtaagctttaaggaggaggttattacttagcatttctttctttctttttttttttaatccaaatgcctctcaagtatttcttattagcttaaaatgtcactctgtgttgaacaaatgcacaaaaaccataaaaatttcagaggcctcattttgggttaaaattcagtagaaggcaagacgtggtggctcatgcctgtaatcctagcactttgggagcctgaagtgggtgatcgcttgagcccaggagttcgagaccagcctgggcaacatggtgaaaccccatctctacaaaaaatacaaaaattagctgggtctctacaaaaaatacaaaaattagtgtggtggcacgcacctctggtttcagctactcgggaggctgagatgggaggatcacctgcgcccagggagattgaggctgcagtgagccatgattgaccactacagtccagcctaggtgacagagtgagactctctaagaaaaaaaaaaaaaattcagtagagacccccaagatagcaggtataagtttggatctggttctattttatagccttacttgaaatatagaatatgtacatgacacagagagaagaataaaactgtctgtgatacaggttaggagaacacagatagtaagttgcatcaagatttcaggccagacattgtggctcacacctggaatcccagcgcttcgggaggccgaggtgggcagattgtttgagcccaggagttcaagactagcctgggcaacatggcgaaaccctgtctctacaaaaaatacaaaaattagccaggtgtggtggtgcacacctgtggtcccacctactcaggaggctaaggtgggaggattgcttgagcctgggaggtcaaggctgcagtgagctgtgatcatgccattgcacttcagcctgggaaacagaatgagaccctgtctcaaaaaaaaaaaaaaaaagatttcagtgaagaggaaagtgcattaggtagagtcattgtcgggagggtattgagaggattgggattttaattgtccttggagataggtatactgtggccagatagaaaggggtggtgactacactccgtgggtataaagatactgaggaaagcatgaattctgtgttaggtaatcaggccacagcagaagtacattttggaaatctccatgctaaaaagccttgttctcctgaagtgtgaagtcactgaggtgtgaagtgttagcctaaattttctctctttgtagaagaaggaagcagaggaattggcccggaacatggccatccagcaagagctggaaaaggaaaaacagagggtagcacaacagaagcagcagcaattggaacaggaacagttccatgccttcgaggagatgatccggaaccaggagctagaaaaagagcgactgaaaattgtacaggagtttgggaaggtagaccctggcctaggtggcccgctagtgcctgacttggagaagccctccttagatgtgttccccaccttaacagtctcatccatacagccttcagactgtcacacaactgtaaggccagctaagccacctgtggtggacaggtccttgaaacctggagcactgagcaactcagaaagtagtaagtgcatttgctgatgtcctcttccttctcagttgcagccaaacagtatcattctgacggggtcaacctaagattacctccctgatcccactcattaagctttggtcacagaaacccatctgataagtattgctgtactgtgtcctaatacactggctatgttataaaagtggcctttgctgaaacctagtctggtcgattttctgaagagctaatattattcttgaaagtcagactgtcaactttttagtgaaaggaaaagaatgtgccaaaccgaattcataatcctcagataacatcatcagactgctgtgtgactctgtgtcccctgctctgactttgttacctctctagcaattcagatcttgctgttgaatacgcaaaagcagaacatctttcccctcccactttttttttttaaatatgaaaatatagctgtgagagacacttcctaactttagcttgctggctgtctcacagagtttctccatggtgttcagaaactgggtccattcttggcattttttatgagctgctttgttcatgccttttttgggggactacactgtattttttattttgttgtggtttggcatttaacttcttccagaagagtaagttcagaagtaaataactgcccagattgttttccattctcaagaatatacaccagtgtatttcttttaaagtcatactctgatattcttatctgagataaaagagatttaaaattaaaagttcagatgaatgggcagtgtcttagtccattttgtgctgctataacagaatacctgaggctggataatttataatgaacataaatttatttggttcatagttctggagagtggaaagtccaagacccaggggcctggcaaaggccttcttgctgcgtcatcccacgacagaagggtggaagggcaaacaaagatccctcatagcctcatcacctcttaaagatcctacctctcaataattttgcattaggaattaagtttccaaaacatgaactttgggagacacagtcaaaccacagcagggaggttatttttttaattctttgtattagattctgacagaaaattcccaaatgtttcaagaacttgtgtctttttcccccctaaattttattttttacttttattttttaagtttttgtgggtacatagtaggtgtatgtatttatggggtacatgagatgttttgatacaggcatgcaatatgaaataagcacatcatggagaatagggtatccatcccctcaagtatttatcctttgagttacaaacaatccaattacattcttaaggttatttttaagaaaacttttcttaaggtagtagtttgcccttttcttaacttgaataattaaagcctactattttctcttcttgaagtaatgtgctccttacagctgtggcccaagattggagaagacactttacagccctttttttggtgccattagaatgagatccctactcactgcctgaagttgggggaatcccagtggcttaatgttgctcctccagggctgctggctgtgaggtctgcttgaggaggcagggctcagtggtcgcagactattctcctttctcctttacagttcccacaatcgatggattgcgccatgtggtggtgcctgggcggctgtgcccacagtttctccagttagccagtgccaacactgcccggggagtggagacatgtggaattctctgtggaaaactggtaaaaagaaaaaaaaaaccaaactcttctctgaaccgaaactgtttcttcccctcttggcatcctgtgactctcagagaaaatatccagggtcagttactctttgtaccaaggaaccgtggactgcataatttcatgtcactttgaatttggtgaccctgtattgattgattgaattgaagtggttattttaatgctagtagtaagaaatacctaattttaaacttggtaggaagatccagtcattatctacatatcaatttttttggtacctactttatggtaggacctgggaatataaaatatgtaaagcacatagtatgtgtccacgaaaagtgcccagtcactttggagagaaggcagacatgcactaaagtctaaccagcatgctgaaaaatatgtacagtataagtattgggaattttgaggaaggaaaggtcactgaatggaggcacttaaagaacccattactgctgaatgaataaataaatgaagtagagtaaatgtaagccgaggcttacaggatgagaagggcttaaggaaacagtgacaggacaacaactttagacctgagcaagggaagagaaatggtactctacccagagcttctcagcagagcagtttggcacagcaggaaattccctcagggctgtggtgtttgcccaggctgcagagttctggggttggtctctgcatctgtcgctgtacagagtaccccaggcaatgtgcatcagcagccaaggttgtgaaccactgagtggcaggactcctgctgtgtgggaagggctttcacttgtatagatgcttacctttccactgtcgggatggagtggagcagggttgcatgagcaccagggaattgtgaccagctgttttctcctttggcagatgaggaatgaatttaccattacccatgttctcatccccaagcaaagtgctgggtctgattactgcaacacagagaacgaagaagaacttttcctcatacaggatcagcagggcctcatcacactgggctggattcatgtaagcaattctgagctgtccgagagttagtctctgcctctcccatggtggtataaatacatgagtgtttctttgaacaaagtcaattatatccagattatttattgtttttctctcttttggatgcagtccttagcatacttgactattgcactttggtattgttttctgggaacacttagggcttttaaatttttttaactttttatttattttttagtaaaaataaactgttttccctaaagttccagtttccctctgagtgtaactggtgatgggatgctggcctagaatataagtggacattgaccttagagactatgcctactgtgtacagatgatgttccttaaaggtatataattcaaaatattttaaatgagccaaggaggttaattcagatgcttgcatttggtctttcttaaagcacctttatataaacaagaagggctataaatacacatgattttcaagtgtctgcatatcttgtgcagccttctggtaatgttcaggtaaaatataatgccttccctaaagattatttttaaatttttctttctattccttttcaacccctcactctcatagcccaagctgcattttatgctgtatgacagagttacaaataaattggcttattcttggattacacatacttgtatgccagaatttgggaaagactgacctgtgaggcagtcccatgtgccttctgtcctttcttctattcaattacattcatgttgatgatttgcctattattgtgtatccccatcccacccccattgtagtagatgggggagagaaaacttgttccttatctgccagggcatacaaatttgagtaaggtatgattttagcctcatgaaggagattaaataaatagacaattaataacttcacctggggcagaacgtgctaaaggccacaagaggtgccagcgaggcactgtggaattcagaggaaggagggaccatgcctgatagggtttagtagaatgttggcaagctgggccaagggcaagttccttaaggagcagacaggtggagaagaggcggactctgtccctggagcactggggggaccagttcactgagatttatggttcatatcaggaaacagtggtagatttttttttttttttttttgagacagagtttcactcttttcacccagactggagtgcaatggcaagatcttggctcactgcaacctccacctcccggattcaagcgattctcctacctcagcctcccaagtagctgggactacaagcgcccgccaccatgcccagctaatttttgtatttttggtagagatgggatttcaccatgttggccagactggtctcgaactactgatctcaggtgatccacccgcctcagcctcccaaagtgctgggattacaggcatgagccaccacgcccggctagatatgttttaatgtagtacattggagccgagttctggagggtctggggtggacaggcagaattgttccactttttagtaagtggaaaattcctaaaggtttttgagtagagcaatgatatgattaaagccatactttagaaaatttaacataaatacagttttaaggtaggttgtggcaaggagatgatttaagaggttagtgtgctgataaagcctaataatgataagagctagggtgatgctagtgtgtttgggaaggaggagatgaatgtaggatttcagaggatttgggaaatgagtaatagaggatgatgactcagagtcaatggtgactcagagatttggggccttgcagtgatcatctcataagcaaaagtaggggatccaggagaaggatttggtttgaaagtggggttcagttctgagcatgttaaatttcaggtattgatgagatattaaatcactggaggtagttatcagccagttggcaatgtagggctagaacttgggagcaaagtcaaagcaggagagagggctctgggaatccactatttagtgctgatcttggaagccctggaagtaggagaagagtctagagcaagaaaaggttcactggcaacttgggggacaggctacctaatgtaacatagaatgtagttagcaatggagcaaagagatgtatgaaaaaggtgagggtagtggtaaggcacagaagccataggaggaggaaggctcttttgttttgttttgtttttgagacggagtctcacactgtcgcccaggttggggtgcagtggcgcaatcttggctctgcaacctccgcctcccaggttcaagtgattctcctgcctcagtgtcctgagtagctgtgattacaggtacccgccactatgcctggctaattgtgtgtgtgtgtgtgtgtgtgtgtgtgtgtgtgtgtatttttagtagactgggtttcactatgttggccaggtgtgtgtgtgtgtgtgtgtgtgtgtgtgtgtgtgtgtatttttagtagagactgggtttcactatgttggccaggctggtctcgaaatcctgaccttgtgatcctcgtgattataggcatgagccaccgcacccggccaaggaaggctttaagaaaaaatttccagatgttaaccatgtcacatcctatggagagctccagaatggtgaagactcggatcggcctggatttgatgaaattattgaggatctcgatttagtgtgttttaggcattaatgggagtagactgtaagagtttaagaactcatagggattaagtttgtggagacaatgaagtatacactaccattttgagcaacttagctctagaggaaaggagaaacatggaatggtggtttaaggagaagttgggttgagagaatgtttggttgattgttcaaagtgaaaggcttgaacatgttttgttttgatgaaatataacacatgtaataagaaagcacacagaaactaaatatatactttaggccgggtgcggtggctcaagcctgtaatcccagcagtttgggagaccaaggcgggcagatcacgaggtcaggagtgcgagaccagcctggccaacatagtgaaaccctgtctctactaaaaacacaaaaattagctggacatggtggcgcatgcctgtagtcccagctactcgagaggctgaggcaggagaattgcttgaaccccagaggcggaggttgtggtgagccaagattacgccactgcactccagcctgggcaacagagcgagacttggtcttgggaaaaaaagaaactaaatgtacactttaacaaatcattaagcaaatatctatgtacatacactacctaggtcaggaaacagaacactgtcaggagcatgcatgccctaagggagggaagtcctcccttccttgcttcgtttataatttcaccacttcaatgtgtatctctaaacactatagtttacttttgcctggcttttacctttttgtaaatggagttataccatatgtatatttgtgtcttgcttcttttgctcaacattttgaaggtttatccacattcttgtgtgtagttttctgaacatgttcttatgcccaatgagccaacaatggagatgtaaaagggcaggagagacaaggtaatgtggtgataaggaaggatcgaatgagaagtacatagagggattcatcttcacagggggaaaaacatccattcctccaagacaagattgaatgaacggaaatgaagatccagagagatttttgaaatgatgtctggaggagttgaggaaacacgttttagacaatcttgacctcaataaggttggagtctaggtctgctgttgagcaagagggagaccaaggaggaattagaaactggaggagatgggggaaagtttagaatcattactgtacagacttcaggtagaacttagctacaaatgaataaaagagttttaagtatcagtgagggtccagttgggaacagatttgaagcctaaattgatagtagttcagcttttttatttttattttttgagatgaggtctcactacattgtttatgttggaatacagtggctattcacaggcacaatcatactgcactacagccttgagctcctgggcccaagtgatcctcctgcctcagcctcctgagtagctaagactacaagcacacaccactgtgcccagctagttcagctttttttcctccatatttctgcaccattccttcctaattcgggattaaaaacaaacaggctgagtatggtggctcacacctgtaatcccagaactttgggaggccaaggtgggaggatcacttgaggccaggagttcaagaccagcctgggcaacatagcaagacctcatctctataaattaaaaaaaaaattatgcatttgtggtggcacacgcctgtggtcccagctacttgggaggctgaggcaggaagatcgcttgagactgggaggtcaaagctgcagtgagccgtgatcacaccactgcactccagcctgggcacctgggcaacagagcgaaaaccctatctcaaaaacaaacgaaaagcagaccgaaagatttattcagatcttaaaattggccagaggaaaatgcaaaagatcagttcttccttcttaaccttgtcaactatgaatcagctgcccaggtcaaaagtatggttatggattgatcaccaactgttgtcaaacctccagcccagaactcaaggcactcctcatcatgtttcagcgctatctgagccatttccctttagggaaaatttccctcttaggtacccaggctgccttcagcattcaccctccttgctcatttctgctccttcggtatattgttttctctttgtcaaagtgccttcctctatccccagcagcatgggcacagtgaacataatgaactattcattcaagaaacttgactgtgaaaggaaggagggagagaaggtacagtagttagagaggagcaggggatcatggcaaagttttttgattctgtttaagagttgtttactgagtccctgcttatgtctctttattatctttctggctacccacgtttgctcccagttagaatcctggactctaaccatgggatggaaggtggtgttggcacaggccactgctctttagcagcctaaaggattatattctcatcaggtagaaactttgtggtcactgaagtccttacatgccccatgaagacttgtgtgtggatttgctgcctgcactgagctaacacgttcctgtcctgaaggcttcttccacagtgagctcatcacagcaccctgtggaatggtgcttctcagatgaggctgcacataagaatcacttagtgagctttcaagaaaaatgttccttcatgatggttctttctaggagtggggtgcaggagtctgggcttttgtcaagctcctcaggagatttgtttttttggacagcaggtttgaaaacgctagtcaattgcatgtctttattgtctgtgcttttctgtcagtgaaggttggttgtctttttgaatcatgctagatctttttccatttttgttacctaagatcacacctcctctaagatgaacataagtcattatatagttgtctgttttgtatataaaatatgtgcttaataaaacaaacaatggaaacaaataatcgggatgcacatttaggtgatattttaactgattaacctcaaattttagcatcgtgttctccttccaaacagaatggtctcctttgtatggtttaactatcaactgaaattcaagtattcccctacctcccatatcttccttggatgatgctttagctacaggacagcctttgcctatagaacctgattcatgtttgaccttttaacacctctgtgggagagaagaatcattcatctaattgtggtttactaagtccttgacttccaccatgttgaaatattgggtatgtaccatctgttccagaatgggtgactcagtggtatgaagagaccttgtaaggaaccaaataagtcttgatggtcagttagaaattatgagtctcttgaaaaaccaaagcctgaatcatccagagagaaacacttcttagaggagatagaagaaattccctagcaaaagttccaagggccactgagtgccattcacaattgttgaggacacccacctaccttgtccatggatgcccatcatgacaaccccattaacacctttgattccatggatccctgggtgaatccaacatcatagtccttgagttcttccaatttggttcaagaacaggagagctagagcaggaaatatcaacaaacaaccccctcttctgtctccaaccctgagatgcaaatgtcttttcctgtctccactcctactgtctggtgatctttgtgcagcaggtatgtgcctgaaggaggtctccaagccagtttctgtgtgctgtcatctgagatggggttccccttgccagttctcacaccccacaagacccaccatactgatctcctggctagcacacaccaaccccagggaagccttttcttcacacttggaacctagatcttgatttccttttgtgaggtcagaatttgtttaactggaatgtggcacagcattgaattcttctgccttgtctattccagcctcagaattctgtttttctcccactttgcagtggtctttgagttttaacactgtggaacagtatctttccccgatgatgccccagatggaaggtttgagttctgtccctgggtcctctccataccctacctgtttaatggcccgatgtcttgatgccttctcgcatcaaggctctgcgcctacagtccttcatccaaccaggaattccagaacccatcaggtaccctagatcttctgaaccagtgggatcagagtccccgttttgagtagtacagagaagaaagttccccctttgtgtttacctccctttttgtctgcctactccagttcccccttccccctgagtgctcaagctgcctaacatcttccactgccttcaaacaagggaagccagaaagttccaagcctcttcgtccacagtttacttttgtccagtacagccttggtgacctctgggagctctctccctgagaaggttgtctgagtgaattagatgaaatgtggtgggtgggttatttggtatgtcatctataaccatgagctaggacggcatgcgcttgcctgggcttaatgctgttactttccattagaaaaagatcaccttatcattcatcagacactctacagaatctcagaattatggttctgcacaatgtaagtgagggcatacatccacctacccaggaactgaagtggaatctcccccaccccacttgtggcatctccccacgattgctcttcagacaaatcctcatctgtttagttgtcattctgctggggacaatgcaatctaagttatttcatttagttattttcatccccttcccctctctcattgtatccttcaccacagacagctcttccagtttccaataattgtttatactccttatttctttttctttttttttgagatggagtctcgctctgtcacccaggctggagtgcagtggcgcgatctcggctcactgcaagctccacctcccgggttcatgctcttctcctgcctcaacctcctaagtagctgggactacaggcgcgtgccaccacgcctggctaattgttttgtattttttttttttttttttttttttttagtagagacagggtttcaccatgttagccaggatggtcttgatctcctgacctcatgatctgcctgcctcagcctcccgaatagctgagattacaggtgcccgccaccacgcccagccaacttttgtatttttaagagagatgtggtttcaccatgttggccaggctggtctcaaactcctgacctcaaatgatctgccctcctcagcctcccaaagtgctgggggttacggacataagcctccatgcccagcctgtttttgttttttctttttttaattgacaaataacaatagtctatatgttttgaaatatgtatgcatatattgtggaatgggaaaatcaagctaattagcatatgcattatgtcacatacttttttgtggtgagaacacttgaaatctactctcttaagcagttttcaagtgtataatacattgtgatgaacagtagtcaccatgttgtatagtaagtctcttgaacttaaaaaaggaaagaaattatgagtctcttcacatactggtattaagcaatatttgtttacagtgctggaaaggagcttccttacttattaggaacctcaggtggacctctcatggttgcagatggcttctcacttacaaaggagattgtgaccagctgttgagaactgtttggctttacttccttcagagaccagacttggttgtatgtcagagtagtcccccccttatcctcaggggatatgagcccagaccccccaatggatgcctgaaatcacagatagtaccaaaccctatatatgctatgtttttttcctatacatgcatacttgcgataaagtttaatttataaattaggcacaggaagagattaacaacaactataataaaacagaacagttataaaaatacagtgtaataaaagttatgtgaagatgatctctctttctcaaagtatgttatcgtatgtaatattttcagattgcagttgatatggatagctttaaacctcagaaagggaatcgcaaataaggagggattaccatatatcctcgctaagagtcctctgactctttttctctcctcagactcaccccacacagaccgcgtttctctccagtgtcgacctacacactcactgctcttaccagatgatgttgccagagtcagtagccattgtttgctcccccaagttccaggagtgagtatagagggcatggttctgggtgtttcaagggggtagtagggaagaaagcctcaggggaaaaggtctctattcttgtggacttgtcctttgtaaaatacatagattataatgtaagttggttattctaaagggcttccttttaagccccatatcatgatttatctatcatgcttgttcaaaaagatatccaagtaacaacttagttgcttttctaagaaaagtctacaagaaatttgaagtgtttgacttgaagcgataggaatgtcaagagttttatgttggattagaaagtttcaaaatcataaaatataaaaaaataaaaaataaaaaataaaaaaatataataaaaaaataaaaataaaaaataagaaagtttcaaaatcaaacacattatctcagaatgcacttctttttcataccaaatcctgtctctactcccactttgattatttactatgaattctccagcaaaactagtgtgatggcagtaatgagtcattctctaactgtgattcattcaccagagaagagacctgtgaggcagcatcctacagaagctgtctcacaatgacctctgccctgctgtgtgagtgtgcatgctggtgtgtgtgtgcgtgcatatgtttgggatggagggacacctttgcttgactcttagcctgccttttttaaatttcagaactggattctttaaactaactgaccatggactagaggagatttcttcctgtcgccagaaaggatttcatccacacagcaaggatccacctctgttctgtgtacgtatctatgtaaaagaaaatggggctatgcttcaagcagggaggacagtcagagctgatgaaatgcatcatcctttctgatccacacagaagaccagctttgtcacttaccttgccagatctccataataaggacgtacatgagaagcagtgtgggacaggaatagatttgaatcttagctttgccactgtgtgcctttgattgggctacttaccgttcctgggcctcagttttcccatctataaaataggcataataataacacctactttatagggttcttgagatgattaaatgaagtaatgtgcaggaagtacgtaatgcagttgctggcttattaaatgttactttttcctttcatcaatgtctctttctaagcctgtacttcaataagagatttgaaggcaaaggaaaagagaagccacttcagataggtaaattaagtatatttgtagaattttgcttaaatcataggggctttacgaccttcctacaaagttcttttttccctatgttgtggtctgtgaataaaaagtttagttgatgataagatcagtatgtttccatttgcccctgcaagctgatttgatggtgttgcattactccatgctggccatggagtattatttcttttgggttcagagaaaagtgagcaatatggaaaagggactaagaaccttgacacttaaaaggacctggagatgcttagaagagaaaccccaggaaggatctgagagctgatttcaagtgttagaagagttgaagtataaaaaaagggattgggtatatttcacgtcactcctagcactaaaacaaagacttcatggaatgatggttttctgctgagcgtgaggaagaactttctgacaaatctgttcaaaaatagatcagtctgccttggaatgtctaagtactaggatgttgaaacaaagactacacaatcagaaaaaaaggtctggggcaccagtgcccatgttttcagttataaaggcccctgttgcatgccaaaagggagcattcttctctcaccatgtgacagtaggtatactttattatttgggtgacatcatagctaaaaaaactgtgatgaattcagtaattcttttaaattaatatatattttagggatgacactatttgttcccaagtttaggaatcaaagaatgagtctagaatgtatatacattttaaaaataaacaaaggtaaatgggcaaacactgattccatctacaggtgggactggtggtagtaatgagtcccagactcttaccacaactaccacttaaatagcagtctggcttccagactgagaaccactagcctagaatgaacattttaaataagggtttttttgtttttgtttttgtttttgtttttgtttgaaacagagtctcgctctgttgccgggctggagtgcagtggtatgatctcagctcactgcagcctctgccccccaggttcaaacaattctgctgcctcagcctctcgagtagctgggactacaggtgcgcgccgccacaccgggttaaattttttttttttttttttttttagtagggtcagggtttcaccatgttggccaggatggtcttgatctcctaacctcatgatctgcccaccttggcctcccaaagtgctgggattacaagcgtgagccaccgcacccagccaaaaagtggttttttaaaatgacttttcaggccgggcacggtggctcacgcctataatcccaatactttgggagactgaggcaggcagattacttgaggtcaggagttcaagtccaggctgaccaacatggcgaaaccccacctctactaaaaacacaaaattagccaggcatggtggctcgtgcctgtaatcccagctactgggaaagctaaggcagaagaatcgcttgaacccaggaggcgggggttgcagtgagccgagatcgtgccactgcactccagcctgggcaacagagcaagaccctatatgaagaaaaaaaaaaaaaagacttttcagaattttctaggactccacctttcttttttcctattgcagagctgcagccacgtgactgttgtggacagagcagtgaccatcacagaccttcgatgagcgtttgagtccaacaccttccaagaacaacaaaaccatatcagtgtactgtagccccttaatttaagctttctagaaagctttggaagtttttgtagatagtagaaaggggggcatcacctgagaaagagctgattttgtatttcaggtttgaaaagaaataactgaacatattttttaggcaagtcagaaagagaacatggtcacccaaaagcaactgtaactcagaaattaagttactcagaaattaagtagctcagaaattaagaaagaatggtataatgaacccccatatacccttccttctggattcaccaattgttaacatttttttcctctcagctatccttctaatttctctctaatttcaatttgtttatatttacctctgggctcaataagggcatctgtgcagaaatttggaagccatttagaaaatcttttggattttcctgtggtttatggcaatatgaatggagcttattactggggtgagggacagcttactccatttgaccagattgtttggctaacacatcccgaagaatgattttgtcaggaattattgttatttaataaatatttcaggatatttttcctctacaataaagtaacaattaacttatgtttttgtgcttcagagtgatccatttgatcaagcattgtataaacaggttaaaaaaaaggtatggttgttttggaaaggtgaaggaaaaatggaatttgagatatactgacactgatggtgtgtcccagttcacttttaattactccttgttttttatctgcctgttgccatcttccagaggtgttgtgaagtcatctctgttcttttggtgctgtctcaaatgggtcaaccattcacttcctccttatgccctccatgcttttggctgaggataatgaagcctttgtttggagtaccaggttacactccaataaatgattacatttcccagccaccccaccctaccaatttcattgtgttggctgttcttttctgactaaggcaatacctaggaaaacgcttgaagcagcaattgttactgcaattttctgtgagctgagcctggtgttctaggtggcctagaaataatggtgtcatttgtgacacctcgagtgagggcaggagagtaaatactttggctaggagaagagtgatttattctttatcagaattctaggtgggggagggagaatctgtgaatgcataaagttttcttcatttttaaattttgtctcagtctttattgcttaggttagtggtccttgaacttgtcccctgaaagagcccagttctctatattctttttcttctcttgggttcttaattccccatatagtggaaattccttctttgctgttttggtatgggtgggtctgggggccagctgggcttggacaagccatttcctgctgcagcccagagcagcctggctgttccaccttgctctaaacagtcctgaaattgcccagtcctctgcttttgggaaatccatccccttcttcccattctttgtctaccacttagcttagggctttcttaccttttatttcgactgtagccgttggcttttaccaagtctctttgtttttagcatttcttcattccagtctgttctgcacactttgatcaggagaagcttctcacattccagccatgttcatgttttctctcttgctcaaaaacctgcaatagcttcccattgctgaaaatctaaatttagcttttagtcagaactttccacttaaagttcttacccctggctatatattcaaatatctagggagcaatttaaaaaatactgatgcctgtgttctaccccccaccaattaaagctgaatctctagggtggagcctcagatgttgtttctgcatttgtctttcaagctgctagaattctcaagtacaaccagggttgacaaccactgcattggtctttgatacctaagaattgtgagctctcttatccgtctctgcccaccaaagacattcagccaggtcaacaacatatcatacgttgcaaccacattgatcacagactgatcaccaaactgctatattttcttttctcttcctctaggcacaagatatcttagtggctagatgggtgcaggaaatcagtctgtagatccctcttcatatctgctgcagcctagccactgcagaggcactctgcataggatggtctaagtgtctctgtcttcatcttacctctgtggaggagacgtggaatcaagccagcccacaagccctgagactggataggccggagagaaagaggagtagccagagcggtcgggaaaagaggaaaggaatactgtgggtaaaagggacaaagaccacgcaacctgaggaaagacattgtattgaaagggtaatgactatttggctaaagggactgactcctgggttcccgaggctcaaagaccaggagacttttccactcttgcaagctgcacaagtaccatacttagtgttctgggctgagaggggagacaaaagcatcgtcaggttgccaaacaatgtcccagttgccctgggaggcacaaacctaccaaagtgccataggccaggtgcagagagaatcagaggagctgatttgcttggggtcagagcagagctgggttttttcagatgatcactttcacatactccttgttaaatgggaccaaaggggaagaagaagaaacccttaagcttttgtaatattgtcttgggtaccagataccataaaaggcagcatgagagaaacattcccttgggccagtgtcatggtggattttcttgcttgagaggcaaggatttcagctttcatttggtaccacagaatttaaaattgtaagtgcctatcccttttgactgttgatggcttctttggggttttagttaccccagttgaaagagaaatttttcatattggggttgagaagaatggaggctattaggagcaaagctttaatgagtgaaagtctggtgaatcctgcaattttgatatgtttccagtggattttgagaacacagttttaggaccagagtagatgttgttccctagaaaatagagtcagctattgatattgtgcctcccatccctcatatctcagtgttttaaccccacctgagtttggagaccagtttgtccaaggatctttcaaacatgtgagcccagagtagaacttctgagtcaaggatcatgtctttttctgaggagctttgcttggggcactggaaatcctgtttagatcaggactattggaatattatcctctccaggggaagtgccaggttgaacatttaaggctttgcttctaggcccagctatacattcaccagcaaatcacttaacttcctaaatttctttaaaatctgtaaaatgggatcagtctaatatgcctacctcaaatgatgacagaatgacatctatatgcatatgaggcctacgttagttgaaagatgctataaagatataagggatttgttacttgtctttcttgaaatgttacagttggggtgcggttgcttctatcttctggacctctgcccattcagcatacagctagaggaatctttgggcagatccacattctttagcactagctaggctttgactccaaagctatctggtctaccttgatgttctgagcaggaaaactgaggacctcaagaaccattccaaatttctactcattctccctaagacccagagcagacccaggacctaaagaaattacatcatctctattttcccttggctccagcccactcttgtttgaacctcccacttttgttgttccaactacttcttgagatgaaggaagggcagaacattggccctcttcactgaagtcttcaccccttaatccagggttcaatttttagttcaccttagcctgtttgagattagaagctgggccttaacttacaggtgtgtccggcatcattcaatcagcctgttagatccagaatccagcactgtgacgctacataaccatgggctctgtccttccagttcctttagtgccttccctcactggtaggttcactctgagggcttccttccttgaactccagtggcaactatagtctgtttcccacaatttgttgtgtgtgttttttgttgttttgcagcgttttcatattgtcttttatgtaagtcatgtttctgaactatcgtataaatttcattagggtaagaatcatgtttgctttatgcactgtgtaacatgccttgcagtcagtataggcacttaaccttattgatcagttgttccttggtgttgaataatgtgttaggtagccaggtggacctgtgtcctagcctggagaagctctatgtcaccttgtaggaagccatctgaatttgactcagcatcatatgctgggcctgtgctgcacttgagctttctttccagccgccaggagggatggttgtcctggccaacagcgaatttaatgggtggtcaaaagaagatgtgcctgcatagaaggctgaaagagggagctggaagtaggaggagacaaggagatagtgacaccagtatcttgtcacagaaatcaaggaaggcaacagtttaaaggaggggagggagatcagtggtgccaactggctcagaagaggtttgctgggttaaatctcaagatgagcccatgagatctggtggttagcagaggcctttcctgacaaccccattttaagcacctcttccccatcactctatctcatcactgttactgtctgtgtagccctgtcatgagctaaaatcatcctgtttgtttattgctagcttatgtgtctaaagtatactccttgagaacagcaactttgtctttttcacctttgtactgagtcccctgacatggaataagatatgaataaatgcacagacttgtccaaaatcatccaattaataaatggtaaggctttgcttttttgggagaagtgcaacaaatgtgagcacattttaaatattgatgtttaaagattgtgaaaattaaaaattaacaatcagccgggcatggtggctcatgcctgtcatcccagcaggaggccaaggcgggtggatcacctgaggtcaggagtttgagaccagcctgatcaacatggagaaaccctgtctctactaaaaatacaaaattagccagatgtggtggcacatgcctgtaatcccagctacttgggaggctaaggcatgagaatcgcttgaacctgggaagtggaggttgtggtgagccaagatcacgccattgcactccagcctgggcaacgagcgaaactccgtctaaaaaaataaataaataacaataatagaaggttacctctagaagaaaggcaaatgagaaaaactacatatataatcattcatcttttatttagagatgaacgataatacaatatcacaaattaaaatttctgtaatttctacaaattatacagagaaggaaatttagaactctaaatgctttcattatttaagaagaaagaatcaaaagatatgaattaagcatcggactcaaattagaaaaagaataataaaatatactaggaaaccagggggaaagaaataagtactaaagcagaaattggccaggtgcggtggcttacgcctgtaatcccagcactttaggaggccgaggcgggtggatcacctgaggtcaggagttcaagaccagcgtgacaaacatggagaaaccccatctttactaaaaatacaaaattagccggctgtggtggcacacgcctgtaatcccagctacttgggaggctgaggcaggagaatcgtttgagctcaggaggcggaggttgtggtgagccgagatcacgccattgcgctccagcctgggcaacaagagcaaaactctgtctcaaaaaaaaaaaaaaaacccagaaattaagtaaatgacataagtcatttttatgagcacaatctcataaattgtgtacacacacacacacttcacatcaaaatcaataatatagatgcaaaaattctaaatagaacactaaaaaaatcatcaatctagtaaaggaataaagtatcctaactgccagcatgtattatgcatcctcatgtaggacttgcccatgattccactgctagaaagtgatgagtcggatggcagcccaggtctacctgactctgagagccctgaggcgtttggtgatttttgtccctagaatgtaatggtgacctcattaaaagaaatccactgatataatatatcacaggagtaggtcaaaggaaacaagcagaaacaagagtctctcataaaaaaaaatttttttaagatgaaaatcaacatttattttttattttttaaactcccctagtaaggaaagaaagggccaggcacagtggcatacatctgtgatcccagcgctttgggaggctgaggtgggcggatcacttaagcccagggattcgagaccagcctgggcaacatagtgaaaccctgtctctacaaaaaactagccaggcattggtgcatgcctgtggtcctagctacccagtaagctgaggtgggaggatcacctgagcccagggaggtcaaggctatagtgagctgtgatagcgccactgcactccagcctggacgagggtgagagaggccttgactcaaaaaaagaaaaaaaaagaaagcaagaagcttcgttaacatgataaaataaatcttctaatatataacacccagcgtcatacttaataagcaaacactgctgtcagggacaagatagatccattctaactactattattgaacagtgtcctgaaaggataatctaaccaatgcagtgaagcaggataaagagtatactactggaaagcagacaggtttgggctacaagctaagtatctacctagaaatctgaagataataaattctgaaaaatggtcagacctattaagagaaaggcacaacgatgttcactaaaagatacattttaaaactttgaaaatagcttttcagtacaggtaatagccatttgtgattgggggaaaaaaaatctaattcagcacatagcaactaaaaatataaaatactttggaacaaagttaacaggaaatgtgcaagcctcatatgaagaaaaccagtaagcttttcagaggaacatgaagaaaataaatggaaagacaggcacactatcggtattctatgagagaaagacaatgttttaattttaaagatgctacgtcttctttaatccaaaaatttaaatgcaagtctgctaaaaagtatcattttttaacttgaaagattattctaaaattaatctgagatatgtgaaataacatttaaaaattgaaagaaaaaaagaattttgggggaaatttattaccagataatgcttattataaacctatgctaaatgacgagttaatgggtgcagcacaccaacatggcacatgtatacatatggaacaaacctgcacattgtgcacatgtaccctaaaacttaaagtataataataataaaactttaaaaaataaaaataaaaaataaacctataagttaaagtaatttgatactgaccgaggactagattaagaatcagcaaactttattgttgaaggaagtaagacttagaagagtttaagttgaccaaggccacagaactccaaatgaatagtgtcagactttcaaacccacactcaaccacactgtaatgctgccttcctaaaatatacattaatacatgtattcagaaaaactatgaataagaagtacctaaaaatattaatattagttatctgtaggtgatagaattatgggatgactgttcatttttcccccatatcctttttcgaatttcttcaaatgtactacaaagaacatgtattgcttttataattggacaaaaaggacaataccttctattttcagaaaccgaaacttcattgccccttcaatgtgggaatccagccagaccctattcttggacagcatcagtgaaaggggcttgggaaagctcttgggcgtagcagcagaggcatgtcatatatggaaaccttccatgagggtgacctcaccactggaacccgttcaacataaaccttgctgcaagaactagcagagctctttggacaaaacgtggtgagtggagagctgagaaagaactgacctaaagaagagagaagtgctggtcttacagcatgaagaagtcctgggtacccatctgggcttagcaggcctcctttatgatctattcctagagaaggattacttttcccaacctcagcctccttcaaagaagaactcccaccgtggcccagggttatttctgtctttttttctggacttgcgttagaatgtaggatgtttcttgtgttggacaaatcataatgggttattggtgggtgacagaagtgaaaacattacctagactaaaggaagtaacactattcttagatatccctccataattccctatggttagcttccctatccccagcagcctcctctcttcaccccattttgccttcaaaaaagtgaatggcatcatatcaaagcacaattccatcaaaatatttccatgccacctgcagcaccaggccctgtgccacgttgaacagctcttaacaccctgcttgccacacttagacacctgtgtctagaacttttctcacacagcctagtatacacctttcccatgttgtaggagggtttaaattttattttatattatttttagtagagacgggagtctcactttgttgtccaggctggccttaagctcctggcctcaagcaattctcccaccccagccttccaaagcgctgggattacaggtgtgagccactgtgccttggccaagagtttaaaattatttttaattgaaccatagtaaatgcaggataagtttacacaaatattttggttctcagccacagtgttgttctgtaagcacagggcctatgattatggcctttgagacttcagctggcctatgaggaaaccacataatgaaaatagaaccctgttagttaaaattcttttaattgcggccgggcgtggtggctcatgcttgtaatcccagcactttgggaggctgaggtgggtggatcaccagagatcaggagttcaagaccagcctgtccaacatagtgaaaccccgtctctacgaaaaataccaaaaaaaattagccaggcgtggtggtgggtgcctgcaatcccagctactcaggaggctgagacaggagaatcacttgaacccgggaggcagaggttgcagtgagccgagatcgcatcactacactccagcctgggcaacagagtgagactccgtctcaaaaaaaaaaaaaaaaattcttttaattgcactgacagaaaactcaattaaaactggtgttcaggtacagctggatccagtgtccattgtcatcaaggctaattttttattcatctctaggctcttctatgcttaatgtttgttcatttaattgggtttttcaatgaggtagctttgacagctagaaggttatagcctattgccttggtaaactcagcaagaaaaaaactttttttttgaaacagaggctcgctgtgtcacccaggctggagtgcagtggcgtgatctcagctcaccgcaacctctacctcctgggttcaagtgattcttctgcctcagcctcctgagcagctgggattacaggcgcacaccaccatgcctggctaatttttgtattttttttttagtatagacggggtttcaccatgttggccaagctggtctcaaactcctgacctcaagggatccacccgcctagacctcccaaagtgctgggattacagacgtgagccacctcatctggccaagaaaaagaactttttagttcaacagtttcaacacaatatttggaattgagatattgggtcatggctttggtcatgacttcatccttgaaccaatcactctgaccaggaggatggaatattagccaggcctggatcatgtacccataacccatctacgccacatgcactgagagtggggcagcattcatttccaaagaagaatggtggtggcagaaggggaagtagatgctgggcaggcaaaggcaacagatgtccaccatgcatgcctagaagaaaaaagtgctgttagctttagataatagcagctggacgatggggtagtgaccttctcactcccaaaaaggtgggtcgcacatccaggctgtgggtcattcatttaatttgcatatattgagtacctgctgtgtgcagagcactgttcaaagtacacaagaagtagatgttacgctctctgtcctcaaggagcagataagtaagataaaggagccctactctcacagtgcaagagcaattcatgatcaatgagtgtacgcagaatcatgagcaccaactttatcccgaagtgttgagggaacccaagtgagggagaaatgaatgttctcattttaatttctgtatcttccacttttattcaacaaatatttactgtatgcctactaaattcaagtcccacaggactctagaaacctcgtagaaaggatttcagacagattcctaggatgtgtaaaatatgagaaagagaaaataaattgaaagtgggggaaggatctagaaatcaagtatgcaacaaagtgaattcaggaataaagtaaaacacgtaaaccgtgattacttacattcctaccgtggatgggccgtaggatgtatgatgtaataaataatttgcataacaaacccaacatcaggtagaggggttctgttttcccatagaaatgatggaatctcactaaagcacaagatatggtaaatgtaattctactggaactgtggtgagtgtggggaaggcaacatagtccagctgagacaccgggttgtctgctaactggacctagcctagggatggatttcatcacatctgggagctcaggtggactgcatgcattttaaacaactctgggttgttttctgcactgacattttaataaatatttagtgacagtgagctcagaatcgtatctttggcaagtgcctggggtgcagctgccattctttattgatggctgagtaagatatgaggcgcttaacttttaactcatttttgttttgttttaacacagctcaccaagatggaggaacagagcccatggcccacttactacatggattcccactttacagtggagaaggagcttgcagtaaccacaaaagtttctgtataagcaaatttagggaattgaacttcagacagtgtggttgtctccttacttatgaacttgggaatacttacttaggtaacaactaacatcagaggtttttgatctgtagcctttctttctgtccataattagctaatagcttctgctgtacaaacacaaaccattccctgtccaagaaaattaaactatatcatcagaataagaaagaa

SEQ ID NO: 1272 - DNA, 10993 bp, Homo sapiens
gaagtgtgtgtctgaactcccatctgtgagcgtgtcgtcgaggtgtgcacctccagcgacttcgtgctcggcagcgcggacgcacctgcccgtcctccccgccagggactcaacttcctgggcctgggcgagaaccgacggcggggaggggccaggtgcgcagggggcggggacagggcccgcggggcggggtccacgtgggtgacgcgcggggccacgcccccaccttgggacacacccggaagcggcggcggcgcccctcggggaagatggcgccctcggggctgaaggcggtggtgggggaaagtgagtgcctctccggggccgggctctggcgtccggtgtgggacgggggtcggggacgcacgggctctgggatcctgggtttcatggcggctgggagttgggggccgggctgggcgtccgagcacctgaccctcgagggggcgggcggggacgggttcccagctggacgcccctgctctccggtgccagaacagaacaaaattggggggccggactccggggacccaaaggggacgggtagagtgtggcggaggctggggcccggactcctgggcctcctagggtgcctgccgggggaggagggcacagctggatgcccacactctaggatctcttaagccgggcaaagttcaggggctggattcttggggcctcctagggctctggtcagcgaccctaggtgctgtgagcgctcaggggacgtgtccaggccccacaggggtggtgtaggggatgtcttcctccttgccccatttccaggagcgccttgcagctggaggacgcaggcgtccaggcctcaccggccccggttcttgggggaagggtggagggcgcctcttcctccaccccggggagttccggcctcagctgctccttccgccctggccgtcttgataacagtggacatgacacagtggacgtggctgggcggggccaccccgttacttctctccactctctcctctaggcagggcggtctgtagctcaaacccctttaattgggggagattagaaaaaagtgattccattttacagatgaggaaactgagaccggaggtcagtgggatagcctcagctaggcatgcctcagagctgggaaccaggggtcctacattttagaccaggttggggggactggctgaaaccctcacagcaggaatacttgaggtagcaggtggggaagccgagagcctggcgctagaggcagatagagctgtagatgatcccggttctcctcttttcattcacctaaaacatgtttatcgagtggcaccttttgccccagcactctgccacttagacactcaggatgcgtaggtgagttacatgttgcctaagaatctgtttccctgtctgtaaattgggggtgaccccagaagccaatttgcagaactgggggctaaaaataaatgattcctgtgccgtgtctcacacctgtaatcccagcactttgggaggccgaggcaggaggactgcttgaggccaaaagtttgagaccagcttgggcaacatagcgagaccccatctatacagaaataaaaataaattagctgtgggtggtacatgcacctgtagtcccagctactcgggaggctgaggcaagaggatcgctggagcccaggagttggaggccgcagtgagttatgatcacaccactgcactttagcctaggtgacagagtgagatcctcctctcttaaaaaaaaaaaaaaagtaaatgggaattaagatgggggttcagccccaaggctgagaaggcttggggcagtggtgggaccagagaaccagcattctgacccctcccctcccttccctgcagaaattctgagcggagttattcggagtgtcaagaaggatggggagtggaaggtaggggtgaggcagatggctgggtacccagaggcagctcatcatcaggcctatggggaagaccctgaatgtgggacccccaagaactgcctgtccacatgggtggagttgggtgaatgggttctgggtcctcccacccagccagcccttgaaactgcccctcccactgccttggccccttctggggccagctgtggcctcttccgcctgctcctccatccatctgtccatccatctggacaggtgcttatcatggatcacccaagcatgcgcatcttgtcttcctgctgcaaaatgtcagatatcctggctgagggcatcaccagtgagtgaacgcgtccccagtgagatgggacctgagcgtgggaacccctgactgtgcccctctcccagggttcagcccttgagtgtaggatcccctcaaatcgtccagaactcccaagtacgcagctccctgcacggacagcccggatcatgtgaccaaatccattcttaaaccttgcaagctgactgcgggagcccatggattgcaggcctcccctgcagcactccctggctgcagccccttcctgaccgtgcagctccctcgtggagccctgtgtgggactcccagggtggactctggatgtggggtcccaagaatgcagagccttctatgggtgaccccaggtggtgtcccagtcactttgccattgagggataggtgctgagggagcctgtcctctcagaacctcagtctccctgtctgtaaatttggggaacccagttggctgcacaacccctgcagaaccctgtcgtgtggctcttagctggtggtccctaagtgggtttctcctgcagtccctcctaagcatccacccctcctccccaagcctccaaccccccacacctgagactccccacgtggccctgcctggatgccacccacctgtgtcccttcctctgttcctactagttgttgaagacatcaacaaacggcgggaacccattcccagtctggaggccatttatttgctgagccccacggagaaggtgcctacatgagtgagcgtgtgtgtatgcgcgtgcatgcgtgtacatgtgcatgtgtgtgtatgtctgcatgcatgtgattgcatgtgtgcatgtgtatacgtgtgcatgtgtccatgtgtatgtgtgtgcatgtgtgtgcatgtgtgtgtgcatctgtgtatgcatgtgtgtgcgtgtttgcatgtgtgtctatgtatgtgtctgtgtgcatgtgcatgtgtgtgcgtctgtgtgtgcatttgtgtgtatgtgtgtatgcgtgtgtgtctgtgggtctgtgtgtgcatttgtgtctgtgcatgtgtgtatgcgtgtgtatgtatgtgtgtgtgcatctgtgtgcatctgtatgtgtgtgtgtgcgtctgtctgtgtgcatgtgtgtatgcgtgtgtatgtatgtgtctgcgtctgtgtgtgcgtctgtgtgtatctgtgtgtgcatgtgtgtatgcgtgtatatgtatgtgcatctgtgtgcatgtgtctatgtatgtgtgtgcatctgtgtgtgcgtgtgtatgcgtgtgtgtatgcgtctgtgcatgtgtgtatgcgtgtgtgtgcgcatcagtgtctgcatgtgtgtatatgtgtgtatgtatgtgtgcgcgcgcatctgtgtgtgtgcatgtgtgtatgtatgtgtgtgcatctctgtgtgtgcatgtgtgtatgtgtgtgtgcatctgtgtgtgtgtgcatgtgtgcatgcgtgtgtatgtgtgtgtgcgtgcgtgcatctgtgtgtgtgcgcgtgtgcccatgtgggtgcgacactagtgtgcatttgcacatatacatgtccccgtccgtccatgtttgcacatggtggcagatggggggtggctgggaggcctaggcagccaatgagcctaggtgtgcaggctcaggcccagagagtgatccaccttccccagtcggttcaggccctgatcaaagacttccaggggaccccgactttcacctacaaagcggcccatatcttcttcaccgacagtgagtgaggagagcctagggtgttggtgggtggggcaaggaggtgtgggggctgctctggcctgatgccccactcctgcctcaccccagcctgccccgagcccctgttcagtgagctaggccgctctcgtctggcaaaggtggtgaagacgttgaaggagattcaccttgccttcctcccctacgaggcccaggtacggcccgggctcatcctgggcagggggtgggggtttgtgaccaaatgtcccctgttccctcagaaacagacactgaggctgggcgcagtggctcatacctgtaatcccagcgctgtgggaggccagggcaggaggatcacttggggccaggagtttgagaccagcctgggtacagagcaagaccccgtctcttaaaaaaagaaaaagaaagaaattagcttggcgtggtggcgtgcacctgtagtcctagctactcatggggctggggtgggagagtcgcttgagcccgggaggtcgaggctgcagtgagctatgattgcactgctgccctccagcctgggcgacagagcgagatcctgtctcaaaaacatacataaagtaaaattttaaaaaggggaggtacccacagagtccaaggagctcttgccttgagttctatcccactaggcccttgcagggggcagcgtagagcgcaccgcggggttgtccagccagcttaagggacacgggctggggtatttatccactgactcctgcaggcatgggtttagggttgacctgggcctgcctccaattcggcaaagcaggcttcagggaccagggacggctcccaggaggtgcaggtggcggcagcgggaagcggggcaggtgtgcacctgcagcggcaaccctggtgcttctgtcccctcctcgcccaggtgttctccctcgatgctccccacagcacctacaacctctactgccccttccgggcagaggagcgcacgcggcagctcgaggtgctggcccagcagattgccacgctgtgcgccaccctgcaggagtacccggccatccgctaccgcaagtggggaccccacccagccccaccccgatgccgacccccccttaaccgcgtgcaacacctaacctttaacctctcttgtgaccccagccccggccctaccctggcccctgactctcaccttcaaacccatccttgaccccatcccctgatgatgtcccccgtgtctgacctccccgccaggggcccagaggacacagcccagttggcccacgccgtcctggccaagctgaacgccttcaaggcagacactcccagtctgggcgaggtgagggggcgtgcttgggaggtgaggggcagccccaaccggctcagggtcagtgcctcattcctgccctaaaccccaccccagggcccagagaaaacccgctcccagctgctgataatggaccgggcagctgaccccgtgtccccactactgcatgagctcacgttccaggccatggcgtatgatctgctggacatagagcaggacacatacaggtctgcagacttggaacccgtccccacccttgccactgacctggttccccagtcctcagctcccctgacccccaggctccctccttcctccccaggtatgagaccaccgggctgagcgaggcgcgggagaaggccgtcttgctggacgaggacgatgacttgtgggtggagcttcgccacatgcatatcgcagatgtgtccaagtgcgtgcacacggggaccggatcccccccccaccgcccactgtgggcctggtagcggccttgggatccctggctgctgccaagtctttggccctcatgagcacccctcgtgtgactccagactggcctccaatttcaccccacctctccctgtcccccctgagtgggctcacccatggcctgtggctcctctcccctcactctcacccccgcccaccctcatggccaggaaggtcacggagctcctgaggaccttctgtgagagcaagaggctgaccacggacaaggtaggggcggacccaggtcaccaaaggcgctggtggaaggaagcccccctccccatgggcgcagggccacagcctggatttcgagcctggactgagacccaggtgggcactgcctggcttcgccccccaatccctaccctcttccccctacttccccaggcgaacatcaaagacctatcccagatcctgaaaaagatgccgcagtaccagaaggagctgaataaggtgtgctcgggtgggcagggagcggggacacctcggcccctcaaccccatgctctgtctgcgttctgccttgactcagcctttgttatcccccaacccccaccctgcaccctgcagtattctacgcacctgcatctagcagatgattgtatgaagcacttcaagggctcggtggagaagctgtgtagtgtggagcaggtggggcagggcttgcggggggcaggggtgatggtcctgccaaggcggggtattggggaggggctgaactgtagagatggggggttctgggggaggggcagggcttgtggagaggtggaggggccttggagagaggtgggacctggtggggaaggagtgggtcttgtggagaaacggtcctaggatgagggtgtggcctgtgcataggtggatggggcttggagaggtcagacttgggtgaggggcagagccttggacaggtggtcccaggacaggaatgtggcctattcataggtgggtgggaccttggagaggtaggcagggccttggagaggtgcgacctgggagaggaatggagccttggagaggtgggacctgggtgaggggcagagccttggagaggtgggacctgggagaggaatggagccttggagaggtgggccctgggagaggggcggagccttggagaggtgggacctgggtgaggggcggagccttggagaggtgggacctgggtgaggggtggaaccttggagaggtgggacctggatgaggggtggaaccttggaggggtgggacctgggagaggggtggagccttaagagaggtgggacctgggagaggggcggagccttggagaggtgggacctgagtgaggggtggggccttggagaggtaggagctgggagacaggtagagccatggagaggtgggatctgggtgaggcacggggccttggagaggtgggacctgggtgaggggtggaacctcggagaggtgggacctgggtgaggggtggagccttggagaggtgggacctgggtgaggggtggagccttggagagctgggacctgggtgaggggtggagccttggagaggtgggacttgggtgaggggtggagccttggagaggtgggacctgggtgaggggtggagcctcggagaggtgggacctgggtgaggtgtggaacctcggagaggtgggacctgggtgaggggtggaacctcggagaggtgggacctgggtgaggggtggagcctcggagagctgggacctgggtgaggggtggagccttggagagctgggacctgggtgaggggtggagccttggagaggtagtctcaggatagtggtgtgacctgtgtgtaggtgggtggggcactggaaaggtgggacctgggtgaggagcagggcctgtggagagactgtccctggacaggggtgggaccttgagagacctggtgctgagatgaggtaggacccaaatgtcctcttgccgaggatcctggggatgtccttggcccgcctctcccatccccttccctgacacatagcggccggtggacggctgaccccatgcccgcaggacctggccatgggctccgacgcagagggggagaagatcaaggactccatgaagctgatcgttccggtgctgctggacgcggcggtgcccgcctacgacaagatccgggtcctgctgctctacatcctccttcggaatggtgggtgggggctgcagggagttggaacgtccccatttgccagcgtctcccacgatcctgggaactgctgaaccccacagctctccttgggtcatttgcactcaccgggctcaccaacccccacagctacccctctggacccgggaaccctcctccattggcttggggattcctccactgaggtgagggctccctgctaacgtagaaaccctcacatctgtgattcctatagatgtggggctccctcagctcatctggaggagcccctgatctaccccctccaggtttcccactcttgctcacactagcacagggtactgaggccctccccactgcaaggttctctcatcagagtcctgggagctcctcagcccaccccaaactcccctaaacctgggagctcacctggccgccgcctccaccctgcccattcccgtcccccaggtgtgagtgaggagaacctggccaagctgatccagcatgccaatgtacaggcgcacagcagcctcatccgtaacctggagcagctgggaggcactgtcaccaaccccggggtacgccaggagcgggcatggggggaccctgggagagggtgcggatcacagccggggctctgcaaggcagagggccattggtgcacaggcacggtgtggttcctggcgtggtgtggttgctgggaggccaaaagcagtgtttcgggtctggtctggggcccagaggacactggggcctctcccagtcccagcttacacaataggcaggggaagtgagacatggtcgctgccaggctggtcctggcagtggtgcagttgggagcgggtggtctgagtgctagaggcagggagtagggtccccagcatgggggctacaccacattgtctatctgggctcccaggggtctctgagggtcccccgcacccatccagcacccacacacagccatgtgtgtgcttgactcttgggtcagcctctcctgtctctctctggccctgtgcgtccccctccagggtgccctcaccccgtccccatctctcccccatccctcatccatctcgctgtgcactgtttctccatatctctctctctcacccttctctctgccttcccctttctctctgttctctgtcttgctcccctcccctctccgtcccccttctgtccccatcttcctctctctgtttcctgcttcatctcttgtctctctctttgccttcatactttgtctcactgcttcttatctctttgcctatctctgcctctgtctttgtctttctctggctcgctctctctccctttggctttctctctccgtctctctctggctcactgtttctctctctcgctttcttgctgtctctcgctctctctcgctctctgttccacttccccatctttgcctgccatcccccaccctaccagccacaccaggcgcagcccctctgtgaccagcctccttcccctcaatccccctgctgccctccctgccctgcctgtagggctcggggacctccagccggctggagccgagagaacgcatggagcccacctatcagctgtcccgctggaccccggtcatcaaggatgtaatggaggtactgggtggcaggtcagggtgggggccagccctccgcatcggctggcggctcagcctccctcctgctgaggtgctaagcctcagggcttaggggaaaatgctcattgctggcattcccttggcaccgatctgctctgctgaggggggcacgccaagcccgcagctgaggaattggggtgacagcggggcctgtgctggggagcctcacttcctccccacctgccggctgcctccgctatatctctctagtctgttcccctgtcccgcaggagtgcccctgagccccagccctggccttcccaggatcccagggcagcaccatccaatggcaatgggcctggggcggcttcctggcttcctccttgtccctctaagagccccggcccctctttctgcgtgggggccagagacctgggcctcctcatccccatggaccttgaatacctggacttctggggctctgaggggctgagagcccagacactgggttccccaaagggctgggggtattgactgatggtccccaagggcctggaggcccagactactgggttgccgaggaactgtgggtttagacttctgggtacccaaggagttatggaattagattcgtgggtccccagtgagttatggatctagatttctaggtccccaatggactagaggcctagactcctgggtcccccagaggcaggaggtggagatgctggttcctgtctgccaggatcttggcccctgaataccccgtggggggcactcctgaccccggaccccatgcctggggttcctcccctaacctgcctctcggccgccaggacgccgtggaggaccggctggacaggaacctgtggcccttcgtatccgaccccgcccccacggccagctcccaggccgctgtcaggtgaggccccggggccgcccccgcccacgcctgggtctgtgttaggtgggcggcctggcggcggtgagggcctcctgcctggactttctgcccctgccctgcacagtgcccgcttcggtcactggcacaagaacaaggctggcatagaagcccgggcgggcccccggctcatcgtgtatgtcatgggcggtgtggccatgtcagagatgagggccgcctacgaggtgaccagggccaccgagggcaagtgggaggtgctcattggtaagtcaccaggactgggaccctggggtctggggcttgggttcccggggcctgggcttgtaccttctaggtgtctggactccagagtccttggagtcagggacctggtttgctgagggacagggacagccccacaccagccgggaccgggagcctgtcaaagacgaaggcagcgccccccaacatcttccccaaacctctgcccctgcacaggctcctcacacatcctcaccccgacccgcttcctggatgacctgaaggcactggacaagaagctggaggacattgccctgccctgacccctggccccgccccctacccctccctttccagagaaataaactcttcccgtcgctctgcca

SEQ ID NO: 1273 - DNA, 130269 bp, Homo sapiens
gggccatttctggacaacagctgctattttcacttgagccgaagttaatttctcggggagttctcgggcgcgcacaggcagctcggtttgccctgcgattgagctgcgggtcgcggccggcgccggcctctccaatggcaaatgtgtgtggctggaggcgagcgcgaggctttcggcaaaggcagtcgagtgtttgcagaccggggcgagtcctgtgaaagcagataaaagaaaacatttattaacgtgtcattacgaggggagcgcccggccggggctgtcgcactccccgcggaacatttggctccctccagctccgagagaggagaagaagaaagcggaaaagaggcagattcacgtcgtttccagccaagtggacctgatcgatggccctcctgaatttatcacgatatttgatttattagcgatgccccctggtttgtgtgttacgcacacacacgtgcacacaaggctctggctcgcttccctccctcgtttccagctcctgggcgaatcccacatctgtttcaactctccgccgagggcgagcaggagcgagagtgtgtcgagtgagtgtgcgtctgtgtgtcccggcgagggtgcgcgctcggcgccgggagcgcggccagccgagtccggaggcatcgggaggtcgagagccgccgggaccccagctctgcgttcactgccccgtccggagctggacttcggggccggggccggggccgtgcgccggggacaggcagggccgggtcgcgggccgcgcgtcccccaggccggaggtaaaagcgctagcgcgcggagggctcgaggagggcaccgcggctgggccccccgcgccccgggccccagccgtccgcggctcccggcccgacgctccccgccccggagcgcgcccgcctcccctgcgtggaggccggcgggcaggcgagcggggggcggtagcgccgtgccaaggggctggctggggcagcgtggccggccgggctggggcgatttaagagcggtccgggcggggtgcggagccggactttggctggggcggcgcgcggggagggggccgggggcggtggcggcggcgttggggggcggggaggaggcaggaggaggagcagcagcgctcgccgggggatgcagcagcggcagcggcggcggcggcggcggcagcggcagcggcggcgcggagtcccctgcgcccagcggcccggccgggctgcggcagaggcggcggcggcgccccgctccgggtgaggttgccggggccgtgcgcgctggtgagtggggcgtggggggcaggtgggtggctgggggacgcggggctcgggcgggggctcgcggcggccggagccttccccggcgtgagcccggccgcgagcgccgcccaggtgagccggggctggtccggaccgcccggctccagccccagcgctgcttgcggaggtgggtccgggcgggcgggagggaggctccggcgccggccgtccgcagagggatgacctgtttgaccccgctggctggcgggcgggcgaggacttcccgccgcgcccctgacccgcggacacggcacaccgagcacaggcggccccgggtaggggagcgcgcctgggccggccatccgcaggggcatggccttgttgacccttagggtttagacccaagggaccggtagatgccagcccacgtggggcttgtccgggcaggactcggggaagcagtgggccggatcttcagagtggttggaaactcgcagacaccgaaaggacaaacaggatcgaaaaggcagacttcctcccaggccagggcagaacgagtttccatcgcctggcggagggatgctcccctccccggctcctcggggtttcagaagtctagcggtgaattctaggagtgcacttttccaaacattccttatagtagttcgttcattcgttctacaagcatttctggagcaccccctcgtgccgggcaccgcgttctgttccagggaaacgcggctgaacaggatctggctcctgcgcgccagaagctgccggttcactgggagggcagcagggtagagagatgccgtctcggggtggaagatggaaagggaagcctgcaatcctagtttgcacactggcctcggtccgcaactcccccacctgcacgcagtaggcccagcacacagtaggaagagcaagccagacctgcctgtgacgaccctctcctcctcctcctcccccttgaaagctttgattcattccctgcccccctttctggaaagtcttcctgcagcttgttttaatcactttttgagttaaaagtcaatatttaattaaccaagtaattacattcagcttacgtttcaatctgggtatttgctcatctgtgcgtgttgggacacccgccctctcgcccctccatctgtcccctgcctgtttcccaccgggtccacccccacttttggggcagagaaggggaggctgcgctggagcaggttctcagggggagacagggagcaggagagacgggctttctctggaggacacccccggatctgcgcgctctccaaatttcagcttgtagtgaatagtgaaggtgatttcttgacagcctctgcctcccattacagaaccaccagagggttctaattaaattagagccaatcgttaagtataggaacggggtagggaggacagaacgaagggggccccttccctgtaagagatgttctccccagcttcgtctctcccacatcatagagaagagaaaactcatccagacagcctgtcggatgtgtaatttagcgttctaataagcagcttgaaaggcgaaggtggtgggcttggcagatggcatgttggacctttgtacatgaaggcctcttccttccccagctaaatttatatacataaaggccgtgatgttggcatcactgctgcagctgagggtcaatgtgggtttggggtttgggctttgtgtgtacttcttgggttttttatttgaatttatggctttttctgaaaccctaataacatgttaaattttcaaacttgagagtagagtgatgagttgactgtaaaagtctggtcttggaggaggacagcatagcagtgtgtgtgcatgcacgtgcatgtcccccagttcagctgctgtccaaagaacccagttgatatgcagtttcacacctgatttggacctgatttgggagataacatttccttctcactttttctggcactggttagtttatctgcttggacctgcctcaagagggcagctgggttaaccaggcagaatatcacccaactctgtcaagctttggccattatctgaccttagactttagtcctgcagaaggagtccagaagccctgtcctacagaaaaatatcagcatttctgaccagcttgtagttaaaagaaaaggtttagtccagacttaagataattggtaacacttaagtagttttgtatgggcctgatctgaggcattgatctaagcccttataccttactcattaaatccacacaaataccctgttaagtaagtactgccattgttgccatattaaagatgaggaaacaggcacagagaggattgtgacttgcctacagctggtcacaggtagagctgggattcaagaggccctcaagctccggggtccacttggaaccactggactctcctccatgaccttggcctttgtcccagatgtagaagaaacacatatgcaggggaagaaaacaccttcagacagtcaaactttgcaaagtaaaaggcccttaactttccataaacccccactgttccgacagagagtccgggtttgtatttgaggttttttgccccaaggaaaacatgtgtctgcctggtgctttttcttctgcttatgagcagacacactgtcccctcccccagtcaaaatgcaaagggaaacatcaaatgcagctgatggaaaagccaggtgaaccatggtgaagatttcagcccactcagagcacagtggccagagagcaaaagctctcctagaggtgagaccttcctgtggttggtgatggagtctcgatggcctggccctgggggtggtgccagggtgctctgtgtcaggcctgggcggatgtggaagatgggggcctctctcaatgctgatctgcaggtgagggggccctccctgaaacctgctttctctgggcctccttggaatgggccttggtggagatctacagacagccctggcccagccggattgaaggcactgtctaattgggagggcattaagatcgttataattaattggcatcccgataaatggcatggttgcctaattggggtggttgctagggaacgaggcctcacttggagcctaaaggggaagaagcgctgggctggccacagttgggtgtcagggtacagatccagcagtgaatggaccggaagggagagcagtccatccgtatctgctggtgtttactgagcagctgctgtgtgcaagttgcaaatggagtatcagttaggggtacttgcctagaagaactgtaaagtaatcaggttcctttctcttgcaagcaacggaaaaagagaagaaaaaaactcaagccagcttaaggagaaaagaagtggacttactggttttcataaccaaaagtcttaaggtgactaactctagcttcagacacagctggacccacagctcagattttgtaatgagaatccattcctatccaccgctcctctgccttccatgaggctgatgtctctccagctctggggcgggcagtccctggcagctgtgggcaccgtggctaggagagccagactgcctggctccctgcccagcagtgggatctggggcatgctacttaacctttctgtgccttgatgttcacatccaacaaatgatgatgatcatagcacctgtctcctgcttgtggtaagcatgaaatgagatgatcaatgtcaagtgcttagcagggcgtctgacccaggtgagccttcagtaggcattgactgttaccataacttaggtgtcaggacagatgtcatggagcagaggggtctcatcccctctggtttaagcccaaaaggaaagaacaagcctctgatctggcaatgcacacctgagccccatggttccctctgattggactgttttttgtccaaaccagtcactggctaaggaaatgagttgccaacaattggcttaagccaggctcacaggcctctccctggagctggatggaggctgactgctgagaccccaaagcctggaataaaacagcacggggagtccccagtgaaagggaagcccggttgctggagaggcagatggccagtgcctgcgatgatgggccactaatgtgagcaatgctggccagatggacccatcttcattttggccaaggtggagactggggaaacacgctgcctgggcaatgcctctcccttccaccagggccaggaggcatcaaaggcctgacttttctgccttactgtctgaaggatggggcctggccttgatcctgtgctttcggggggccaggggcagtgtttgtctaacctcccaccatgagaatcatctggctgtatttgtttaaaaaggcaaagaccagatcctgttgaatcaaacttctagggagggtcctggatgctggggggcatgaccaatatgtcatgtgtatattctatatcagcaggagggtttggcgaagagagctctggagcgtgggcctctttgtcttcctgcctaatgcaggggctgtcagaaggcggggaaaatgctctaggcctggcgtgctggctcatgcctataatcccagcactttgagaggccgaggtgggaggatcccttgaggtcaggagtttgagaccagcctggccaacatggcaaaaccctctctctactaaaaatacaaaaattagccaggtgtgatggtgcttgcctgtaattccagctacacaggaggctgaggcaccagaatcgcttgaacccaggagtcggaggttgcagtgagctgagatcgcactactgcactccagcctgggcaacaaagtgagactcagtctcaaaaaaaaatttaaaagaaaaatgactgcatgatgtgatggggtgggaggcaactttaggcaggctgtcagggaggcctctgtgaggatgtgacctttgaactgtgacctagattttaggaaggagtccgccttggaaagatctgggggaagagcatgccaggtagaaggaacagctagtgcaaaggcccagaggcggtgggaggggcctgtccaagacacctgccccaaacacaaatagaagtcaagtggggtaggccaggcgtggtggctcacgcctgaaatctcagcactttgggaggctgaggcagttagatcactggaggtcaggagttcaagaccagcctgaccaacacggtgaaacctcatctctgctaaaaatacaaacattagccaggtgtggtggcacgtgcctgtagtcccagctatttgggaggctgagacaggagaatcacttgaacccgggaggcaggggttgctgtgagccgggatcacacttctgcattccagcctgggcaacagagtcagactctgtctcaaaaaaaaaaaaaaaaaaagtcaactagggtagagggtcaggagtaagtgggggagggcacgtcagagatgagaaatacaggccatgctaagaaattttagactttattttaaataaaatggataactgtctggacgcggtggcttatgcctgtaatcgcaacactttgggaggccaaggcgggtggatcacctgaggtcaggagttcaagactagcctggccaacatggtgaaaccccatctctactaaaaatacaaaaattagccaggcacggtggcgcacacctgtaatcccagttactcgggaggctgcagcaggagaatcgtttgaacccaggaggtggaggttgcagtgagctgagattgtgccattgcactctagcctgagtgacagagcaagactccatctcaaaaataaattaaaaaataaaatggagaaccattggagggttttaagtcagagaatgatatgatttgtgtttcaagaagatcctgctggctcctgtgagaggcgtgctgtgcagatggaagtggtatcaccgggactgttaggcaacagagagggcccgagagtggcttggaccgtggtggtatcaatggagatggagtgaaatggggattggagatgtattttggaggtagggcccacaggacttcctagtggattggattacagagtgagggaaagggctttgattctcaaccgagggtgattttgacacccagaaaacattttaacactatccggagacagtataggttgtcccaactggggaagggttgctactggcatctagagggtagaggccagggatgctgcttaacctgcaatgtacgggatgaccccacagtgaaaaatgattcagcccaaatattcatgatgtatcctgccaaggagtcaaaggtgactaggcagcctggtgcgtggtgattgctaaatagggaagataggagagaaggttttggggaggaggagtgatctggaattccgacgtggaaatgttgggtttgagatgaaccccacctggatgtctgaaagctcagtgggtggtgaacgtggatgtctgcagccggtcggggctggcaacctaagtttgggagttatcggcatattgatgttattttaagctgtgggactggacacaattatccagagagaatgtgttttgttttctagtgtggttttctccccccagcctccccctagtgcctgtcatgaatctatttgatgaatatttttagcatatcccacatgctcacctctctgacatttccaagaagttcctgaaggctcgggctgagcctccccttcttcatcgcctggtttctcagtgattaacagacagagctaaatattcattgctctgccacagatgcccttgggaaattgcttaaggtcatgtgggatctcgggccttgtaggcagcacgatgccttctgggtggaacagctgttggcatggccttcagagcttctcctccagcccaggccagggcttcttggaattctctgtaaccagaatgttttgaattccccacgttctcttaatgtgattccaaagcacacgttgcccagtggccctggcctctgccatggagcgtcatcttacagaaggcctggcccactgctctgcacacctgggcccagcttgaatcttagataaattctatcccaaactcagagttgttatggccaggtcttgtgtgtgtaagttggtggacagggccatccccagggaccacaaatagtaccaaagatgtgtttggccatgtggaagccagatgtgttaggggaagaatgtggccaatagcttttcttattggctcatggtcaggaccccagcgggtgacttgacccaccccagtagccagagaagaggagcttttttgtttttgagacagggtcttgcactgtcatccaggctggagtgcagtggcacagtctcagttcactaccacctcaacctcccaagctcaagtgattctcccacctcagcctcccaagtaggtgggactataggcacaggccaccatacccagctaattttttttttttttttttggtagagatgagatcttgctatgttgcccaagctggtctcaaactcctgggctcaagtgaccctccaaaagtgctgggattacaggcgtgagccaccctgcctggcctggaactttttgaaaagagattgaaaaaactgttagctcacagaagccttggagatgttcctgcttggtgaaaatcagaccatctgaaagccacatttctggtctgctctcgagacagatactatccatagacttctgattgcaggccacttatctggatatttcagagaccaggaaagcctactataattcttagtagcttagagtcctgatcattttaatgtgaattgaaatggtttcattatgaggaatcacatttctgactgacagtggcttatgcaatagaaacatttaattctcacataacaccaagtccaaagcaggggagtccaggcgctggtttttcagtacaacagtgtcatccaaggtcccaggatctttcaagcctcttcttctgtcctcatcatgtctttggccttgttgcctcatagtctcaatatggctgccacagctccagacgtcgcatcaccctacaaagtgggactataggacaggactccttgctgtctctcttttaatcagagagtaaaatccttgccagaacactcccaccctagcagactttgctttctgtttcattggtccggagttgggttttgcactcacctctaaatcaaacactgggaaaggacctggctccttcctatgcttcggatctcagctgaaatgtcacctccctagaatgctggaaggacaacctgttttatgttttataacacttatcactctctggaattagcctggtttgcttatttgtcctttgtcttctctctcctcactaaaaagcaagctctgtgcttgtagggacattgtctgtcttgttcatcgctgtatccccagcactgagaaccagggtggcactctttggatactcagtaaatttttttttgaatgaaggaagcaagaaaagaaagaggcttggagagctacaggcacatctggctagcatgtttgctcgaaggtgactgctcagggcaaggatgtcaaaacctgttagtcatttgcaaaaagctaagcaggtggctgggaggattggtttcatacacactcacttgctccccagtgccagagctggggttttgtgctagcattgcttgcagaggaaggatcgtcccctttatgccacggcagggacctcacggccttgcagaagggctggtggaaccctccacttctgatgactctggggccaagctagtcttccaggtcagtggtgtgacattctaatgagggctcttgggttaaatatttctgcatgtgcccttgaaaagacaactcccttccctaaattgtcccttcctgaaagaacagcggtcacagcccaggagagcagcctctttaacctccactccccaacctaccctcctgaaagctcacatttaccgagcactttgtacaggctagtggtggtttaagtgcgcgctcctgtgaatgtggaataactcagcgatgtggggatcttccaaccccgttttacaaaggaggaaagagacacaacgaagtctctccttgctctgccatgctggtagaataggacatcacaggccacctaaccaggggctctgttcagctcgcagaaatgttttgtttgaaccttctaaaaagctgtcagatttgtaacaactacgagatttcacattttaaaaatctggattttcagcttctcctgaaaaatggggagatgtggtccccaccatcccctatagcctgacattgtgaaccaattcatttggcttttcattgcactttcccttctgtttttctcattgtggagcaatatttctctgttccatctctaccaaaagtggccagatgagagctggagaggaagtggggtgtggagttttcttatgcgtccacttcacccgtttacattatctgcctggcccacgtaggcatttgagtttgtctcccgttgtgacactttgtacccaatggctacacttccagggacattgcaagtgtccctggacacttacattgtgcattgcaagtgtgtagtaataataatgtctaatatctattgattactttttgcccagcatttcatcatcacagcaagcctttgaagcagggactaatatcatcttcactttatcagtaaggaaactgaggcactgtgtgtgatgccctcactagaacaggaggtcctgaagcttgttcatctttgtaccatctgtgctaggcttactggctgtttgaatgaatgactaaaggaatgaatgaatgatgttctcctccaagtgttcattagccgaagaggctgaaagtcttaacctcatagtcatttgtgacatttctgttgggggaatgggctctgatcagtgtcactgaggattcttgggttgtgtttctgctgtataacaaaccactccaaactcagtggtttaaggtaacaacattttattttggacgattctgtggtttgaccaggtggttcttcagcttcatgtgatatcagctggcaggtctaaaacaaccccattcaaatggctggcagctcttgctggtcaccagatgggagctcagttattctccatgtgggctctgccctatggctacttgggcttcctcgcagtatggcaggttcagggtagcctgacttctaagagtgcaaaaatgaaagctgccacggtctcttaaggcttaaccgcaaaaccggcacagcatcacttctgccaccttctcttggtcaaaacaggtcccaaagccagcccggtttcatgaggtggggcccacacaagggtttgaataccaggcagtgtggctttttggagtccaccaaagtacccattcatcacagactgcaagtagcagagcccaacacttactacctcaagctggaacaggatttactggggggctcaggaaaggacaggtcaggaactgaggaaattctggggaccttggcgcaggagttactagcagcctcctgaaggagagtttccatcccaatgcgacaaatgcacccctgctttttctttctgcccttgacactttatttgacagttggggacatggtaagaaagtctgattgaccttggtcacatgatcaccccttggcagagaggatgggggcatcttggcagaggggagggagtcctcaaaaggaagctggggtgctgtcaaaagaaggggaccagatggacaaaaattgttagaaatctctgcaccgcccctgcataggtgactccacccctggcagagcaatgaacattttaaaacgagtgaatggactttgaaagtccagtataagtagaatgcccaaacctgtgtggcagcttctccagctccagggccccatagctcaggtgctgctgggggtctggaagcttctctccactttacggggcaaagtcaactcctagaacccctgccatgcctcaatatccccctccagaagataggggcagtttgcttctggctcctgaaaggagagcatgcgcggtaatgagggacctgggctcaatgcctgcactccctcctcccagaccccgcctcaccagtgacactgccttccaccccaacacctggtgacacccagtgagtccccgcagcaggggaggctgctagtaggaaaaactgatccagactaatctcagctcgcagagcctctgacccgggctttcctcccacttgccggtctatttccggctgctaattagattgcacagcaagccacattgggaagccgacctgtcgttccaaaggcactccactcgcatctccaaatgtagcaggtgatttggtaaaagttgattctgactccttcccccagcttctaaaataattgtaagtgtcgggctgtttccaaggtgaactaatgaacagctcatctgctaatagcaggggcaagctggctgaggacggcacgctcgcctgtggattgggtgaaaaggaaagaagtaattggattattaataccaagccgtcaaaataccttttattccttttatattcttctggaaggaaacgacaatctctggaaacataaatacatgttctgtgggggtaagcagggctaagaaaatgtggggctgaaaaggaggagggggttaaaaaggtggaattgtcagtccccactgtggcagtctacactgagaaccagcccacagttaggcgtgaataatgactctgttcaagtcggactttattgcttttggccaaaggccttttgcagaaataactttgtaactccctgccagggaagcttttgtccacagctgagacaaaggaacaaagaacagaggtgggaatttctgtatctgatttctacttcctctaaacagccagaaaggacagcgggtgtggcctgcccagaaggcatgggctggggcaaaggggtgtccagcctcctgtgggccacactgccgtgctcggctgcaccatgttggtttcattgtgcacattcccaccccagggcctttgcacttacttcctccgttcatagaaagcattttgcccacaactggcttctcgcccgcctctgctctcagctcagatgccatttccttatgccacctcctcatgccagagaggcctttcccaatttactgtccatcctatcacctgacagcttcctccaaagctcttaagacaatcttcattcattcattttctcctccaccaaggtatcacagctccatgaggacagaggcctggcctgccttgtggccactgctgtttcttagcatgtggcacatagtaggtgctcaggaaagattggatagcttggaagagtcgcacatagctcccaggccaagctccagcggggctttatggagcccgctcagtgcttaaaataggttgaaagtttttactttggaaatggtgtttccggtgtagtccaggcgccaccccatctctatcctaaatctaggccactttactcactcaggtctcctgcccgacccttggatgcatttgcatatttgtccctgctttagacaaaggccactgcaaacatatctctctccaaaggtcaccagacaacatccagacttcttgcattgccaagtcttgtgccagaccggtggcctccaccaaccaggtcccattgactggatcaaggtgtagtcttcatcttagccgtccacgcacagggcgtaagtggcgttgatctcatcataagcaggtcatggcaggaggagggtcgggcaggagacctgagtgagtgaagtggcctagattcaggataagagacggggtagggcctggactacattggaaatgccatttccaacgtaaaaacctttaacttttcctttttccccttttccttttctgctctcctccaagcctctgggtcatcaaggagggaatcgcgtgaactcctcctttatggtcttcaaggagacctactcccaatgtaaggggaagcgcagaggccttggcaagcaagaatgtaaccacaatgtcattgcctttatactgttgccatctaagtatggcaggggttctcacctaggggcagttttgccccctagggggacatttggcagtgtctggagatatttttgattgtcacaactggggtaggtgctacttgcatctcatggacagaggcctgtgaacaccctgtgatacacagcacagtcccccatcgaagaatgatcctgcccacgcggcagtaatgccaaggttgagagacccaggtttatggcaatgggtgctggttcctccaagatagacttttctttctaaataaatttattgaaataagaaagggaatgaatgaatgaatttaggcccagatttgggtattctacttataccagacttttaaaaattcatttatttattctgagacgctggcatatgggatggagcacagaggttaacgatcagccctgtcatccctttcggagcagatcaggctgtaccatttgcctcaaatcaggagcccctgccctggaagctgccatcttgccagaaacttcctggggagctgcctgtaaaaaactctagcagcagttgattctggcccaggtggaaaagctgtgttatcccaggcggagttccggcaggttgggagatgtttccaggtctcctgcccagccaggcatgatgagcatccttccaagcttggccccggagccctggcccagcacccccatttgaagcctgcagagcctcatcatcactgcccccgcccccgccccatcctgccactgacaagccaatacctgcctgatgagaggggctcccagggacagcagccttccctcctggactccagggcaacctccatgttgttgggcggctttgagcacagggctcaagggcagaggctgagttggaaaatttcttgcctctgcagaagggaagagctgggggaggttggggcctttttccccaaacgaggtcttattcttctgtggggttttctgggtttgttaggtggcttcctttctacttaaaaataagctgggagtggttaaaaaatgggaagaaatcaatgtttctggcgtacatagaactgagcagatgtgttatctagaataaggaggagaggttgttgtgactctagctcctggtacgagcccttcagttcaccctcctgccctgctcagaaccccctggacctgacatcgtggctttaacacccttgggtcatgtgagaaggaagagtgcccacccaggactttccgaggctcacagattctttgaaatggacgtgagcacaaacgcccagccccgacagccagggatcagatcgggtttcacttcctaggagggaggatgtactgcaggggaggcccacgtggctgccccaggcctggccagcctctgtgacccagcaggactgactgttttacgggatggccacacggtaccctgcaggctcatccatggtgggaccttgatgctcctttgttgagatgtgggtctgtgtcccctccccttgaatctggccagacgtgcgtagccctggtggaaggaacaccatgggacagcagaaaagatgagccagctccccctggatcactgggaccctcgctgttgtgtaagaaatcagaccccactgcaaggccgccatgctgtgaggaagcccaagccacactgaggccacatggaggtgcccactccgcagcccctcccaagctcccaaccgactgccagcaacaactgccagacaagccaaggccctgctgagccttctcagcagtggcctcagacgttacaaagcagagaccagcccttcctgccatgtcctgcgcaagttcctgatcaggagcctctgagaataaaagaaagattttaattcaccactaagttttgcggtaaattgttacacagtattagtaactggagcattcagccaattccagtcttcccaccgtgcagttattcattcattcactgaacaatattcagaaaccgtccacctcttgccccttctttgctcccacctagtcatctcagtggcctccctgtgcctaccctcatgccctgcagtctgttcccctcacatagtcagaaggattctgttaaaacttacatcagggctgggcatggtggctcatgcttgtaatcccagctctttgggaggctgaggtgagaggattgtttgagtccaggagttcaacaccagcctgggcaacatagcaagacctcatctctaccaaaaatttaaaaagtaatcgggcatggttgtcctcacctgcagtcccagctgcttgggaggctgaggtgggaggattgcctgagcctgggaaatggaggttgcagtgagctatgttcgtgccgctgcactccagcctgggcgacagagcaggactctgtctcaaaaaaaaaaaaaaaaaaaaaaaaactacaccagatcacatcacccgcaagctagaaccccccagcccccttcactcagctccgtgccgccatgcgtgccccctttccggccctccctcaggcatcttcctacctcaggacagttgcgctttctgttccctgtgcctaggatgctcttcccctaaatatccacaaggcatgttccctcccctcctgcagggatccacccaactgtcatctctcaggccttcgctacccaacctatttaaagttacaccccctcactccctagcactccaacctccctccttaggacttgatctccttgggacacgttgcctcatatgttgtgtaatttattttggtgtctgatccatgaaggattgtttttcctgattcccagcactgaagaatagggccgggaacatagtaggtgctcaggaaatctcggctgcctatctggaagaattagcacctcggctctgccaggagctggggccgtggcgtcaggcaaccaagagacagcccctgcccatgcgagcttctggtggagggatgcccctctacaaaataaaaacccaggccaggtgcagcggttcacgcctgtaatcccagcacattgggaggccaaggtgggcagatcacttgaggtcaggagtttgagaccagcctggccaacatggtgaaaccctgtctctactaaaaaaaaaaaaaaaaaatacaaaaattaggcaggtgtggccgggcgcggtggctcacgcctgtagtcccagcactttgggaagccgaggcgggtggatcacaaggtcaggaaattgagaccattctggctaacacagtgaaagcccgtctctactaaaaatacaaaaaaattagcgggcgtggtggtgggcacctgtagttccagctactcaggaggcggaggcaggagaatcacttgaacccaggaggtggaggtatgcagtgagctgagatcacgctactgcactccagcctgggcgacagagtgaaactccgtctcaaaaaaaaaatgaggcaggcatggtggcgggtgcctgtaatcccagctactcaggaggctgaggcaggagaatcacttgaacctgggaggtggaggttgcagtgagccaaggtcatgccactgtactccagcctggatgtcagaggagactccatctcaaaaaaaaaaaaaaaaacacgcacacaaacacaaactcaggccagagagtaaatagaggaatcacaagttatgataagtgctctgaagagagcagtgctgggactgggggtgggggtgaccgagcagggcctgcttcagggacagagggccagggaaggcccaagtcacagccagggtggccgagtcaggtccagaatttgtgattcccacacccacgttccttccgcttttccacactaccttctcttatcagttgtcaaagaaggatgggcgagttggccctcagtaaggcggagagttgggcacaggccaaggaggcctagcgtgggctggtaggccgtgccctgaggcctctgttcacacaggcacgaggtggccaggaagccacgggagtcagccctctgcctccagcccgccccccaatttgggttcatttggttgcaagtgagagagcaactaggaatgacctaattgaaaaaagggaatttcacttctgatcttgaagagtcaaaagtatggggaaactgacctacaaagaaaacagaaactagttaaagaggaatttattgggcctgaaacaaagaacccaacccaaatcttcctctttcaggctgggctggatcccaggtgtccagtgctgttaagtcccaagtatggtgcatttcacagcactgctgtgttcggtgtgttggcttcattcccgaccccactcaagacaaagtggcgtcgctgtcttccctggtcctcacattggaaccacatggagtgagttagccagttgtaaagactggatgcctcttcctgaccagtcaggccaaagggcctggattactctggcccgtcactgaggcaaggggtggggaggctctgattggcccaggtctaggatcccacgatctagcattgtagctccagaactggagcctaatttgaactttgtggaccaagggtggggagaaaaggatcccccaatattttttttttttttttgagacagagtcttgctctgtcgcctaggctggagtgcagtggcgtgatctcagctcaattctcctgccttggcctcccgagtaactgagattacaggcacatgtcaccacacctggctaatttttgttgtttttgagacacggtcttgctctgtcacccaggctggagtgcagtagcgcaatctcggctcactgcaagctctgcctcctgggttcacgccattctcctgcctcagccttccaagtagctaggactacaggcatgtgccaccacacccagctaattttttatttttagtagagatggggtttcaccgcattaaccaggatggtctcgatctgacctcatgatccacctgccgcagcctcccaaagtgctgggataacaggcgtgagccactgtgcccagcctaatttttgtagttttagtagagatggggtttcaccatgttggctaagctgatctcaaactctggacctcaaatgatccacctgccttggcctcccaaagtgctgggattacaggtgtaagccgccacacccggcctcagactcccaagaaaattgggagctgttatagaaaggagataatcctgggtggcccaaacctagcagagaacacaagccagcatttattgggcacttgctgcatacagatctgttgaaagtctccgtgcatgttaaaccatccactctgtaggcaagtgcttgtaggtgtcctcactttccagatgaagtcactgagaagacaagaggttcagacacttgcccaacctctagtaagtgacggagctgagatccaaacccaggcaggctagctctagatcctaccctcctcctactcagcgtgttccctgtggcattttcccccaagtaagtatcaggctgtttgcttacctctgtccgctgtttgtcagctctctgagaatcgagagttttgtctgttctttttttttttttctactgatcatgaaacagtacaaagcaagtggcagatgctcaggtatttgagggtgtgaattatatggcctgtcaaacatctacccacttgacatacaaaacattttggtgctcagcttcctaagacttgaatacattgtttctaaatttcctttgtgctctaactttaatccatggccactctgttctcacagcttgccggtggtttgccattatttccagtcctcttttctgatcattctcacatgtagctggaatctttcaactccagcttttcctatgttgacttagagtatcacttccaggagggcagggagctttcttttcactgctttatccacagtgccaagaactgtgcctggcacacacgagccttcaggaatgtcttgttacatcaatagttaggcaggtaactgggttcctaagccctgcatttttgccctacaatctttatgccctaatttcctttccagatcctgagcctttgtcttgaaacctgatctttccctcctccctctgaatgacccttctattgtctcctgccctgttcttgagagccggcttggttctctgcctccatttggaattccaagaacaggcaaggagagccacaagatggcctgggctaggtaggggagacagggagaagctgtggcccataggttacaggagcttctgtcctttctttgacggccccaaagaggaggagagaaggctggagaaagcctgtagccaggaagaaagggagacacaggggagtgtaaagtttaacagatgtgcgtgtgtcatcccctgtctagacagcttctgggcttgtgaggtttgggaccacactttcccatccctccaggggcctctctctgtttcctctgcctgctctttgcccaaactgtttctcctgcctgaagcatcctgtcctccaccctcctcttcactggccatccaaatcctttggattcttcagaactttgctcctgttaggctgctcagtttatgctaagtactcctccaggaagccctccctgactgctcccaggccagcagtttcccctttcctcttgctgtttatacaacacacttaacctcagtcccttgtatcacttgttgctttccaagtcagcataagtgtcaaaagagtaggctctggggtcagaatgtctgtgtgcaaatagccatgctggcttgcttgttttgtctgtcacttggaggtggcacatccaagtgaacctcccaggggacagggaagagtggattactgttgtaatcgggcaggattctcctatcactgaacactgcctcacatatagcaggcccttaataaatatttgtaaagtaaatgaaggaagagagaaatgatcaggctccctggaccacctgaggaggccctcaggtctgttgctgggctctggccccagcccgtgggacatatctgcacacccacaatttcctttcttccctcctctcatgagtgtttcccgtctgaccaatgccgccttctgcctctggccccttcttcctctcccaccacctcaactgcctaattattaccaaacttctctctcctgtttttttttttttgttttgttttgtttttttttaaggcagtgtcgctctgtcacccaggctggagtacagtggctcgatctcggctcactgcaggctccacctctgagttcacgctattctcctgcctcagcctcccaagtagctgggactacaggcgcccgccaccacgcccagctaatttttttgtattttttttagtagagacggggtttcaccgtgttacccaggatggtctcgatctcctgacctcgtgatccgcccgccttggcctcccaaagtgctgggattacagacgtgagctgccgcgcccagccctctctcctcctcttgttggatttggaggtggagagaagatgggaagggaggaccaaagggacagtattcagcacccatgctgcacgacactgggcaggttctggaacctgtccgtgccttatcttccttgtctgtaaatggagcatcccaactcacaaggtggttgtaagggtggcgtgaggtcacacactaaaagtgcttagaattgtgcagggcccctgatgttagctatcattcattattgttcttctagggtgtttcctgtgttggtctgggtgctccctgttgcaaatgacagccctaattcggactctcttaagcagcaaagggcacttttttgagtctgtacctggctacaagatgcaacttggtccaccccattgtcaccagcatcctctctctcgggctccatccaatgggcggccaccatcagcaccatattcatgcctcctggcacccagcacagtctcctccagcctccaggactccctctcgcttattggccagacttgggtcacatgtctgccccaggaccaatcgctgaagctagagctggaattgctgattggctccacctggctcacatgcgctgccctgcagtcaaaccatatataagggggggtgggaaataagagcacttgtggcctcaaagcactaacaggggctgttaccaggagacaggagataattctttgttaagccagtaaatattttgaatgcctgctatgccgcaagcattgttttaattgttgaggatatagatctgaacaaaaatgacaaaaacctgtaccttcagggggctgatattctgctggaggacatccgcaaagaaataaaggagctagctgtgagaggtggtaagtgctactggggagggcagagatttcggttttaacctgccaaggtgaaatttgagcaaagacctgaggagggggaagaagggatggtgaagataacctgaatgaaggctccaggcagagggagcagcaagttcaagggccctggggtgggctgtgctagcatgtgcaaggaacagtacagagaccgtgtggctggaaccaggtgtgcaagggagagaggggaaggcaataaggtcggagaggtgatggagcaggttgggtgggttcttgtagcccctttggagggtttttgcgttttactctgcgtgggatggaagttattgaaggccgttcagtggaggaaggcaggcccttgcttttgttttaacaggatctgtctggctgcttgatggaagggacgaggtagaagcagggaaaccagttaggaggctgttggaatccaggcaggattctcctatcactgaacactgtgcctcataggaggtccttcatacgtatttgtaaagtgaaagaaggaagagagagaaatgatcaggttctctggaccacctggggaggccgctaggtctgttgcggggctctggccccagcccgtgggacgtatctgcacacccacagtttgctttcttcccgcctttcatggacatttaccatctgaccagtgcctccttctgcctctggccccttcttcctctcccaccacctcagctgcctgattgttcccaaacttctctctcctcctcttgttggatttggagatcctcagaggaaaacagcccatctgggtctttctaaacaggtctggatgaggtcccaggtgtttgttcaccgctgtggtttgtggcattgggaaggtgagggcatcagtcactcagacccgttcctcttggcagatcggcagagaaattgagaactaaaaatgatgtttctaaatgctcaggacgttagctgtttccagagatgtctcctgggctggcgagcctttgccaaggtcctggagaagactcaggatggagaggaggagccagagagacctggaaaggaactggtgggaaggagaggtgttgtccacagcagggatggagtggcaggcggctggtgctgcgtgagttcactgggtgctctctcggttcagccactttgaatattttaccaagaaaaaggaaaaaaaacaaggcagaatcccttgtgtcatctttaattgatttcttcagcatccggagagaaactggcatgaggccacgagaagtctgagccaggggaattcatcagaaatcgacccactgatgacttgatctgatgaaataattagctcctgttattctctggcttctggtgccggagctttgacttccatccagaggagagcgggtgatagccgcccaggagtggggggtgctctgaaaccaacatgggagccaggaacgaagtccagctgactgtgccccgggctccatctttacccagcccagggctcccaatgaagactgcccttcccagcccccctgtaccctggcatcacaggcccagggccaaaaaggccctcagagggcacctggccacctggcaaatgaggaaactgaggctgggagactcttaggaacttgttcaaagatctgcttctagggggtcctggttgagctgcccaaatcgggccagactaggtttgaaccccttctctgccacttacccatatgatcgggggaaagtgattttaactctctgtgcctcagcttcttcatccataaaatgggtgaaatattgatgggtgggtgtgcatattaattgggttgacacctgcaaacagctcagagcagagactggagtgtgctgcaagctttcagaaaggttttcctgtgattggtttctggtttcagagagttgctatttgtagggcaccccatcggaattctcccaatattagcactccacgtctgtctctctgaaggaacgtgaatgtgcatcttagaacgctggctgctgcaatcgtagtttcaagtgcaaagcatcccgtagtgtttcccgatggagggacatgggccactgataatgtattagtctgttttcacgctgctgataaagacatacccgagactgggtaatttaaaagaaaaagatttaatggactcattgttccatgtggctggggaggccttacaatcatggtggaaggtgaaaggcacgtcttatgtgatggcagacaaaagaagatgagaaccaagcaaaaggggaaaccctttataaaaccgtcagatctcatgagacttattcactaccatgagaacagtatgggggaaccacccccatgattcaattatctcccaccaggtccctcccacaacacgtgggaattatgggcgctacaagtcaagatgagatttgggtgaggacacagccaaaccatatcagatacacaacatagtttgaggattactctgatttggggtggttcagggactgattcgatggctagagtttgtctccttttcagctgtctggcagcctccagttacctccagcagaaagtctcagatggtgctaatgtgctttgactcctttcaacacctgctaatctcacttcaaaagagagtgcgagcgcgagggcacgcgaagcctgggaagctatttgcatcaagttccactgattcagctttctttgacttttatttgtacaattagctctacagggaagcgatgtccactttccatttatctttgggtaggaagttttcttttcccaaaacatgtgtttgtgtttttattttaaaatgaggccatttaaagaagcacgttaagcaaataatcactgaagggctctgcagattcagcagaaatcagggccgtggtccttgaacggaaagagttgggaaatccgagtttcgtgatgagaagcccacattgaacggtgagggagggcagaattcacatcccatccctgccatcttctgtctgggtggccttaggacagtaatgaaacctcagttttctctggggctaataatagtacttgcaggagggagccttggtggaggttgaaggagatttcagagtgcctgacgcaggacagctgcagcggtaggatcactctaataatggtttacattgtggaatatgtatcccagttagtactatggccaggctctagtcccagcacactgtatcaacacatttaatcctgcacacccatttcacagatgaggaaactgaggcacaaaggtgttaagttactagctcagggtctttcagcaagtaactccaaagtccacatccttaaccatcacaccacgtggcataaagcaggtgcccagcaggcagttgccgcagtggctctggctgtcatgaggtgtatgtttctgcagacgagagattgagaaggaaggtgttgttcaccctctggtcccatgaaactcacagttctcatgtcagacgactgcatcgagtgtgtccccagctcccctgaaattgtgactctcagagccacctgggaaggaggcattgagcggagcctgcttcctgctcccaggggaggtgctagaagggagacttgctgtcctggccagcctgacataggatacaggtccctgaatgaagtaaattagggtgcgcatcagggcagctgggagagttgattgaaagcactgttttcagaggcaggtgggcaaagggagcaaagaaatgatgctgcaccgaggaaccggtagcaacaggagcccttactttcccgagacttgatggggcaagaggagggagaggtgaactcagaactggggagacgctagagccaggaggggccccaggcaggagctgcatccacacacacagacacgaaggctactgcctggggagctactgcgtgcgggaggagaataaatgcacggacttcccaccacctcccatgctgcagcctcccagccggaagccagagagcagggacgtgccgaccgtgccatctgtagagctcagcctcccagggtgccaagcagagctgggggagaaatggagcaggagtgacccttcctggggtttttcaaccatagcgctgcccagagaacacagtggccagctcctcgttggtgtccatggagggtggctggggcaaggcatcagtgatggacgcctctgagccatgtagacccaagctatggcacggccctgccaagtccagcttccctcactctgcagaactcaaaggaccttagcagaacctccgttcctttatttatctatttctttgtgccaaggcctggagacagccatgaataacataagcctgtctctgtcctcagggagctgaccccctagtggggaagaattggacaataaataagaaattgcaggctgcagtagtgattacaagagaaataaaaccggttataaaatgcagagtgcctgggttgggggcccccgctttaaatagggtggccagggcaggcctctctgaggtgatgacgtttgttcttttgacagaaagagccaggagtacaaagcaggagtttgttgttgttgttgttgtttttgagacggagtctcactctgtcacccaggctggagtgcaatgacatgatctcggctcactgcaacctccatttcccaggttcaagcgattctcctgcctcagcctcccgagtagctgggattacaggcatgtgccaccatgcccagctaatttgcgtatttttagtagagatggggtttcaccatgttgatcaggctggtctcgaactcctgacctcaggtgatccacctgcctcagcctgccaaagtgctggaattacagatgtgagccactgcgcacagctgcgggagttatttttaaaagagcaggtgcaaagaccctggggcaaagagaagcttgacttgtccattcgacagaaagaagccagtagggctggaaaggagaggtcgaggagaagtgggcaggggccagatctcacgggccagggcagccctggcaagaagtttgcatcttatcctgtgagccatgagcagccagggaaggtgcggcaggtgagcacaggactggcactaaggtgaggcgagtgcctggcacttgtgcagcctgggagcgagcacccccttcagtctgtacctgcacgaggcactgtgccctcccctgcccagtgctgtgatctgatctgtattttaggaagattcctccggctgccctgggaaaatggaggatgggggcagggaagagggaggcgggagacccctcaggccaccttgcagtccccaggagagatgaagcaggcagcacatccccctgctgaacccggagaccttgctgagcctctgagtcatgactttgagctgatggctggggttccccatgaagggcaaggacaaacagaccctttcaaggtcacagcaacacagccacccccacagcacttggcttcctcccggcacatctgcaggctgtggctctctcgctcatgctctcttgttttaaataaatgataccaaaagtctatatctggacaggacttgaaggctcatttcctcaagaagtgaaaaaatgaccacggagagcaaagagcagggcgagattagagacctgcttgagccagagtcgcgtccccacctccccgcacccaccttcgctggtgacctagtctgacctggggccaggggggtgactgagggcacagtggcctgtggcaggtcttccccctccaccttttagcgctcaattttctctattgtcatttcatttattctgcaacttaaaactaataggctgggcacagtggctcacacctataaccccagcactttgggaggccagggcaggtggatcacctgagttcaggagttcaagaccagcctggccaacatggtgaaaccccatctctaccaaaaatacaaaaaattagccgggcgtggtggcaggcgcctgtaatcccagcttctctagaggctgaggcaggagaatcgcttgaacaccaggaggcagaggtcgcagtgagcccagatggcgtcattgcactccagcctgagcaacaagagcaaaactctgtctgggaaaaaaaaaaaaaaaaaaaaaggaatacttttttgcccaactacaagatcccttaacaaggggctttcacacgcatccccagcagactgaaatcttacaacagccctgtctactcattttgttcatggggaaaccgaggttccaaacgggcttgctcacgggaaaactgagccagtgagtggaagatctgccactcacacatgccagttgtccagcccaaaacatccagctccaggctctcgtttaaacccctgattgaatcccccgctgctggggagctggaacttcatctccctcacctctgtaccccacggtgcgggcagatgcaagaggacggcaaatattcaccccttgagaccagcccgctgctgttcctctccctggggacgatttgtctgtggagttgggtggattattcagagacggctgttatctgactcgggtcttgggctgccaccgacacatcagaggctcactggatccagggaagaaattgtttctgcagaagtggccacagaaggcttttctgccagtctgttgaccaagcaaactgtaaagactttgctaacttcagcggagttcggttttcactctgccatagccacccctgttcaaagaaactcccattgttcatgccagccgccatacaaatcattatgcaagaatgagcagccggcagccttgacataaatattgacctgattcttcctcctcctctagatctgcgagtgaagagggacgagggaaaagaaacaaagccacagacgcaacttgagactcccgcatcccaaaagaagcaccagatcagcaaaaaaagaagatgggccccccgagcctcgtgctgtgcttgctgtccgcaactgtgttctccctgctgggtggaagctcggccttcctgtcgcaccaccgcctgaaaggcaggtttcagagggaccgcaggaacatccgccccaacatcatcctggtgctgacggacgaccaggatgtggagctgggtaagcctcggggccccagggtggcacctcggcccctcggagcagggtccctgggttaggctgaggctcctgaggcaaggcggtggtgttgatgcgtcgtgctcacttttgagtacattgaaaccaagacacgggccacccacacgtgtttggggtcacaactgggtcctcaaggttaggggtctctacccttctccagttgcacaaccgttcctggatttctccaaagagttaaagagaacaggctgggcgctatggctcatgcttgtaatcccagcacgttgggaggccgaggcaggtggatcacctgaagtcaggggttcgagaccagcctggccaacgtggtgaaaccccgtctttactaaaactacagaaatgagccaggcatgatggcgcacacctgtaaccccagctactgaggagactggggcacaagaatcacttgaatccaggagaaggaggttgcagtgagtggaggtcatgccactacactccagcctgggtgacagagtgagactctgtctcaaaaaaaaaaaaaaaagatgagacatgagcctggagccaaattttggaggctcttgtgggttgtggcaaagactgtcaatcattgatcccgtgaagggtgatccctcagcctctgtccactcttaaaggataacagcgtgttgttggtggcaacaaatgtgaaggttgactaggttagccttgacaacctgaatttgtcttttagctaccaggaaaaggcaatttacataaaaccaagttgttccttgcaatgctttgtattaatgatcacaagtatagtttttttcctccgggagcttctcagtgcagaaagaatttgtagccaggaagcaatcagagcccagagcttttattgacaatttgacacataggatacctatctcctggcagcatttagaatgaggcgcatttgataactatggggagtctgcagactgtggccagagaggtgtgtttcgtttcttgaagaattttgcagaggggtcttgcaggcagcacctggacctcagagcttcttggtctcacattgtgtagccccgacgctgtttcggctatagtcatgcttagaatttccgatgccctgcacgtttgttcattcatccagcagatgtttattacgcatttgttgcattcagtgcactgtgtcaggagccagagaactaagggaggctcattccaggtgaggagaacaggaaattcaaagatactgagatagaaatgggctcggtggtttggagcaaaaaaaaaaagtgccagggagccggagtggagggagctggggccgtgatggagagagatgaagctgaggagctgacttggcccgggttgcaccaggccttgtggccatggtgggggctttgagtttgattcttagtaaaatagacatggatgagggggccttaagaagaggaaggccgtgacctcacttaggttctaacaggatcccccagctcttttgatgaaattaaatcgcaggggtaagggcagaaacaggacactcattcagaggccgatggggtgatagggcagtgatgatggaagctcagacccgggtgctgagatgcggtcccacctgatgtatatttgggaaataaactgatcaatgggttaggtatgtgggttatggaaaagatacgtttcaagggcagccgctagatttggggcccgaatcaacaggtgagtggctgaatacccactcttaggaacaacacatttttgcaacatgatccagctaagtctcatgtctgaatctgactgaattttgcatctgtgacttgtgaataaaaccaacagtgtatgcagataaaaagaaagcaaaggcatatgcagatataaggaaaccaacagcgtatgcagatacaaggaaaccaatagcaggtatgaagtagacacaggagagaggggaacaaagaaagccgtggctgacttaaaatacagagatttcttctctccatttgacagatggaaaaactgaggcagagagaagtcacttgtccaagtttgcacagctagaatgtgattaaacatgatttgagctgggtgcagtggctcacgcctgtaatcccagcattttgggagcctgaggatcacttgaggccaggagttcgagaccagcctgggcaacatagtgagaccccccccgtcttaacaaaaaatgtaaaaatcagccaaggatggtggcacacacctgtagtagcagctaatgggaggctgaggtggaggatcacttgagcccaagaggtcaaggctgcagtgagcctaggtcacaccactgttctctagcctgggcaatagaacaaaaccccatcttagaaaaaaagagaaaaacaagatttgaacccagaacgcgtgatcttagccactgctctatttagccagattcctgggatggatattgagttgttttcagattggtagcgtgtgcgtttgttagtttttcactgttacggatattgttgctggaaatttaaacaggcatcgttgcacagacaagggagtgcttctgaaggataaattctaggaggtggatgcggtgggtttagagcccctggtgttcagtggcctgtgtcagctcttgcccaatagcactacacagcatagattagggcctacaagtcttgccctctataaacaagccagacctcttccaccagcagcactgggttttgaaggaggcaagggatgggaaggtggttgtgggaggggcatgataggctttttataaaccactagacagacccagatcaataatgcatgtcccaaaaaagcccaatacattatctcacagtctctgctacaactggcatgcagcgggtggtcctaaaaaatttatcatttgctattttctgcccatccgtgcagcagttctgacagccctctgggctggagacttcttgactgagataatcccaggattctttccagtcccaggacagagaacagacgtccatcctcattagggtccggttgggaggactggtgccagatacacaagacgaggggcttgttctgtttcctaattgcaaggttggggggttcggggctgtaccacgtatattcaattttcctttccctgcacgcatttgactccctaagctgtcatttggaattatcaaatgcccaggggaactgcttccagggccatactagttcgtaagtggcctaaattatcattacatgtttaaagtagttggggacatccctgtgtctcaatggccctctgagaccaacggacttttgctggacttccgctccaaaagaataagagggaagcacatggaggtaaaggtctcgtttgcagacgtcctttgttcagggaggcagtagaatctttgggctctgccagggtttactgatttaatttgatctaaacctctggggagcctctggggctccagcaggctctgagacagcaagaggattaagacatggttctggcctggagcaagagaatttttgcagcatcccagttctgatctatgacttgagaatttctttaactggacttatttttgaagcttaaatattattttaaaaggaacctccaaattctgactgtaaaggaaaaaaccaatacccattgccttcggcaaaggatcactgtaaaaccaaacacagtgaaaaccaagtcgtgtttttaaatttcagcaagatgctgcctcccagaaagccagtgtgtctctactgtaatgagggtgacgggcagtttcagaagcggcattaaaggtgaagtagcacctgccaagactttcttcttggcctcatcagcaggatagagactagaaaagagaagaactttctcaagcttttgatgtgggggtcccacttacatggggaccacttggtggtggctcttgtatcagagggttaaggacacagccagactccaaaccccagaatatcagagcggattccccagtgctcattttcctgagtgttcacaccaggcagagatgggtgccttttcgaggcccctcagattgtcggatttgaagtgtgccccacgagactgcatccagtgtttgcatttcttttcttttctttctttttttttttttttttttttgagagagtctcactctgtcacccaggctggagtacagtggcgcaatctcggctcactgcaacctctgcctcctgggttcacgtgattctcctgcctcagcctcccaagtagctggaattacaggtgcccgctaccacacccagctaatttttgtatttttagtagattcagggtttcgccatgttggccaggttggcctcgaactcctgacctcaagcagtccgccgcctcggcctcccaaaatgctgggatcgcaggcgtgagccaccacacctggcctgatgtttgcatttcaaaagaattctttgcctctcagaacatctttatttttatttgtttatattttttgagacggggtctcgctctgtcacccaggatggaatgcagtggtgtgatcactactcactgcagcctcgacctcctgagcttaagcaatcctcttaccccagcccccgaagtagctgggactacaggtgcgcaccatcacactcagctaattttgggagtttttggggttttttttttttttttttagagatgggcttttgccatgttgctcaggctggttgcaaactcctgagctcaaacaatccgccccccattggcctcccaaagtgctggaattgcaggtgcgagccgctgcacccagcctatcagaacatctttaaatgaaaatactccgagtaaagttgcaagggtaagagctgtctcattagccaccaggttcaaatcctcactctaccattgaccatgtgtccttgggaaagatttgccctctctgtgcctcagtttactcatctataaagtggagatgatgatctgtttccctggcattcttgtgaggaatacctggcacctgtcatatgtgtgacagtttgctctcacttgggttgttaaagccatcctctgttagagcaccctgggccaatgccacagtgttgtttgtctacagcaagctttgcatatcaaaacgacattaaaatctaaatgtctcatggcactgaacagcaacattagagtctcctcccagctgacacagtggggtgagtgctgtccacgctcatgcaggtgagctggcacccactctgccaggtatgtgagcctggcatggttacataccccataatttgagtgacacttgtcaatcaagtttggcatgggttcttctgccattactgcctctgctgatgaacagagttgcaccatcatggctgttgaaaagcaactgagtggtggttttggggcctgcaaaagtgccatgggaaccagccttccactgggtgttaaaaacgcgtgtgtcacaaccactctctgtcagcctggattctctcagttacgagtgatgtaaacccaactcgagcaggattgaggaatcaaaaaggggactttattggactcatatgaataagtccaagtatacattgagcttcaggtgcggctggatctaggagctttgtctctgggtggcctctgtccctccatctccctgacctcagctttcctccaagttggctttactctcaggccagctctccaggcagcattcctggcatcactagacccacatgaacaccatacaggtgcaagccatccctgtggaaagagagcttctctcacctagaagagagtacccaaattgagtctttttggtctgacactgtctgggacttctggtcaaccagattcaggggaatggaacacagtggttggccagatggagtcaggtgcacattcctggagccaggactggagccaaccccacttgaaccatgaggactgggattgggatagagcagattccccaaaggaaaattcagaagctagtgccagaagaaggcaggtagctggtgtgcagtccagttagagagatgctcgtgacaccctcacatggcgctctctgaagcagctgctcaaactgtggaccagacttattcattcggcaggtgtttcctgagcacctactgtatgccaaaggagatccaacagcaaacaaactaaacagagcttacattctaatgcaagagttaacaagacacatcgaatctatagtacataaaagagcagaaagtgaggaggagaataaagccaggaggggaagccaggaggggcgatcaaccaggagaaaggtggagaaaagaatcgctgggattttctatagggtggtctcattgggaaggggaaatctgagcaaagaaggtaaggaaaccagtcaagggggatccctggggaagagcactccaggcagagggaacggtgtgtgctaaggccctgaggcagatgcggtctcagcaggctcagagccgcaaagaggccagagcagcgtgcacaagagcagcaggaagaatgaacggtaatagggaggtggtggttggatggaccgtgcaaggcatgagcctttgaatgggaggaagattttggctttctgagtgagatggacaccaatagaggacattgagcagaggaggacattgagcatctgatttgtgtcttcataggacccctctagaagaatagactgaataggtgtaatgagagcagggtgtccagtaaggagtctactgcaacagtccacgcatgagatgagcccaatgaggagtctattgcaatggtccaggcatgagatgatagcggttcagaccagagtgaggaaagtagtaagtgctggtcatatttcaaaggtagagctgatacaagtgctgatggaactgatgagggatggtaaagaagagttgagaatgactccaaggttgtggcctgaaaaactatgagaatggattttctgtgtacagagatggggaaaaccatggttagaagctgtgggccgggtgcggtggctcacacctgtgatcccagcgctttgggaggccaaggcacgcggatcaagaggtcaggagatcgagaccatcctggccaacatagtgaaaccccatctctactaaaaatacaaaaattagcggggcatggtggcacacgcctatagtcccagctactcgggaggctgaggcaggagatttggttgaacccaggaggcggaggttgcagtgagctgagatcgcgccactgcactccagcctggcgacagagcgagactctgtctcaatacatcaataaatcaataaataaagctcagttctggacctgggaagttgcaggtgcctgtgaaaagccaacaggaactgtccaataggcagccacatcagtcagacgttgaagagagaggcccaggcctgggtggacttagagtagggcacggtggggatcgtatacaaactgtgtgcttgtttgtgctttactgaatctgagaccctccccagatcctgaaagttgcaggaatacagcctggagaactgtccagtgggagaggcaggcttttgaaagaaagatgtagcagaggtctggccggcctcctgttttccactttccatctgtgaacacaaggaaaccacaccctgtgccacagcctgatatccaggagatcaattccaaatcgcaggctcaagtactctctgtaggggccagatggctggaagcccaggacaacatacccagattccagacaccagatcagtggtaacttccagctcagcctctctgagatcccacctcctggccttctagccgctgatcactagaggagaaaaaacatgtggatgcaggttatctcaggaagaagagaggctcattcggacccacactggtgttcagcttgccaagcacattcctgtaagatgattttttttcaattcagcaacatttgggagatcacttgagttctggaagttaagtgtatcaggattaggtttggctgcatgtaaaagaaaacataaaataacagtggcttaaacaagacagaattatacaaatgtctggaggtaggcagtctagggctggcttggtggcttcaaggttatcagggacccaagctccttctctgcctttctgttccatcatacttactgcgtagcttccatctgcaaagtcaccttgtggttagaacagctgctggagctccagctctcatagccacactctaggcagcaagaagaaggaagcagaggcagaagggcaggaaaaagaaaaaaaaaaaaaccacttcagaagtcacatgcaacacgaatagatcttatttacttagccacatgatctcagcgagaattataaagcacatgcaaatttgaatcattggaagacggtttaagtgttttttgctaaggtgtgagcaagtgcgaggaaaccactagggatagggcagtgccccaggctaattagcaacagtgggacaagaggttactggaacccagggacacagagggtcaccccacaagagctgtcaccctctgttggcaccacagagaggaaggtggaggaatctgtccaccaacctcactctcttctttctccgatctcctgccaggggcccttgtcagtcaaatccaacccaaagcccagagagcgaaggggcttgttgaaccagcacctccaggccagtgccctggggtggagaactggacagagagcagggctggaaggcggcaggcaggctcctggcacatctttggccataagggaatctgggaaatgtttcctagctgggtgcattgaaaataaagtcacagcctgatcagaggaagaaggagaaagagatatttgtgggcaactgagggtctcagcaacaccagagatcaggagcaagggtcccagtgagggcagctcccctagcagtgggaagtggggttgtgtggcctaacactggggagacctgtgtcatgaggagacattcatgtggaaacccgaggcaggagcactgcaggcagaagcacggcacgtgcaagagccctgtggcaggaacaggtttcccaggacgttggaggagggcagcaggacatgggaatgaaggggaggaggatggggaagagggcggcagagagcagacaggggagacctggtggtccccagcaggccatgcagcagggtctggatttgattgcatgcccgatggaaggtccccagaatgttctgagctggtcagctatgcgtgcatgttctcagaggcacaccccggctgtaggtgaagagggtggcccagggacaagagcggaagcagggagatcaggtggtgtttgcagcagtccaggtgggagatgctggtggtacggagcaggacggggcactgcagagcgagagaggtgggtggattccggtgctgcttggaaggtcggcagggtttgctttatggatcgtgagtgggtgggtgagggaagaggaatcggggatgactcctaggtttttggctgagccgttgggcagatggcagtgccatttacagagatgggaaggcgggggcaggaggaacagattgggagaggtggggaagggggggacattaggttgctttgcaaacatcacccaccaggcctgtggctgggcagcagctctgcgtagccccttctgaaaagtggggaaaacaccctggaagccctgccccattgaataaatatcccctcccagggatggtgattgtagcattttgagttagaggaatatttctgggtggagtttctcagagaggaaatgaccaatcattgcagagcctcgtcaattacacccaagccctgccctttcccacgtgtgctctgccacctctctgctatggttgacgatgaccatagcagaattttctcccaggaacttctgcaaccagaggcagcagaaagcaacggagaaaaaattaactgcatggtctctctgacaacccgatgcttattaatagaatctcagtcctgcctcctcgacatctgcctaattgattttgggtttaggaaccgatttggagccttggcttttcgtagctgaaaccagcaataacatttgtctttattttgtaatgtccaagagtcaggaatggttcacctttgcaccaacaaaagaaaaacaacaacctctgagcaacaggtctccagaatccagtgtaattattctggattgagttacaggcacagcaagagttgccaccagcagcagtgagcacatctatactaggtgaaaaataagagattccctttttatgtgtgtgtgtgtgtatatatatatatatatatatatatttttttttttttatttatttaagttctagggtacatgtgcacaacgtgcagttttgttacatatgtatatgtgtgccatgttggtgtgctgcacccgttaactcgtcatttacattaggtatatctcctaatgctatccctcccctctccccccaccccacaacaggccccagtgtgtgatgttccccttcctgtgtccaagtgttctcattgttcaattcccacctatgagtgagaacgtgcagtgtttggtcttttgtccttgtgataatttgctgagaatgatggtttcgagcttcatccatgtccctacaaaggacatgaactcatccttcttttgcccaagtgtggctcccgatttctgctgtttgtgccccaggcctttctctcccctctgctggagacagagctattctggggcagttggtcaggtctgatggagcccagcctgctgcagcccattagcaggtgttgccttggtcatggcagggagctcacaagctgatcctacagcactgcggacattccagggacatttgagggccaggagagggctgctgaatgagttccagcctgttaggtggacaccagtagccagaggtcagtgcaggacacaggttctttcccgcctgtggctcgacctcatagccctcttcatcccccacctgtccaggtcaagactctgttccaacctgtacctgaccccacagcctctcttccccactgaatgcctgttctctgcaggtctctgggccccagtagagcgttacctttgcagatttatttagctgctcccttcacttggaattgaatcagctaagggttgcaaactccatgcccacagggctaggcacgtgctggcaaggaggaagtcggcatggtaggggtggtggaagaccagaggaggaccttgtcaagtgggccttcgctactcaggtccagcccactgtgggcccatcaaagccaggtctttgcatttttcaagcaaagccagaaagctgaattgatgtgaaatctcgcaattaaagaaaaaggccattcaatttttaaaatcctttccttttgggcagacctaaatcaaacacacatgcagacaagatttagtctagagggactccgttttttaactccgcgtgagacgatacttgttgaaaagctgacatgtggccgggcacagtggctcactcctgtaatcccagcactttgggaggtcaaggcaggtggatcacttaaggccaggagttcaagaacagcctggctaacatggtgaaaccccatctctactaaaaataaaaaaaattagccgggaatgatagtgggagcctgtaatcccagctactcaggaggctgaggcaggagaatcacttgaacccaggaggcagaggttgcaatgaaccgagatggtgccattgcactccagcctgggtgacaagagagaaactctgtctcaaataagtaaataaataaataaaagctggcatgcattaagtgctttctgtatgtcaagcattgaactaaaaaagtgtgtgtgtatgtgtatatatatatatatatatatatatatatatatatatatatatatatttttttttttttttttttttttttttttccctcaaaactcagaacaaccctgagaaggaggcactgttattctcccgctttgcagatggggaaactgaggtgcagggtggctaaatcatttgcacaaggtacctggttaataggaagtggcagaaatcaagatttggaatcaggccttctgactgaaaacctttttcatcctattgagtatggtgacatagcgataggttctagaatctatcctagaatttcatagtcaaaccttatacctaaagttatttatgggctgtgtttttacagacagggaagctgaagctcaaagtcagtgatttacggcagttcacacctcattcttggcctctcaattcagtgctctttggcacccaaagtctacagatgaaaaaggacctggtgattcagtctaggactgaagtgtatatgtgcatctgtttgtgtgtgtgttatacacacacacacatattcatttgtagcagctgaacccttttaacatacaaaacaaaacaggtaagagaggaatcaggagaaggacgcggcctggagaggggtgtgtggtgcccccttcatcctcagcctgccccatgccaggtggactttaatgcccctctcctcaaggaaagaaagcacagcttgggggcccctgggagcagactggccccaggtagagtgtagcaggtgatatgtggccacaacagtggccacagtggataacagtgttatcccaacactgggaggccaaggcaggaggatcacttgagccctggagttcaagaccatctatagatttttcggtcatctatagaaagcccactgtgtgccctcttcccctaaatcccagggcctgcttcacataggggtagcacacagacaggcctgcagacccgtgcaggaatgccaagtgccaaatcctgccctctcccattgttctagaaacctgtggccctcttgctgcatttatttattttttatttattcaggagttcaagaccagcctggtcaacatggtgtaaccctgtctctactaaaaatacacaccaaaaaaaatagctgggcatggtggtacttgcctgtaatcccagctgctcgggaggctgaggcaggagaatcgcttgaacccaggaggtagaggttgcagtgagccgagatcgcgccgctgcactccagcctgaaagacagagggagactccatctcaaaacaatcaataaaattacacaagcaaaactttaaaatatccaagtaatgcaaagcagagatagcccttgactccccacccaccgtgtaccccactcaccccaaaggcacctgcatgtcccctaagaatctgtagcctgcatgtcccctaagaatgtttactcttcatttactcacacggaagcaccaggaagagcagcaaaaggcaagaaggaaggggagggcatgattctaatcagcacagtccagagaaagccttgctgagaaagtgatatttgcagaaacctgaaggcaatgagggactgagtctgggctgaggagtggcaggtgcaaaggtcctgaggcagaagcgtgcttggtgtgttcgaggaacaacaaggaggaggtcaatgtgactggagcagaggaagcttagagagagagcgcacagtaggagttgtagttggggcgagtgagcatccggatcactgaggaccttgtaggacagagggaggactttgatttttactctgagtgaggcgggcagtcactggaagacaaagagcaacgaatatgatgatttcactgactgttttaaaagaagtcctggccaggcaggcatggtggctcatgcctgttatcccaacactttgggaggccaaggaaggaggatcacttgagcccagcagttcaagaccagcccgggcaacgtggtgaagccccacctgtacaaaaaatacaaaaattagctgagtgtggtagtgtacacctgtaattccagctactcaggaggtggaggtgggaggatcacctgaacctggggaggtcgaggctgcagtgagccgtgatcacactactgcactccagcctgggtacagagtgagaccctgtctcaaaagaaaaagcctctggccaccaaacggagaatagaacagcttgggagcctactgcaatagtccaggcagagaaaacagtgattagagtgaatttaagtcaaggtcctgtgtttactgactccgcctttatttttctccctgccccattcttccttctgctgctttccctaggaggccctgccatcacagactctaataatatctataattttaagaaactagccataggaaggcatctcactagttatacatcaaaatcacccaagttgagggccgcagggatttgtctgggaggggtacagggttcccctgctcccagctgaagcaggcctccaacagataggagccacctaagcctcaggaatggcaaaaaaaaaaaaaaaaaaaaaaaaaaaaaatcatgttttgaatcctgaaactccctggcaccttgctaagtccccatagatagtgtttgctctgacttagacctttagaagagcaaattcattcagcatttcctatgacactggcaacgtcgtcatctgtggcaggtcagcaaaatattgattttatcaacgatggacttactggatggtgcatccaaaaatatatatatataactcacaccttaattctctaactcgacgtagttaacttggattgagattaaagggttttttcttaaatcacgttaaatacaaatatcaaacaaatcatagcacagtggtacacaggcccccaaaaagccaccgtgaatggggaggcagttcaggagtgtcatgggagaaactgcattctagcagttgggtggtttgggcccccaagtttaaatcccaacagatgggcctgggggtgaggcctctccagcccatcagagtcacagaggtgtcagagtgacctcaccctcaacccagtatggtgggaaggtttggtcatggaaagaaaccgggtctgtttttgtctgcatgtccccaggtttatgttggacgaaagaagttgaggttggctggcccagctgcattgaaaagcttgaaaactggccttttcatttctgtgtggccgtgtcgttcaggtccttccctcccgtcggagctgtccttctgcattagggctggggctgggcaaggggatgagatcatatgtttttgtgttacagaggtaggtttacacagcctcgtcgctatggcagttttaataaagcaggttactgtccccaaggggaggcttagcacatagcactgcccatgcacagatgctgctgtcattccggggcactgttgtcctttactcgtggattgacacagcgctcctccgccagctgatttgggaagggtgagtgctggccaagagcacctcacagctcgcttcctctggaatgaggaggaaggagatctaagcatttcgagaccctggatctgagcccattaaaaacaagaaatggttctggaggctgttcactgtttgccaaggcagcactgggggctgcggagtgcaggtgatttcatcaggtgacggcctgccctgcgttcccttccaggagaagggtctgaccagttaggtgggtggccagcttttgtcctttctgcagggtctggagaccgagagaggctgagctctcactaccagctgcttcgtcctttctccttcgtgtttgggactagggagcaaaggatcgattccacttggggtgccctggactcgtgcatttaagaaatatttatgagcacccactgcgtgccaggcactgttctaggctgagctgtggagccatcaaaagtcacagggaacagcaaacgggatcagtagataaaaacataaaagtatatcatgtgttagatgatgagtgcagggttgaaaatgtcaggcaaggaagggagtagaaaatattgggggccagggaagactccacggagaagggaacttttgagtaaagacaagaagggggtgagggcaccgctgcggggctccgggggagaggtcttccaggcagaaggaacagcagggcacaggttctgggatgggagcacgcctggtcagtctgtggacagagcaggggaccctgtggctgcagagagtgggcggagagggggatggggttagggaggggaggggattgggtcccaccacactctgtggatggccagaaagatttgggctcctctgagtgagcaggagccccggagagtgtcaggagaggagactctggctacaccgtggggaataagtgactggagtccaatcaggaagcaactggcctgatttcagggagagaggatgatcgcctgacccacgggggaggtggcaagggtacgatcgtgggtgtttacgttgaagagagggcaacaggctttgctgatggattggatgtgggaactgaaagatgggaggaaccgtagccaagatgattgcccaagtacccggaggaaaggggagtggcttcgggaggagcaggagggacggtgacatcagggcttggctgtgggtgtggcacctgaggtctaatcgacagccgaatgacatcaatggatgtcagggttgtaccaagccacacatcaagggatgtcaggtccgggttttaccaagccaatgattgccaaattctaatcattccctcacaattttcatcatatatctgtgtgccacttgtacgattatttactttttaaaaatcggctgcaattgtttgttgttgttgttgttttaagaggatttccaccaccctaaaggaaaagctaaggttacttgccctaagtagaaggaaaccaagccacgcaattaatctaaggcaatgccaccccctgcctggagctcccagtggcctttcacaccaccagcatccctggtgtttggtgatgtgaccctgggccacccccacccctggtgtgcctgatgaagtcaccactagaggacccccttctgggtcaccaagggaccattctgagcttaactgaagccaagagtggaccaagagcatggggacctctatgcacttcctcaggacactgttaccacctcccgtgtgactgtgacattttgtgaacgtgaaactcagcaccccgcctctgctaggcttgagtcttcactgccttcccagctgtgcagccttagccagtcattcagctccccaggttcagttccctcttctgtcaaatgggccattgggagaattaagtgatgaatgtcttcagcccagccataagcattcagccagtgatagtcgccactattaattataatgattattactggcatagaagactgccctcttccccaggaataagttggagtgctctcagttccttagctatatcagaaggttgcaacacccaagccttcaggggtcgggcaggtaatgagagtgggtgcaggtggtgtaagactgtagggagcacgggggagtgtggcaaactggagagcacatatcctgtgtgatgctatttaatgtcacatttttaaaacccactctacaagacaccaacacacaggtctgtggacaccaactggtttggattcctgagatatgaaaacccgagtgtaagatagtattttatatgttaatttagctggtctctgttgagcacattatgtgccaggcactgtgctaggcagtgaacaaagtaggctgagtctctgcccttgtggtgaaggcagcaacatacaaataagtgaaatcaaaatgacttatgtttgaggacagtaactgctgtggagagacacggagcggggaagcagagtggagagtgctatgggttgcgggaggtggtttcaatacaggccagggaaggcctctccaagaaggtggtgtctgatcaataacttgaaggagacagaggtagccctgtgattggaggagtgagagcatcccaggctgggggtacggctgaggcaggggccaggaggtgggagggcggccaatgtgcaatactgggacctcaggggcacgaccttggtgccttgattggtggtaaaaatttaaagtagaagcagctgattgctgagcagagggccttccccagatcccaggaggctgcagtgggtctgatgcttgttttcaggtttctagggggttgctaggtgattgggatcacagccttcacatgcctggtagaccctgttttggtttcccactgctgtcctaacagatcacaaactgggtggcttaaaacaacagaaatttactctctcaacagttctggaggccggaagtccaaaatcaaggtgttagcatggctgtgcttcctcagaaggctctaggggagagcccttccttgcctcttccagccctggggaccctaggagttccttgttccttggcttgtatgtgcatccctccagtctctgcttccctttgaatgtggccttcccctctgtgcctgtgcgtcttctccactttgtgtcctatgtggacacttgtcactggatttagggcccacctggggaatccagaacaaatctcatttcagtagcctcaatttaattacatctgcaaagacaccctgtattggtctgtcttcatgctgctgataaagatatacccgagactgggtaatttagaaagaaaaagaggtttaatggacttagttccatgtggctggggaggcctcaggatcatggcagaaggtgaaaggcacatcttacatggcggtaggcaagagagaatgagaaccaagcaagagggaaaacctttataaaaccatcaaatctcgtgagacttattcactaccaagagaacagtatgggggaaacaacccccatgattcaactgtctcccatcagatccctctcacaacacgtgggaaatatgggagccacaattcaagatgagatttgggtggggacacagccaaaccatatcaccctctttccaaatatggtcacattcacagcttccagaaattaggacatggtcttatctttaggggacgggggcaccgttcaacccactgcacaccttaagaactgcaaggaaaaggggaaaaaccaaggatggccatagaagaaggagagagggtttccatggaatatttccatcaaatcactaagggtctgggtaccaaccacagcatacaattgagcatgcactcgtcacacctatgttgagtacccactgtgtgtcacacacggcagcagtgctgaggattcagcgctgagcggagcacacagcctttgccctcctgggaccttggcctgcacgcagtagggctcccacacacgttcatttgcttccttccttccttcttgcctttcttcctaagtgtcttgctctgcttacagcttggttgagaaacaagagcaggcatggccaggcaaggtggttcatgactgtaatgacagcactttgggaggcagaggcaggcggatcacttgaggtcagaaattccagaccagcctggccaacatggcgaaacgtcatctctactaaaaatacagaaactagctgcgtataggggctacttgggaggctgaggcaggggaatcgcttgaacccgggaagcagagattgcagtgagtcaagatcacaccactgcactccagcctgggcaacagagcaagactctgtctcaaaaaaaaaaaaaaaaaaaaaaaaacaaagaaaagaaagaaacaagagcaggcatgaccgaaacctcgaagcctggggtatgatcagtactcaggacacatgctgcaagactgctcagagctctcaagcccagggtggtgccagaggctccctacgagagggtactaggccgatgggttggatttggggtgaggggtggtgggttccaggctcgaagaaaagtgtggacaagaggccagcagggtttgtggctgatggcagagcacctcagccagggaatactcagggagaaggtttgccaccaggttggcatgaccagatttcagtaagagcaaacaattattgggaaagttccaaagaaaagaaagtataatcttccctcaatttacatggtggttggtttccaaaagaaaaaacaaaacaatgtatattaataccctgcaaaaacaatgttgtgtttaaaatttgtaaaacagtttgattccagtctcaggtcatttataaacaggtttttacctgccttgcaggtagagatgcaattacagtaccggacagtgacagtacagtcacttacagtcactcacctccagcaccattgcaaaatcctccagactccagacctggacctcaggagtgtccaggtggactcgggacccagggtccttcctgattatgcaggacagtcccaccgtgcagcagtggcccctgccccgtctgccccgtaggtctgcagaatgtgcccactccagacctagggatgccacgtgctgagagccccctggtgccggtgccgcccgggtctcctgccctgcgccttacttccacccttgacttgcaggttccatgcaggtgatgaacaagacccggcgcatcatggagcagggcggggcgcacttcatcaacgccttcgtgaccacacccatgtgctgcccctcacgctcctccatcctcactggcaagtacgtccacaaccacaacacctacaccaacaatgagaactgctcctcgccctcctggcaggcacagcacgagagccgcacctttgccgtgtacctcaatagcactggctaccggacaggtgagcagggacgggggcaggtgcaggaagggagtgacagccagggcgggcgtccctaggtgtggtctgcacaccactgcggtacccaagttgattctggatagcccctagagcaactctcttataatttcagagttgtgcatttatttctgtgtgtattaaagaaatacagatttatttgcctacagtagtgatgtaaagtgaccttgtcaaaggaatttgagtcccccaaaaaagtgagtcttttcaaactatgaatcatagtgtggagaggccataaggtgcccatgcatgagtttgcatcctctgttaatagttattaagcccatcagggactgtttcgttgacttcaaaccattagcttggaagaaggttccaaaacataggggtgggggatgggaattcatggaggggaacagataatggggctgtgtggtcgctttctacgtggcagtaaccaaggtggtgcagaaactgacatggtggttgactgtccacactcacccgtgtcatcctgggtggagggcgacccagttcctgtttgcttatccttcaggaggtctttggtgggctctgaaggctcacctgccaggctggttgtctgaggtagagatgcaattacagtatagtcacttacctgtagcgccattgcaaaaccctccagactcaattcatttaacttgctttaattaaaaataaataaatactccccgccttgggtaagaagccgcggcggttgtgaaatcaagatattgtggctcagatgttgcaaccccaggaagttgcatccaagtgacaaggggtttgtttgggtgggagtgccgcaagggaaggatggactcctcctccagccctgtccgcagtgctggacctgcagccctcgaggctgggcagcttcctctcagatacacagtgtgggctggcagggatgctttggtgtggggagcaagccagtaaggtgtgtcttcttacagcctcatcccatagccagaatcacctagaaagtatgttctgctgagaactaggaaggcctcgttcctataccttgttcctgtgtattgtgcgtgccattatgcagaatcaaccacctgttggttcccctgagcctctgcagaaagccacatgtgtcagaagttaccatggccaccaccctagatgattggcgggggcctggatgttgctagcagaagcaggacaggcaggcccgcagcacagcagtgggcccttattgaagatgcacctgcaacttggctctagaaagtacagccatgcactcaagagtgaccagccttgaaatgttttaaagtctgaatatttcactgaaaatcttattttaaaatatgccggcacagcttattttttctttaatgtatactgggggccaaagaaaatatgtctgaggagtgagtgtgtggctcacagactctcttttcacaacctctgggtgaaaggtctgtacagaaacctttcgttttggatgctggaagatcagtaaagaccctagacctgttctcatcaatccccctcatttcacagccagggccactgcagcccaaaaaagagacctgcccagagtcaaagtgaggtgtttgtggcataatcaaaatggaatgcaagatcatgggaattcagagggggcatggaaatagtattcatcagactgaaaggaaactcatatattctgtgccattttgagggctcagggtgggagctaaaggctagtgtttcaaaatcttacaggcgacatgagaaaatcaatcatttcaagaataaacattctctaaagtggatttcccaaacttgtccttgaatgtatgcaaatcaccaaaaagctgtctccctaaataagtgcttttattcaactatgattcattattataccctcatgaagactgggagcgtaatgtcaagtgtaaagagccagataccgagaacatttacgtttttgtaaaactgccactgagaattttattcattatatttagaatgccactctgtacaaagaatcccattccagccttactttcagaactcaggaccctgaaaacacctgtttagtctgatgaactggtgtactccttgttattacataataagagccacataccctgtatagtttccctctttgccctggcagctaggaagctcaggtttgagttttatattgagttgttgtttaaagtggaaatgtttttaaagatccaactgcgtgatatgttatactgatcagtgttgactaagaaaaatgacaaaaatctataatgaattcaaaaccttttagattattttttccttttagattgatttgtacatacatattagaatatactgtaaatttttaatcccccaaggaccaaaagtaaattgttcctgctgagtcttcagccatgttaaaccctgtgttcacgtggccacctagcaaagttggttcagttggatttaagtttggctgtgtgtgtgagagagaccggggatgtcaaataaaattccaagttgttctggtggccctgctctatgaagtggtcagagactccgactccatttctccttatttcccattggtgagaaacaagtcatatggccatgcatggcagcaaaggggcctgggaaatgtagtcttattctaggtggacatttgcccagatgaaagttattttactgtgggagaagaagaaaacggatactgaaggacaagtgaagtctaggccaccctaacagttattagccatttgtgtttgtgatactcgtttgaatagaggagatcagcccaaactgaggaagactgaccccagaaaaatgctacttaagtggaccaacatttcataataaatagtgcttttaatgtatttagtaaggtatttgatcttgaaatgaaactacaatgtttcgagaataactctgttatgttacatctctttttttctttttctgagacagagtcttgctctgtcacccagactggagtgcagtggcacagtctcagctcactacaacctctgcctcctgggttcaagcgattctcctgtctcagcctcctgaatagctgagattacagacgcctgccactacgcctgactaatttttgtattttttgtagagatggggttttgccatgttggccaagctggtctcaaactcctggcctcaagtgatccacctgccttggccttccaaagtgctgggattacatgcatgagccaacgcacccggccctctgttaggttgcatctaatgatatttaacaaatattgggctctagttgcaactaatgagttgattcttcaagcaagtgaattgacgaagtgtagggaggaatataatgtgtttcacaaattgaaatggatggcacaagatgatatcctttacttcactagggacatttttgcaaaagtatttgaggatttgatcaattttttcaagggcctctcctaattctctgacatctgaatcttcccctgtgaagtgcatctcatacttcatcatccttctcaatagtctcttctccttcatgtagtatctttatagaccaggtaattattcgtcagtggatttgcatgtgttttttgagctatcttccagcgtcattttaattaattttacaaaccctgcatcttttaaaatatttgcaatttcattttgcagtgatcttgctttgcatggccccatgtttgcagtggagattgacaaaagacaaaatgagagaagctaagtttaagcaggataaatatcaatttgttcatgaatatttctctgtatggcttcttacaacttgagggacttggatctcagatatgaatacccttggaaggatcaattgcatcctcaggttttttgttttctttgtttttttgtttgtttttgagacagggtctcactctgttgcccacgctggagtgcagtggcgtaatctcagctcactgcaacctccacctcccgggttcaagcgattctcctgcctcagcctccccactaactaggattacaggtgcgtgccaccacgcccagctaattttttgtatttttaatagagacggggtttcaccatgttggccaggctgacctcgaactcctgacctcaagcgatccaccctcctcggcctcccaaagggctaggattacaggtgtgagccactgcacctcgccacatcctcagtttttacaaaggttttatagtcatcctttaacacagttcagcagttgaagtgctgttgccctgcctgtgatcacttatatatccacaagtcaaagttgtacagtgttcccagaatgagacacctcccagctctctgcagagtggttgagggcattagctttgcctgggtttgaatccagtctctgctgctttctgcctgcatgaacttggacaagttatttagcttctgtgtcttggcctcctcaaccacagttaataatgtcacttaactcatagagttttgtgaagattaaatacattagaacagtgtctggtacatggtcgtggtaggcacttgggaaatttagcaatgatggctgggtgcagtggctcacacctgtaattccaacattttggggggccaaagtggaaggatcacctgaggccaggggttcgagaccagcttgggcaaaatagtgagatcccttctcaatttttaaaaaacagtaataaaaaaaagttagcaatgacgatgacgatttgcacaatagcacaacatcacacagcccacctcaggccagtgttctgatgaatgtcatggtaagttgcactcatggatcaaaatgtggcagcatgtgctcagcctctggtaatcagcaaaatgcaaacgcagccaacagtgcattatcacatcccagccatgaccacagcaaatatgaagaggtcccatcgcaccaaatgttggtgagaatgtaggaaaacaggaaatcatatgcgccagcagcatgatggtaaattgttccctccactttgaagaacagtttgccaatttctggcaaagctgaaaatggacatctccttctactcagcaattttactctggctgtgtccccctcggttctgaggaggtgatgttgatgtgtgagttctgcttgagcaagggaacacacttcctggctgccctgtttgctcttgaagatgtgtgatgctcatggcaatagattccctttagatccaacggacaggaaccccgactgcagctggcttcaaaaacattgaattttttgctccctaaacaggccaggcacggtgactgaagcctgtgatcccagcactttgggaggcagggatgggcggatcacctgaggtcaggagttcaagaccagcctgaccaacatggtgaaaccccgtctctactaaaaatacaaaaattagccaggcatggtgatgtacacctgtaatcccagctacaggggaggctgagacaggagaattgcttgaacctgggaggcggaggttgcagtgagccgagatcgcaccactgcactctagcctgggtgacagagtaagactctgtctcaaaaaaaaaaaaaaaaaaaaaaagagaagatacaggtgagtagcaggcagagtcggatcttgtggtttacgagtatcatgatcatatcacgaggctggaggtctggacatggtggctggcactccagcagctgtgtgcctccttgtccacatctggcaggagcaagagagcatccttttccagaatgctcaaggcatgagatcccttctgattggaccaccctgagtcacatgccagcccctgagccaatcatcatataaagcacatggtttgtgccaacttgcccagcgtggatcacctgctctgcagcagctggctgagtccctttttccccagcacttggactgccaggtagaaatcaagggctgctggaaagaataaggaaaagcatactggagtgccgatcacaattttactacactgcctttggcaaacaaaaaacaaaaaaaaagtaacatcagctggccgggcacagtggctcacgcctgtaatcccagcactctgggaagccgaggagggtggatcacaaggtcaggagtttgagactagcctggccaacatagtgaaacccgtctctactaaaaatacaaaaattagctgagtgtggtggtgggcgcctgtaatcccagctactagggaggctgaggtatgagaatcacttgaacccaggaggcggaggttgcagtgagccgagattgcaccactgcactccagcctggtgacagaatgagactccatctcaaaaaaaaagtaacaacaacaaaaaggcaaccttttccagctctttctggtgaactagattggagtgccattttctccccattgggataatgcctttctccttccacacctgaatctggcagttctgaagttgtttcccagccccagcttctgccatccggtccagactttcgcagagatggtggcgggccctctgcccttctgcatcatgttctaaaatgcgtcaggggagcagggggtacatgctccttacaagaccaggccttgccagggctctcagttggagcctgttttggggtttggccctgagcgccccagttattttcactcttctcgcacaaagctgggtagagaggtcagctgaggaccagaacctggccatcagccttgggcagctaccctcaccagggtctggggggcctctgtgtcctgatgaccccaccccatctacactacactacacttggggcaccccatcgccctctcacacaggaggatggaaaggcgcccgctaggcattttggcatccccaacaaatgagacttgttttttccctaaagcggtttcattcaggaccgcaggggcaggagggctgctgcgtgggccgtcctcctctgcaatgctataaagtggcccaatgcccctctttccctgccactctctggatctacccttagccccttgccctgaaccccatccaccctggcccctctgcctcctggccatcgccccagagctctccccagcacatcaagcatgagtccagcatcacttcctggtcccccgcctccccggcgcctctcacaggcttctcctcggcacctccagttttccagttgctcaggccaaaaccttagcaccattcttgattttttttttcctattcctttcacactccacattcagttcatcagcaaaccctgtcagctctgccttcaaaatatgcccagagtcccctctgctgccaccagcccatccgcgccactgtcttccccgcctgccctgttccaggtttctcctgggatcccccagcttctgcgtttatgaccccttggtctgttttcaatgcagcagccagaggggtctggtcagaacctagttcagatgctctttctcctctgggcagagccctccttggctcccacctactcagggtagaggccccgacagccacctcagggtcccagtgatccttcccttctctctgaaccctctcagcctcctggtctcccctcagtcactgtcctccagccacagcttctcaagcagtcagccacacctgacatgcacccactcacagtgctttgcacttctttccttttctcaaaacttctacacgtctgcactttcctcgtgtctgtgttccaatgctgcctcctcaaagaagccttccttgactaccccatgcctcctgttcatcccagttttttcccaccagtgcccccatcaccactgaacaccactgactgtgtattctgcccatttgtctcattgattgtctcgtttctaaaatgccagctctcaggctgggcgtggtggctcacgccagtaattctaacactttgggaggctgaggcgggtggatcacttgaggtcaggagtttgagactagcctagccaacatggtgaaaccccatctctactaaaaatacaaaaattagctggatgtggtggcgcaagcctgtaatctcagctactcgggaggctgaggcaggagaaccactggaaccagggaggtggaggttgcagtgagccgagatcacaccactacactctgtcgcttgggtgacagaatgagactctatctcaaaaataaataaataaaatgccagctccctggaagcagcggcctctgttctgtgccctcgcgggttgccaggcctagagagtgcccaccccatcgtaggtgctcaggagaccttcccaggatgactggtgactaagtctccacattctgtccccgccagcagcccacccccatctcttccacactcctttctcctctcccgtttctctcctctccacccccactcccaccatctcagcctttcctcctctttcttctcagcctctctgcacacacagggaagagaagactgaaattattcccgggatgccgtccctgggcccctggtgcagctgtccctgccttcacaatggcagccttctctttgcttggctcttctcctgggtttgctccctgctctcttcctctctccttgagtgcacacaagtgtgcacgcacgcacgcacacacacagctcccttcttccctcggtccagctgcctctcatctgcccatcttccctccccctctccggcctgtggggggacagcagagcctctccattcaccccgtggagtgtatccactgctcacagcaggtagccttcctgtctctctgcagcgaacacccagccttccccactgtggggatccgagtatccacgggaattgcacagcccctcctgggacccaggctgacccagcgtgtcctcgagaggcacggatttgccgcctccgtgcacatcttcaagcgaaatttcttcctctaatttgatagtcacttcctttctctaagacctcagatttcaaaataagtgaagcacttgttttgagcaagagtctaaagaattagactccgccttaagcgcccttgtgaccttgagctgagacctcatcccctctgggcgtcagtctctccatctgtgcagcagtgttgtgacatctaagcactagtcacccagtgcctgtgataagacgccaccctgagtgatacgtgacctgtgcccacaaacccaggaggagaggttccctgcgccgtaagaggaagtggccacggggaaagaggaagctgatgtgaggccgatggggcagggtttccgattgtttccaggcgacaccctctctgtcccacccccttagcaggtgtatccacttccctagtggaccacagactgggtggcttagaacaaaaggcgattttcacagttccgggagccagaaccccaaaatcaagcatcatcagggccacgctttccctgcaggcttcaggggagggtcctttgcccttgagttcctgggggttgctgggaatcttggcaccccttggcttgtggccacatcactccagcctctgccttcatcttcatgcggcctcctccctgtgggtccctctcttcccgtggcctgctcctctctgaatcagtgtccaaatttccctcttctgtcaggacaccagtgattggactagagcccgctctgatccagcgtaacttcatcttacaacaccatgttacaaacacggtcaccctcacaggtacctgggcaaggacttgagcatatattttggggaacacattcatctcgtgacggctggtttctttcacacattaaaccccgcccccccccataaaggctgcagagccgatgtcaaactgagcaaacctgccgctcttcccctcttcactgccccagctgtggtcctgggtggggagcagtgtggccgccctgaagatcagctccatgcgtagccttcccttcccaaccatggtttctctcaaggaatctccacctgcagtgggcgttgaaacagctgcagggtcaaaagtgagggaagggtgactgtggtgacagacaggcacaccctgtctcctgggcctcaagaggcttccgggggtttcagagtgcatgagaccttttgtagtcctctcctaggtgctagctgtgactccctgaacattctggaatgagttaggctggagccaaatggcccagtaccgttgccactagccacagggagctatttaactttacgttaattacaattagcatttcagtttctcaggtgcactagccatggttcaggtattcagtaggcgcacatgggttctgtactggataatgcacatagagaatgtttccattggcacagaaaggactcttggacagcaggagaatagagcctatggctgggcctgtaatcccggcacttggaaaggtcgaggcaggaggatctcttgaggccaggagtttgagaccagcctgggcaacatagtaagacctgtatctttacaaaaaatttgaaaaaaaaaaaattagctggacatggtagtccatgcttgtagtcccagctacttgggaggctgaggcaggaggatcacttgagcctaggagtttgaggctgcagtaagccatgatcacaccactgtacttcggcctgggcaacagagtgagaccttgtctctaaaaaagaaagaagaataaagcctaatcaaacaaaatcttttgggagtggggagtgacacacagcactgagaaggggcaataaaaacgcagggggtggtggctgtcgaactttaggtgagtgctttccgtgattcctcatctgtaatccaatctcctcctcctcatccctgcactcacttccccttatgctcccagtaccttgatctgtcttcccaaaccttcctgggtctcgggtcagggtctcaggacaggttcctgttctccgagcagcagacaccatccatcccggggccagcaggttgtgccagcccacacagcgagtcctttgggaatccatccgtgtcgcaggggatttgagcaaatgaagggaaaccgagttcctacaccgaggccgggagcggggcttcctctgtcatccctgtgtgaacccgttctagcctgggggctccaaatgcatagagggctggcaggtagcccaaagcagagaggcaggctgggtggggagggggtgcccagatttcaactgtggactgttcactctactttttaagaatgagcaactgaaaacaccgggcaggcccacagcaaacacacctgagggatggattggtctgcaggccaccggcttgcaaacttctttctaagctggtggttctcaagggagcacaccgccccctaggggttaaactctgtgactgcattgccggtgatggtgaaggatttgactttgctggcttcctgggggcggagactaagaaggactttgatgtcctgctctgcacagcagagtccacgtggcccccacattgcattgtattccacatagcttctgagtttcctaccacatcactcatatgggtagattattttatgtttattgtcatctgagtcttgaacctacgtctattttatatgtaaatactggagggtttttgcatattcccaggaatgtacggaataagaaaatggaggcaatattatacttgagtgcaaaactttcccaagagtcattccttatttctgaaagtcccatccccgatgacagtgctacgccaaaggatttgaatggcaaatgtcgcccgcccacccagctgcccttgtaattgtcacattcccagtgaatctgtgtctaggtgcaggcgtctgcctgactactgtgttgtgccttcttgatggatgtgctgggggaatttcatattgaaatttatcttcattataaattgctttccttttattttccctgtagattgcagttagagcattatattgattttgtggaaatgacatgcataggtagcttttgttacctataaatttcctttcaagaaaacaagggcgctctacaaaatatttgtcatagaaatgggaggtcagtctgatggcgctgagaacagctctttgaaaggtgcaagtagtgtcagattcctccaaggcgataattaaatatccattgagtgacaggccttgttctgagggtctgttgtggattttctccccctcctctagtccatccctctgaacaaaaccacactttaaaaggcacaagacagatatttaagacacagcttgtcctcgtggtgactcagcaggcaataaaacctgtcactagagatggagccctccatacccagctaattgagtttccagggaatgaatgggcctcatcctcatttgcaggagctgcaagacccttctagggagcggatggctggagccagcatttaattaggcacaggcagcccgccctccatgccaccaacacccagagctccgcctggccctgctacaaccagtcagcagggccttggtgtcccccgcagcccagtcttcctcaatagccacagcctcactaaaaacaggcaggcggaagacaggaatgcatggagtggcaagacagaagcagctctcgcctctcgccctggcgatctgcttgtccctgtttgtccccagcaactggccattccttctccccacccacagccggaggacacttttaaaaattgtaaacctgaccacatcacttccggctgaaaacctcctacggctgcccactgctttttggataaactggcatctcctcgccagggctgccaagaccttgtttggcctgggtgtgctcacctctctgtccacatctcctatctgtcccttccttggtgacagcactcaggctgcctagcctctttgttcctcagaacttccaaggtccattcctgccccaggccctttgtatgtgcagttacctctgtctggagcactggcccacaaccattctggtacaagcaaccggtttcgtggaagacagtttttccacggactgggggtgagggatgttttgggatgattcaagcgcatttcatttagtgtgcactttatttctaatattatcacattataatatgtaatgaaataattatacatctcactataatgtagaatcagtgggagcccgagcttgttttcctgcaaccagatggtctcacccgggggcaatgggagacagtgacagatcatcaggcattagattgtcataaggagtgcacaacctagatcccccgcatgcacagttcacaacggggttcacgctcctatgataatctgctgctgatctgataggaggcagagctcaggcagtgatgcaagtgatgggaagcggctgtaaatacagatgaagtttgctcactcgcctgccactcacctcctgctatgcagcccagttcctaacaggccacagaccgctacctgtctacctgtctgcagcccaggggttggggatccctggtctagagcgttgttcacacactgcggagaacttcctccatccattctctcttccttcctgcccttcctgtgtcggttagtactcctcaaccctctcattctcgaccatgacacccggctttatgttcttcttaggacttctcgcccccttgaaattatcttgcatgtttgtgaacttttttttttttcttttttttgagatggactgtcactctgccacccaggctggagtacagtggcatgatcttgactcactgcaacctccaactcccaggttcaagcaattcccctgcctctgcttcccaagtagctggaactacaggcacccaccactacactcagctaattttcgttttttgttttggtttttttttgagacggagtcttgctctgtcgcccagcctggagtgctgtgccacgatcttggttcactgcagcctccacctcccaggttcaagcgattctcctgcctcagcctcccaagtagctggcattacagttgcatgccaccacaaccggctaattttttacatttttggtagagatggggtttcaccatgttggccaggctggtcttgaactcctgacctcaagtgatccacctgcctcagcctcccaaagtgctgggattacaggcatgagccaccgcacccagccaatttttgtactttagtagagacagggtttcaccatattggccaggctggtctcgaactcctgacctcaagtgatctgcctgcctcggcctcccaaagtgctgggattacaggcgtgagccactgcacctggcgagtgaacttgttttttacatgttttgtttgctgcccatccaaaaatagcaccaggcaggtattgggtactcagtaaagatttgaacaaggccaggcacggtggctcacacgtgtaatcccagcacttcgggaggctgtggtgggaggatcacttgagcccaggagttcaaaaccagcctgggcaacatagagagaccctgtctctacaaataattttaaaaactggccaggcatagtggcacacacctgtggtcccagctctttgagaggctaagatgggaggatcacttaagcccaggcctttaaggccgcagggagccatgatcgtgccactgcattacaacctgggcaagtgaaacctcaactcaaacgaataaaaaaaatgaacagatggagaactcttgggccttaggcttgaagtcagcaaaaaaataaaaacaaaatggaatttagattactatctcatttatccagcatgaagaaacataatcgaaattagttcaggcaaactttgccaggtcccagtgctcaaacgctgtcagaaccctgtctttctgcttcttgcgttttctgtcattgggttggctttattaggaaggttccctctttgtgatggcaagatggcccccacaggtccatctccccagtgtggtgaccccagctgaaagagaggcctctttccaagggctccagcaaaagttccagggaaagctctcattggctcatctagggtcttatgtctctttcacccaatcacagcagccaggcaaaaggagataccctgattgtccaggccaacctcatgggcctggtccaggattcagagctagaaagagcctcatcagaacatgtaaggctgagaaaggggaaagattggttccctccctctttggtgactgaaggcacaattatgaaaagacaggagaatggattctgggcagaaaaataaaacagatatccactatagaaacccacatgcaggccgggcgcagtagctcacgcctgtaatcccagcactttgggaggctgaggcgggtggatcagttgaggtcaggagttcgagaccagcctgaccaacgtggtgaaaccccgtctctactaaaaaaatacaaaattagccaggcgtggtagcgcatgcctgtagtcccaggtactggggaggttgaggtaggagaatctcttgaacccgggaggcagaggttgcagtgagccaagataatgccactgcactgcagtctgggtaacgagtgaaattctgtctcataaaaaaaaaaaaaaatagcttcttcttaaagggcaagtgggaggagagcatttctcccagcccccagctcgctctgcttccaacataagatgcctctttcgtgcggaatcatgaccccaccttcctcatttgttttcacacagctttcagttcagcaagatcccatctctggcatccagaacttttatagcattgatttatcacttcgtgcagtgatttgcatttggtattttttttttcaaaagcagaagaactcgactcaggctgtaaccttgcaaagcagcacaaagttaaaaggatccagttacagaatatcagaaataccccagccctgagagctgtggagctctgggtttatttaatgcatttcttgccagccctgcctcctcagccaatttgtctgccaaaaaaacaaagacttcagtcctgtggcatttcacatctaatatttatgctgttctagagtttgcaaaagggcttccttttcatttatcactgttcctcaggaacctccagctcccctgctaggttaatgggattgttctctgctgcccagaccgggagccccaggaagccaaatgacagatcatgaaagtggcccagtggaggactcttctactggtgtcaggggtaggatcaaaactcagcctgaaccagctcagtttctattttgtgaccctgggggccaaatatggatcttgcaaaatggcagctggcagcctgagtctacacttcaaccccaaatttctgtcagagttacaagatgctttttaaaatctggaaatttaaccaaaaatacccagattacaaacttctctttaaaaaaaaaaaaaaaaagattatgataggcctgtaatcccagcactttgggaggccaaggtgggtggatcacttgaggccaggagttcaagaccagcctggccaacatggtgaaaccctgtctctactaaaaatacaaaagaattagccgggcgtggtggtgtgcacctgtactcccaactactcaggaggctaaggtgggagaatcacttgaaccaggaggcagtggttgcagtgagccaagatcatgtcactgcactccagcctgggtggcaaagtgagaccctgtctcaaaaaaaataaaataaaataaaggccaggtgcagtggctcaagcctgtaattccagcactttcagaggccaaagcaggtgaatcatgaggtcaggagatcgagaccatcctggctaacaccgtgaaaccccgtctctaataaaaaatacaagaacaaaattagccggtcgtggtggcaggtgcctgcagtccgagctactcgggaggctgaggtgggagaatggcgtgaacctgggaggtggagcttgcagtgagtgcagtggcactccatcctgggcaacagagcaagactctgtctcaaaaaataaaacaaaaatttgaaaaagataataatgataatgatggtattgccattactggtaacattcctgcatggtggagattagtaaactgtggcctacaggagtctgctgccaggttttacaaagttttctggaacacagccacacccattagtgtatgtactgtctgtagctgctttggctctacggtggcagaattgaatcattgcaatagagaccttatggctgcatagctgaaaacacatagtctggccctttgcagaaatagtttgctgagccctcctaagtggcgccagcccactggatttgtgccacagatacccccaggatttattagaatataggtggagttgagggtacttcagtccctaattaacagcggattagagatgataggtgcttatttctctcccatttgacagtttgggcataaacagcctagagatgatgtggcaggcatggtgttggctcccaggctcctgatgggtgatggtcagatggcgttccatcatcctgggcgatcgtccttatctaaagcagcatcccatcctgtctgcatccaaccagcaggacacagaaactataagggaagctcacttcccttcctggaggggagtttccagaagtcacacaccacctggtgtacccctccagttcatagaaaatacagagaattacaaaggaagccagttatatgaaaacatatttatcaaaatattttataaactgtgatatgtatgcttctttacacataaaatggcacgatgaagcagttatttaatggacaatggataggtctgataacttccatgatttcgaagtagcgctggctcaaatgatattttaagaagtccatgttgactacaatgtgatatgaaaatatccgtaattcccattggtgacaaagtcccagggaccatcattcataattgaaggggatgctagttataggttaatgaaaataaacaaatacatacttttgccattcaatttcaggaaattatatcttgggacaacagattaagaacctcttcctcaggtgatctgattcgattccatggcattaagtgccatctaaatgcttacagctcctcagtttgtaattccgtagcttttctgtgaacctggtctgtttccacctgaatgtctaacctgagtctcgaggttaatgtgtctgatttctttatcaacccccatccccaactctgcccctcccagtgtccctttcctaaataagggcaaatctgtcctcctcattgcttggaccaaaaaccttgagttatccttgactctctttacttctttcgcatgccacatcagcaaatcccattggttccacctttaaaaatagcctggaaccaaccacccaagcccttcgcctgccacgattgtggtcatcacagtctgtctcctgaatgactgtgagagtctccaaacattccagttccctgcctcggactggccttaattctaggacagaagctccaggaagatgcaggttttttgctgctttaattttttctgttttgttcactggtatccccagtgcctagagccatcccagccacacaggagtcctcctttaatgtttactgattgaatgaatgaatatataacatcatgatcaataatattatgataaaaacagtaaccatttagaggcagttaacatattttctcattgaatctttcccagcaactttgtcatgtagggatattattattattcctattttgcagttgagaaaactgagctggaaggcagaggtagctgaacttaaatgcaagctgttggctccagagcccatgcccagccctcagacctgcctgcctcggaggataaaaatcatttctgaggccaggccaggtggctcacgcctgtaatcctagcactttgggaggccgaggcaggtggatcacgaggtcaggagatcaagaccatcctaaccaacaaggtgaaatcccatctctactaaaaatacaaaaaattagctgggcatggtggtggcgcatgcctgtaatcccagctactcgggaggctgaggcaggagaatcgcttgaacctggcaggcggaggtttgcagtgagccgagatcgcagcactgaactccagcctgggtgacagagcgagactccatctcaaaaaaaaaaaaaaaaaattatctctgaaaccctacacttctggaaagactgatctggataacgactatggctcctacctgtgtcccccacctatgcttcaagaaaggcaaagtgcccgggtcctgggaatgaccttccttcaaaagcccacggccggatgaattctgggaggatgcagcatgggaagataacctcagtgtggaaattccctttgcctggaattctggcagaaagcacttcggagatagtctgagccacatcggagaggaggagctctcggaggctgagtcccatttgtgtgtgtccccacctttagccatggggcagtccctctgctgttccctcttccctgcctctctgcgtccccgtggatgggaagagctccagtctgtggtcgctggagtcctgctgagaggctgaacagggtagtcaccaaaaggcaggtggagacagacaacctgggattgagcctcatttcagctctgacacttggcagttgtgggatgttcggtgaaaaggggactttgcctctctgtgcctcagtttctccatctgtaaaatagggaccaaaaaaaggatctacctcactgggatgttgtaggtcatcgtctaaaccagtggctctcaaagcgtggtcccaggatctctagactcaaaactattttcatgataataccaggacactgtttacctttttaccgtcattttccttctggtagacagtggagttttctagcaggtacatagcatatctagttatctaaaaaggattaaaatactcttcccttttccatctgcatacccattttattttattttttagaaatagggtctcgcttgtcacccaggctgaagtgcagtggcacaatcacagctcattgcagcctcgaactcctgggtccaagtgatcctgccacctcagcctctcgagtagctgggaatacaggcacacaccaccacgactggctatatttatatatatttattttttagtttttgtagagatgaggtctcactttgtcacgcaggctggtctcaaactttttgcttcaagcaatcctcctgccttggcctcccgaagtgctgggattacagacgtgagccactgtccctggcctgcatgtctgtgtgaggctggatttttcatgttaaacaaccaaaacaatatatctcagcagattgaatgccaaaacagatttaagaatcctgctgccttccagtaaacaagacattgaagagattggcaaaaatgtaaaacaatgcaactcttctcattaattgtattttgtttgggaaaaatatagttatttatctttttttctccccaagacagagtcttgctctgtcactcaggctggagtgcagtggtgcaatctcagcttactgcaacctccacctcctgggttcaagcagttctcctgcctcagcctcccaagtagctgggattacaggcgcccgccaccacacccggctaatttttgtatttttagtagagacagggtttcaccacattggccaggctggtcctgaactcctgaccacataagtcatcacgcccagcctctatttatcattttttaaatgtatgctaacaagtagtgagtttattatttaaatgagtgaacaaatatgttttaaatttctcagttttcatctctaatataataactatcactagatataaccaacatacacaggactctgggttccttaataaattttgaccatattgaaaagcactgctgttgccttacactgaccttgagtgcttttttggttttataaagcacatccacaaatggaagtcatgtcccgtgtgggccaaatagatccaagttcagccagccaaacaccatacaagcaaataggaagacaagaatttaacaattctacccactcctccactcacagagggtgtgcaccggatgataaaaaaacaaatctacgttctcagccaggcgcagtggctcacgcctgtaatcccagcactttgggaggccaaggcgggtggatcacttgaggtcagctcaagaccagcctggccaacatggtgaaaccctgtctctactaacaatacaaaaattagccaggcatggtggcgaacacctgtaatcccagccagtcgggaggctgaggcaagagaatcactggaacccgggaggcagaggttgcagtgagccgagatcgtgccattgcgccccagcctgggtgacagtgtgggactccatctcaaaaaaaaaaaaaaaaatcgacattccctcactcagctgtgtctcccacaggcctcccattacgaggtgttcgttggttcagttgtttacccatttattccacaaacgttcatcgaggtctcgtcactgaccaagctctgttctagatgtgaggacacaggggacaagggactcagaaagccgctgccctcatggggctggtactctggtgggagaagcacgtgataaaaactagaagacagataaatatgaccagtgaataaatatgtggagaagcaatgtcgggggaaaggggagagcctgggcggtgtggggagatgccatttgaataggagggttaggattgagccccagtaagttaacatttgaggctggacatggtgactcacacctgtaatcccagaactgagagaggccaaggtgggcagatcgcttgagcccaggcattgagaccagcctgggcaacataatgaaaccctgtctctacaaaaaaaaaaaaaaaaaaatacaaaagttatctgggcatggtggcttgtgcctgtggtcccagctacttggaaggctgaggtgggaggatagcttgagcctggggaggttgagggtacagtgagccacgaccgcaccactgcactccagcctgggtgacagagtgcgaccctgtattggaaaaaaattaaaagctttgagcaaatagctgggaaaggtgaggaagcagcccatgcaggtatctgaggaaggtgatttctttcaggtaacagcaagggcaaaggccctggggcaggtatgagctttggggttggggtgctggtaggatagagggagaccccaggacaggaggctggggggaaagtgggggcagatgcagtcacggagcaggacaggagacagttataggactttgtagggcatggcaaggactttggattttagttgaggtggatgtggagccactgaagggctttgcacagagtggggggcttgatcaaatttgtgatttaatgggatccttctggctgctgtggaagatgggctgaaggtggaggcaggaggaccagggacgaggttccagcaaggtccaggcagaggcagtggtggcttggaccaagatggtgacaggcggatgatgggaagtggtcagacctggatgtgtcctgagggtgaagctgctgggacatatgtgagggaggacagaggagctgaagtcccctccatggtgcgtagccttgacccactggcattgacggatgtatggatcacagggcgaaaatcaagaggccggtgtgaagtgctgatttgacaccaaatgaagtgatttgaaggaaattactaagtatgcagcggtccaaatgatacataaaaacggccaaacgtgtgtgagaggcacgcggacaactggaattgagatgatgccacgaagggcaaagaccccgttttgttttcgcagactccgtgcctgcgaaatggcgcgggtctgttttgggaaggacggactttccacaggcttctgcttcatctttcgccgacctctctgaattgctttggcaaacactgtttattgtcattggctcggctccgcgctccagcccatctctgctgatagatgtgtgtcatgctcagccgacttcactgtgcggcatgaacactcctccccaagctcattactggagtctcggaggggccttgccattttccaaaacggtgtcacatctggtttctaacaaccatttttatttctccagaggtccaagttttcatccccctccctgaaaacggaaagcagactgtattttgggaactcacagttcttttttgtttctgtttttttgttttttattattttttttttttcagagacagaatctcactccgttgcccaggctggagtgcagtggcacaatcatggctcactgcagacctaaactcctgggctcaagtgatcctcctactttggcctcccaaagtgcttggattacaggcatgagccaccacgcctggccctttttcagagttctttatgcacaatctcatttgttgctgcccccatttttatagaagaattcactgaggctcagacaggagcactcgcttgcccaaggagtcagagtcctctgactctgcaaaccaagctctttaaagccacactgcaaccctgtcgttaatggtacatttggacaactttttaaactgtgcactttacacagagtttcacaacctcggcactggtgacactttggggctggatcattctttacggggggaggagggccatcccatgcactggaagatggtcagcagcatccctggcctctgcccgatagatgcctgtagcacattcccccaccccgccaggtcatagcagtgaaaaatgtctccacacactgcccagtgtcccctgcagggcaaaatcacccctggttcagtgtattctgcacacagatgtgcttcaggttggcagccctgcctgctccgttgacccatttttttcagcatgtagcactgtgctgcagacactataatagaaatcccttcctttctttttctccccccacccctgccccccagacagggtctggctctgttacccaggctggagtgcagtggcaggatcttggtccactgcagcctccgcctccacttcctgggctcaagcgattctcccaccccagcctcccaagtagctggaacgacaggcgtgcagcaccacacctggctaattttttggttttttggtagagacagggcttctccgtgttgcccaggctggcctcaaactcctgagctcaagcaatctgcccatcttggcctcccaaagtgctgggattacaggcgtgagccaccacaccaggcctagaatccctttcagtaagacatgcagttgccacctctcctgcactcctgggcgaggggtgtgacgcttaacattagagggcgctgccccaccttgcacagctgtgtacctcaatcaggtgcacctacccagccctcctgtcggccactgctcaccgtgtgcacactctgggccaggtactgcgctggggctacagtgcagcacggctcctgccttacggaccccacaccctagttggggaaatgaggataaacaagaaaacaaatgcatctataggataatttcagagagtgcagagtgctgtagaggaaataaacagcccggtgactatagagggatgggtgaccagggacaacttctcatctgacctgaggtgccacggtgaggaggaggcaggcgtcccaggcagaaggaagagcaggtgccaatgctcggtggggtagagagcttggctcctagggagcgtgagacctagagaagttgaaacagagtgagctcagcagtgcgtccctgaagggagacggcctgatggctcttggactcagaagggccctctggccatttggggaagtctgggctctgggaaggctgcggaggcagaagtccagttggaagttggctgtgagaaggaaacaggtgaagaagcaagatgcatttctgtcttttttgggattttatatcctgtgtatatgtgtatgttgtgtattcgtgtatgtgtgtatatgtgcttttactgtattttcctgcatcgtgtatatgtacatatgtacctgtatattcatgcattgtgtatatgtgaatgttgtatatctatgcatgtgcgtatgtgtgccatatattaatgcatatgtgtatttttatatgtcatgtattcactcgtgtgtatatgtgtgttgtatattcatgtatgtatatgtagtgtatttgtgcttgtgtatatgtattcatgcatgtgtgtatatgtatgtgttgtatatttatgcaggtgcgtagatgtgtttgtgtgctggttccaaaatatgaggacaaattgccaaatcaaagtgaataaatatttaatgaaatggtgttgcatgattcagcgagtcagctctggaacatttggactcttagagagctgtttgtcgattacctttaatgtagtgtgtgggtggaaatggtgtgggatgaacatgtaccgaaagttgctgatgtccttaaagaagccctgttggtatttccagccagatggcccgtcgtgggggagagaaagtcctccgaaagcagcgggtgctttctgtcctgctggctgcctcttgggaggcccctaggacagatcaggtcctgtttcacccttcgcatgcctgtcagttcatccacgtgcatagcagtgggtgggggtgcactgtcgtttcattgccaacaaccacaggggacaaagtcctttgtggtcccacagctaggaggtggcagatccaggattcaaacccagacagtctgactgcagagacgctttgggcactctgccacattaccacctgtgttactgggaaaagggagaactgatgctgggaggaacagcgtgttcctacgccggcccggcatggcggggacatgtctgcagcagggagaggtggccgaggttcccagtggtttctggttgcaggagccctctgtctcccccattgtccgtggcttgcttagtatccccagtgatgccgtgtgtgcccctgtgccaggtttttcaccagctaatctcagtccctggtcgccacgagacacagctttcacagaccacaaatgcaattattacaaggcaatttcagttagatttggggctgggagagaaaacagaagggtctcctcctcccatcaggctccgaatcgttccccaggagcacttaactcagacaaatggggaagcagccgcgtggagcctccaccgtagagctgcctgcaggggaagtggccgacctgctgggccacgaagcagggtgcaggaaggatatggggagctagtgatcctctccaagggggcagggggactccattaaaccagatgttaacagcaagaagttggctataacaggggacgggcccattggtggataatgaaaatataacccttagtaggcacttgctatgtgccagttccaagcaatgtacagtcgtgtgtcacgtaacaatggggatacatgctgagaaacgtgtcgttaggtgattctgtcattgtgcgaacatcatggagtgcattacacgcctggatggcatagcctactacacacctaggctctgtggcgtgacctattactcctaggctacaaacccccctacagcatgtgaccatactgaatcctgtaggcggtggtaacacaatgggaagtatttgtgtatctaaacatacgtgaacatgttaatagagtacagtaaaaatatggtgggcatggtggctcatgcgtgtattcccagcaccttgggaggccaaggcgggaggatcacttgagcccaggagttccagaccagcgtgagcaacatagtgacaccccatctctactaaaaattaaaacattaggctgggcacggtggctcacgcctgtaattctggcactttgggaggctgaggcgggcagatcacctcaggtcaggagttcaaggccagcctggccaacatggtgaaacctggtctctactaaaaattaaaaaattagctgggcgtggtgttggacacctgtagtcccagctactcgagaggctgaggcgggagaatcgcttgaactcaggaggcagaggttgcagtgagctgagatcatgccactgcactccagcctgggagacagagtgagactccatctcaaaaaaaaaaaaaaaaagtggtttcaggtaagagtggatccccagggcctcaaaccagcatctctctatctctctatctcttgtatctctctatctcttctgtctctctgtctctatctttcccacctccgcatttttccatattgctttacacacacacacacagactcttccctcttggtggcaagatggctgccagcagcttcagttatgtatcccaccagttccaagccttgaggaagaagaccttctcttttctagtagctccctaaaaatcccagggctgactcgctgcagttggcccagcttgggtcacatgcctttgcctcaactaaccagtttgtgcatgatcaccaggggaatgcggtcctcatgggagtcaaggatttgcacacattcctggagtcaacagtcaaggtcagcccgtgcaacttaaataaggaagtgttggtgcccaaaggatgacagagccaggcaggtgaagcttccacctagtgctgggcacacaggaggcagtaagtgctctggcctttcagcagatgccagccctgctgcccaggggcagtcgccagccagctcattgtcaatggcctttcctggcctgccattaattcctcttaatctgcctgccaaattttcccacccccacgccagcccccagcttgcccctcctcttgtgctgtccttgcctcgaaagctcagcgaatccaagcttcccaggcaccagccacctgccacaatttgggctgggcttttaatcttggttttaattccagctcattctcttggctgtatctcccagcccaggagccccggggcccatgctaatttgcttctcccacctccactggtgccggaataaccatttttaaaagtgccttggggaaatataatcaaatgagagcaaaatctaatttggcactaaaagcctctgactgaagccctgttttctagggcctggtggagactgaataatacaccctttttgggtttttaagggttgggggttggagaaaggaaagagacgtgaaaggggagatgctagcagaggaaacagcttgcattaagctgacatccgtggcactgaaaagaatgggcaggaggaggacccccacccactccctatgaagaaattcatatcccagcagccaagccaagaagctaaactccagcattcatcagaaagaccttggcccaagtcttcaagaaccagtaggttcactggctggagatttggaagatgtgggagtgtagcgggaaacccagttccccagtggggagttcagtgaagcctttttctctgactttcagttcacttttctgcaaactgagggggtgaaaatctgtgcttcttaaatgacttgtgatctgggctcctttcagaatgtgtcaaaagctgtggacttgtttccaggaaaatgcacaaaaggcaaaatctggcatgcaatgttccaggagcggtacgaaccctgccactcctcatgacagtctccaggaccctatgggatctgtcccctcttccccgtgatgtcatttcctccctccctcactgtcccccttgggttctgcgatgcccccacgtttgtactggcttcagggactttgtacctgccaattccctctgcctggaacagttttcctcctatcccctctgactcttgctcttcagcccagcgaggcctctcacagcactgcgtggggccactctgtcctatcattctcctttattttcttcatcgcatttgtcatcattccccactagaacatcaactgcacgagggcagaagggatcctggtggtcttgttcactcctgtgattccagtgcctgggaagctccctgcataccgtaggtgtttaatcaacacttgccgaatggatacaggcatgcataccttccctagggcagtgggaccccaaattcagcaatttcgagtgccaccatcatgaggtgtaccatgcccaggtacactgattctgttaacattttaccctagattgtttcactctggacttcagttgtttcaaaaggaatcttttacatcactgacagtattgtttgccacgagtagaaagtgtcggggctctgtaggggtgtaacaaaaacgcaggtaataagagcgagatctggtataaagaaagtgattttttattccaaagctagcttaggggaagaagtacagtcttcctgccttaagggtactgctttgcttttaggagcagaaaggagttgctttttaaaagggggcctggcatgaatggcacacaggggaggaattgagtgctgggggggtccgcatatctcactcgagtacttcatctaccgggaagtcagctggcagccactggtgcctttgtgggtggaactaggttgtaagggtggccagaagctctccacctgggagggagtttcgcagcaggcatactttgggttgtagtggaccattgtctctcgaggcaacctcccagtgagtgagagttccgctccagagcctctaagcacgtgattagatgaacttgccctgaagagagtgtctggtgtaggggagataaaaggttataattgcatttctaaagggcgaagtggggcacggggaaaatggagaaaaaagaagaataaaaaataataaaactgccggacagggtggctcacacctgtaatcccagcactttgggaggctgagatgggtggatcacctgaggtcaggagttaaagaccaccttggccaacatggtgaaaccctatctctactaaaaatacaaaaattagccaggtgtggtggccatgcctgtaatcccagctactcaggaggctgaggcacaagaattacttgaacctgggaggcagaggttgcagtgagctgagattacaccactgccctccagactgggtgacaagagcaagactccatctcaaaaaataataataataataataaaactcatctttttcttagaaaaaatgggaataccgatttatgtgggggcttattaaattttaccctcttccttgttgaggtcctgagccgattaagaaatcagacccaagagtcagctgatgaaagtcaacactgcactctgatgaatctggtgaaggctgggtttgagggcatggcttccttctgagagcatttgggcttcctgactaaactccagagtgtgacagacttcccactgatgcaggtccacacctctcctccccgcgcagacaggacaagcctcctgaaaactagccctccccgggggcagctcagtccccagaggaaaagcaagggaagggattgggctatgcatgcccacttcggcccttcaaatccactaggcacatgctaggggtcagcaaaccacagccaatggacctaaccaggccctccatttgttttagtaaataaagttttattggaacatacccgcccacttgtttatgtcttgtctgtgacttcttttttttctttctaacaatagggtttagcagttgtcacagagaccctttgaccctctggcccacaaagcctaaaatactgactatctggcttttacaggaaaggtttggtgacctctgctgtatattgtccccctcggaggaggtacgggagagcatggagagaggccaggagtgttacagaagtggagcccccccgcatggagggcagcgttagaggtgggggtcaaggtcacaaggtttaggaaatcttgtttcctgaactacacttggtctccaggggccttcctggctctcacaatatggctccaaagacctgaggggtgagatgctggagggttggaccataggcaggtttatttaaataagatagggtttctcagcgacgtatggtggctcacatctgtagtcccagaactttgggaggccgaggcaggtggatcacttgaggtcaggagttcgagaccagcctggccaacatgatgaaacctcatctctactaaaaatacaaaaattagccgggcatcatggtgcacgcttgtagtcccagctactcgggatgctgaggcaggagaatcccttggacccaggaggcaaaggttgctgtgaggcgacatcacgccattgcactccagcctggaaaacagcgagaccctctctcaaaaaaaaaaaaaagaaaagaaaagaaaaggtttcttggattaggcgctgctgacattttgtcctggctcagtctttgtagcgtgggggctgtcacgtgcgtcggcgaatattgagcagcatccttggcctccacccaccagatatcaacagcacaccaagttgtgatgaaaccaaaaatgtctccagacattgccaagtgtctcctggggacagaaattaccccctttctggccaagagccactgctttgaggagctggatgcattgaggcatctccaacattccaggtcccagagaaagagaagtgcaggcctttagcttgcccgggaatctcatgctgcctccactccatcagttactccctgacacctagccagggacgcccagtcgctgtttaattaggcacccaccacctaattacatttcactctgtgaaaactggatatgactcagactcagagactgcagccggttccccgcctcctcctctgcagaacgccaggttcttcccgtttatttttgctccatcctcccacacaaagggaggttccatcccggaccttacccctgaggctgctgggggatcctcccttcctattttcacctcccctgtgtacccagacccttacaggaggtgtttcatcagctcctccctctggagcggtcacctcccggccctgcatgatgggcaagtcatttaatgaagtgctcccctttgccttgtattttgggggtttcagaatccagccgcttgggttcctaaggggttttcccactcctggaaagtgtcagccatctgccaggtcaccaggaaaaccgctgcagagggagccagctccatcacagctcccccagggccaggtggctctgtgctttctccaaggacactggtggataggttgtcctctcctctaggggcaccagagccccatcccacccactctcctccttcctctgggggttcacctccctggcctttctctcttcatcctggcttctcggccaagcactcacgtgcacaaggcccagcgctgagctgtctgttagcaagatctccttacatccctacaacctcctggaacgctcatattctgtgctctcagcaatactcgtcagaaatttcagaaccgcagtgtcctcatctagaaagagacgactagaataggattgctgtctctagactcaaattttcccatttcttaaatatggctttatagattataattattaaaaattatacatgcaagccagacacggtggctctcgcctgtcatctcagcaccttgggaggctgaggcaggcagatcgcttgagctcaggagttcaagaacagcctgtgcagcatggcgagaccccttctctacaaaaactacaaaaataagccaggcatggtggcatgcgcctgtagtcccagctactcgggaggatgaggtgggaggatcacttgagcctgggaggttgaggctgcagtgagccgtgatggtgccactacactccagcctgggtggcagagtgtgacgtgtctcaaagaaaaaaaaaatgtacatgcaaaataaaaacagaagaggatcatgaagaggtcttgtctgtctccttatcacagagcttttaggcacatccccttcctgatgaattagggtgattttctttaagctttgttgttgatgtaaagcgtgcatgtggaaaagtgcatggctcccaaatctccaggccaatgaggtgtcaccaactgaaccacctgctccagcaagaaatagaacaagatcatcacccgagaaactccccttgctgctcccagccaccctcccccagtctccaggatacccactgtttttattctaacatcatagattagtttggcctgttctcaaatttcacatagatgacgtcatatggcatgtattcttttgtatctggtttatctctcttaacattcttaggttgttgagatgcatccctgttcttgaatgtagcactaggtctttcgttcaagtttcaatgtagccttccgttctgtaaatatgcaacaatttctttacccatccttttgttgataaacatttcatttgtttctacctatttactattacaaatgtgctgtcatgtcttgtacctgagtttaggtgagtgtatgaatacttttctgttgggtaaatacccaagatttaaattgttgggtagaagttaccaatgcattcaaatttagcagacacagccaaagagttccccaccgtggttggaccggttggggcagccactcagtgtgtgagggctcaagttgtcccacatccccacccatactaggtgttgcccatttctttaatgttagccattctggttgctgtatagcagacagaatccaagggatccacaaacttcaatgggaaaaaaagtgacactctggttttcactaacctacagctgagacttagcatttgcttccaatatgagcataagccataaaccacagtatgttggcagaatctgtagctttgtcatctgtagaaatcaccagtatttaatatcccattgcagtttttgcagatactgcaaaatataatattttcactcataactattctgaaatgatcgctctctacaaggttttaaaagacacagtaggccaggtatggtggctcacgcctgtaatcccaacactttggtcaggagttcaagaccagcccggccaacatggtgaaaccctgtctctactaaaaatacaaaaaattagccaggcatggtggcagacgcctgtaatcccagctgaggattactcgggaggctgaggcaggagaattgcttgaaacctgggaggcagaggttgcaatgagccaagatcgtaccattgcactccagcctgggtaacagagcaagactccatctcaaaaataaaaaataaaagacacactgtatcgcaaatgtgtttagtattttgataaccgtatttccaaacaattgattttctctgtaatcctatatcttgtattcaatgcacgtaataacattggagaagggatccattgctctgtgtgccagagggctccatggcagagcaggtgtgcatgctcaggcctcggacacacaatagtttaataaacatcgtcaggcactttctcacgtggcctcctgatccatctccctccgcagctttcttcgggaagtatcttaatgaatacaacggctcctacgtgccacccggctggaaggagtgggtcggactccttaaaaactcccgcttttataactacacgctgtgtcggaacggggtgaaagagaagcacggctccgactactccaaggtaagctgcaacctttccagcctgggagtggctgtgtggcccagcagttagaggcccaactcaggagccagactacttgggttcagattgtgactcaggcacttaaaagtgtgaccttgagcattttacatacacctcctcctcagtttttcatctctcagccagggacagtggctcacgcctgtaatcccagcactttgggaggctaaggcaggtgaatcacttgagtccaggagttcaagaccagcctgggcaacatgacgagaccctgtctgtacgaaaaaaatacaaaacttagccgggtgtggtggcacatgcctgtggacccagctactagagaggctgaaatgggaggattgcttaagcccgggagtttgaggctgcagtgagccaggatcttcccactgctcttcggcctaggtgacggagcaagactctgtctttaaaaaagaaaagaaaaatgtattcatttctcaaaaaatagtgtctgtttccaagagtttggttttttaacattttgccgagacagaatattcttacagaaagtacatacacagagtgtaccattcaaaggcttgccgcacactgaacggacatgtgtaatgagcacccgggtaggccaagaagagaatgtcaccaccgcccgcagcagtcccctcacggaattcccccgactcgacacccctcccgcgaggataacgatgattcagactcttagcgttacagattcactctgcatctggcttctcctgcttagtattatgttgagttcattcttgctgcccagcattccatcatgcgcttataccacaatttgtttatttcttctacttttattgggcatttaggtatttccagtttggggttattacaaatagcgctgctgagcactgtctagaacctagctcctggtgagcatagaggctcatttctgttatacccgttcctcacagcagcgttgctgagcacagggcgtgtgcatgttcggagtgagtgggtgctgcctgagcacctgcagcagtggttgatcctcagtcgtagttttttctgtttttaacataagatgaattgacatgaggtaacatgcacagatcttaagtggaccgctggatgaattttcacatacgtgtgcatctgtttcaccgcgcatctcttccacatatgcgtgcatccatttcaccgcggctccgatcaagacatagagcacttccagaagactccctgagacccctctccagtcatgaccccccaccctggggatgacgtctactctgacttctgacagcgtggattatttttgcctattctagaacttcacctaaatggaatcgtatagtctgttctcttctgcatctgccttttttcacccagcgcaatgtctgtgagatctgtattatttattcattcaacaactcatggacattttggttgtctccagtttgggtctattataaactaagctgccgtgaacatctttgtccatggcttttagtggacatatgcacccatttcttttggttatacacccaaagaaggattgctgggacataggatgtgttaagatgttgcgcccggccaggcgcagtggctcacacctgtaatcccagtactttgggagactgaggcgggtggatcactttaggtcaggagttcgaggccagcctggccaacatggtgaaaccccgtctccactaagaatacaaaaattagccctgcgtggtggcgggcgcctgtaatcccagttactcgggaggctgaggcaggagaatggtgtgaacccgggaggcagaggttgcagtgagccgagatcacatcactgctctccagcctgggagacagagcgagactccatctcaaaaaagaaaaaaaaaaaaaaaaaaagatgttgcaccagtttacactccagccggaaatgggagttgccctgcatcccttatcagcacttggtgttgtcttttttgtcagggctgctttgttgggcatgtagcggtgtttcattatggttttaccacaaaggtttttgaggatcacgtgagttagtacatgtagaacattagaagcgccccttgcacgtagtaaatactcagtatgtagtagcttagatcagggcaacaaatattttctgtaaagggccagatactaaatattttaggctttacaaggcttacagtcctgttaccactgcagaagtctgccgttatagtgtgaaagcagccatagataatatacaaacaagcatggccatgctctaaggaagctttgtttacaaaaacaggcagtcgacctgcttggctgtagtttgctgacccctggcttagatgatgaggaggagaaggaggagaggctgacagtgatgtttcatccagatgtcccattttaaaagaaatatggaaatgaacaaatcttcctgccccatctgaatcctcagagtcagctctgacatccccccacagctggtacattctttccccagaccagctgccaaatccatccctctttctcttttcccatccccactgccaccagtcctgggccctgcctactgtgacttcccaggttaaagtcactagagaacaggcagtcactgaaagagggtagcaagccaggagtgtgtggacaatagggagtggtggagacggtggagaaggtgtctgtccaaaaggggcagatcaggcccaggtagaactgtgggcccagatggccacttttcctgatttttcaacagaagccacaaatttgtattttttacctatgaaatctcctgattggtaaatattggcaactaattcagacttttctaaaatcttgcatcaattgagcatgcctgacccatgggcctgcagcccttcagcccaccatgtcgttcttctgccagcaccctccggggactgtacggtgagtttcacatttggagtcagtgggatcaagttgagagccccaaccttgacacatattacgtgaccttggacatgctacgtactcctaagagcctcaactcccaaatctgaaaaacaagcatacccttgcatacttaatcatgtgtacttccatttactgagcacctactgtgtacccctgagcacctactatgtagtgctcaggggtacacagtagtacttctgataacatgtagtacttctgatattcacaacaatcatatgaggggagtggactagtcacatttggttccattattcattcaccacccccaacaagtattcattgagagcctgctgtgtaccaggtaccatgccaagtgctggctattccaaggtgaatgaaaacagatgacccaatcatggtcctcctggagctcacagtctggcacatgaagatatgatataaactgttaagtgatgtgcacacatcattaatgcacacacacacagtcacatcacacccgtctattttgtcatccccagtatgagccatttcaacctccaagcttgctagttattacagtcatctcagttttgttttgttttttgagacagagttttgtgcttgttgcccagactggagtgcaatggtatgatcttggcttaccacaacctctgtctcctgggttcatgtgattctcctgcctcagcctcctgagtagctgggattacaggcatgcaccaccacgcccagctaattttgtatttttagtagagatggggtttctccgtgttggtcaggctggtctcgaactcccaatctcaggtgatccacccacctcagcctcccaaagtgctgggattacaggtgtgagccatggcacccagccactatagggtaattttttttaatcagactaggctcttgaagttgtttgtgaacagaaatttaactcccagtggcttaatcaaagaggaaatatattcacctatttaactgaaaaccagctataggggtatcaggcatgggtggatccaggagttcaaatgaacccccaaggagttgatttctctctactgtcagctctgtttttgtctgctcgactgtattcacagaagctctctctcctcctggtagcagtgcggccttccttatatcctcccagcttcctggccagctgcaagcatgggagtctctttcccaggagtcccagagagtctcagtgcatctcattggctctggatcagtcccatgtctgtccctgagccaatcagagtggccaggaggatgcctggttccctggactataagtcacatgctccactcctgagccagacatgggggtagcaggagctctacgctggaacgttggctgggaatagagccccaaataagaatggagtttccaccaggagaaggctgactaggtgctcaacggccaaaaaacactctgtcccacttctgttctggaaaccccggcacacatggagatccctctgcctccgacaggtcatcctgggctccctgtaagtctgatgggtccaggcccaagtggcagaagccgcccccggcctgccctcaagtctcattctgcacatagtaggcctccagcctcccaagtgaattaattccaaagttctgatgaggcagtccggcatggactccttggaatataaattccagtcccagggctaagcacgctgtttccctcctcccagcctcagtgcaggcggattctctaaatatcctgaaaaatacattccctcctttttaaaattcttcaccacatccacgcctcatctcagagcagcccgataatcaagttatcccggggtgctcaggattcttttggggctaagcatggggacatagaacgtccgtccttttgccctgtttcctgcccacacacatctccccctgtgaatgagaacagccctgtgagggaggcgtgagaggattcctggccccccagttaccaggggcctgggaacagagatgctctaacagggacgtgggcagagggcggggcggtgaagtcagaactggctcaggtccagggttcaaatcctgagggtagcagtgggcagcaggagcccaagcgtcaagggaacaggggtgagcccggggtttccagccaaggcagagctcaggagccctgtgccctgggccctagatcaggcagtaagatgcctctggcaaggcagaatgtcactgctggcctcgggcgggccttgttgggaggcccaggcagggaggaagcggcaacccttcgtaagcccccctcagaaggcctctgaggactctgtcccaagtcactaatccacagatgggcacatgccaccaaaggggtccagatgtcaagggcagaaagagaggcagtggtgatgagaaaagagtgatacaggacaagcgctaatggcagaagagggttggagaggggaagacagttgttagtgggaagggaagtgagaatgacctagagttgagtccacccgaaaagaggcttccaggtagctggcaaaagtgggcctgggtgttgggtggctctgcagggaggtgatggcagtgcacggccagtgtgggggcgacctggcagattctatgaacttcatgtgccccgccccttgccgcagcgtgtacacttctctgtctatctggagaagcctcagtcataggcaggagacggcgtgatggagcagctggttgtagctctgtttattactgaaagaaattagcaaagtccaccaatacacgaaataactaaatgaccgtgaagcatccctcctctggaagatcctcggcaaaggatgaggccggtctgccttatgtcctgagcccatcaggcagagtgggaaaagcaagttccagaactcctgaggtccttattcaaatgtcacctcactttagccttcctggaccaccttgtataagggcacccccaccacactccttactgcaacaaatcaccatctggtgcattacaccctgtgtatattactgattcatttgttaagtatctgtctcttctcataagaatataagccccatgaaggcaggaatgctcatttgttttgttcactgctgtatttgtcagatagataaatgaatatgtacagtatgatgtgattaataatataaaaagatgcataaagtgatactataatgtacctaacaaaacactggaaaggttattcccagtaggggacagaagagccaaggttatgggggtgggggggtggtaaggagtaatctaatcaaatgagacttcactgtcctttgtactattttaattttcacaaagaaaatgtaggcatatggttcttgaggaataatgactaacactcatttagacataccatgtaccagatactgtttgaatcattttacacaaattaacccatgcatttctcatcatagtctgtgaggtatatactgtgtctattcccaactgtcagatgagaaaactgaggcccagagaggctaagtaatgtaaccgggccacatagcctagtaagtgataaagcagaattcgaacccaggccatctggcttcaaagtccatgcactaaaccacagcccgtgggcccagactggtggtttttgtatggcccctgagctaagaatggtttttacattttcaactaattgaagaaacaatcaaaagaagagcatttttcacatggtatatacaaaaatgaatgtcattcagcctttaaaaaggaaatccggccaggcgcagtggttcatgcctgtaatcccagcactttgggaggccaaaccaggcggatcacttgaggccaggagttcgagaccagcctggccaacatggggaaaccccatctctactaaaaatacaaaaattagctggacatggtggcacatgcctgtagtccagctacttgggaggctgaggcaggagaatcgcttgaacccaggaggcagaggctgcagtgagcccaggtagcaccactgcactccagcctggccgacagagcgagactctgtctcaaaataataaaataaggaaatcctatcatatgcagcaacatggatgaaccttgagaacattatgctaagtgaaataaaccagacacagaaggacaaatactgcatgattcccttacatgaggcatctaaattagtcagacaatagcagcaaaaaggagaatggtggttggcagggctgaggggagggggaactggggagttcctgttcaagatgtatgaggtttcagttatgcaagatgaaacagttccagagatctgctgtacaacatggtgcttagagttaacagtactctacttcacagataaaactttgttaaaaagcatacagctcattttttttttaccacaataaagcttttaagagtaattttcatgacatgtgaaaaatacatgaaattaaaactgcatccatacataaagctttactggagcacggacatgcccattcattttcctgatagctgctttcaagctgcaatggcagtaatgagtagttgcaacagagacagggggcctgcagagtctaaaatatttactgtctggccctttacaggaacggtttgtgcatacttgctctaaaccactatgtatgcttctcattaataatgttatctgtggcggggagaaaaagatggacctgacccaaaaatacaaaggccttggctccagctctggatgcatggcttatttgtttggggacctcacttccttatctgtaaaatgggtataatgtccacttgtcaaagttgctgtgacgatcagctgagctaaggtatttgataacatgaagagcctatgatcattcattacgagttgtctggagcctgtggagctgctgccacccacacgcactgccttggccttggagggaagcccggtgcggagtgcccactcgagggaaacacgcttttgcctagggctgaggctggcagtctccgcagacactagctactcagtcggtgaagcttgtggatgcctgcaggaatcacctgaggctcagagggtgcttgccagagggggccggttgcacctcggggtcccagctgtggcttctcagccctgtggagctgtgcaggccagcagcacctgggtagagcctgactcctgggcgccgggttctggaaaatgcacctgggcctgtggacctccacccatctcaccctcctgctcacaggtctgaatttcagagttcttcctcatggcttgacccgggcaccccaaacacagtttgcccatctctgaactcagcctttcccccggcccaggccttctctacccttccctcaactgcccaaaccagagaccaacaggggtgggggtcacccgcccctcccgcaccccacatccacccagtggctgtcctggctgcccctgagcatcgctggatgctgcccccgccaccctggcccaggcctcctgttctctccctcagagagaacagggcatggctgaagccctgtggccggagggatgggtggctcttgttggctggcctggcactaactgcccactggtggagcagggtggcagctttggaggcaggtgtgtcatgtggcattgcggagctagcagagatcggggaagacttagccgaggagtggccactgaggaggatggataaggaggggagctctcagacatggagaaatctgcccagccaccaagacagtcctgattcttagctgaatggtggcagagagctggctgtgcacaggacactatggcaagagcttcacatctattggtgctttaacctgcctgtcagcctcaagaggcaggtactgtaatcaccccccacacactttgaaacattagactgtgggagcccctgacccaccctcctgggtctcattcctgccccggcctgagccctcccctggaggtagccagtatcctggagcttctacccacacatacctttattctttcatcccataggtggatatctcaaacaatgtacgatgctgtgtttgtgtccttagactttttataaatgatatcatatcatacacatccttccacaacctgcttttctcacccgatataacattgtaagatttatccacgtttgatccgtgttcatccacgtagctctgttctttttcactgctttagaatcccattgtatatcttctcctaggaatggaggttaatggtagctttatttttaaaaaagtttaaccacggccaaacaggcatatagttctaagatgaagtagtgaagatgagtctgttatgaagagcaacggtggcttcccaccccaccccactggcgggtggcagcaagtgtccaccactggcggttccatctcattctcatgccatttcctgacttgaccccttcaggccctgactgttgatgtcagggtacagagctttgcaccatttttagatccattgtaaattacctttgtcattttaagaacttttctaatacctttatatcacgttccaaaactatagcagcagctctttgatttatataacatatattatttttatgtaataaattctgtagagcccccttataaaattgtttttactccccaaaattaatccataaataatattcaaggagcaatatataaagaagcaagtaactttctccgcttctctcctcttcccagtcttcaatcagcattttgatatccttccagatttttccttgatgctcaaaaatatatgaggttagagtttggtttctcctcttcaccttcccttccctctgcccccacaaaaaatagaatgtttctgagtttgactctgttgcttgctcttacccttaaccatgtatcttggacaactttacacatgcctttttaatgtctgcacagcattgcatagtatggaagcaatgccaccaggtgtgttggctcatgccttaatacctacactttgggaggctgaggcaggaggattgcttgagaccaggagttgaagatcagcctgggcggccacttgctagctgtatctacttgggctaaccactgttagatactcaagactctgtctgtagagaccctgtctctacaaaataagaataaaaatgaaaaattagctgggtgtggtggcacatgcctatagtcctagctacttagaaggctgaggcaggaggatcacttgagctgaggacctcagggttacactgagctatgattgtgccactgcaccccagcctgacagagcaagaccttgtctctaatatgtatgtgtgtgtataatatatatacatgcatactgttaaacatatatcctcctgctggtcactgcaatgtttttgttttataaacaatattgcagtggccattcttgtgcatatggatatagtggatgagtgtacctgaaagagtgtctgtagatatatgaatacatcatggtatgtatatatgttgtatacttcagggtggaagctgtagacacctcttcacctttttttcttgaaaataatcactttttgaaagtaattgttttgggcagagctgctttctagcagagggtatatttcaagaagtcattaccttgaagaaagattagcagctaaatatttactaaattcaggaagagttgtatgggtgctgtggctcacgcctgtaatcccagcactttgggaggccaaggtgggaggatcacttgagcctgggagatggaggctgcagtgagccatgatttcaccactgcactccagtctaggcaatggagcaagaccattgctccattttttgctccatgaccaaaaaaaaattaaagagtataggcaaacctcaacttcttagctgagcttttaaagcctccagttctggccatttacttttcctccaactcttctctcctcttgcccaatatgtaagtcagttccttattttcctggagacattactgcatccccatcccttttttgtgtgtgtgctgctccttatatcatttctgcattttaccctctgacattttatcctctttccaaggagccagttgccatctgccctctcttctatttttagagcacatggcaagcacattcctgcctcagaccccgttatctctgcctggaactctttcctggatcagtgattctcaatcctgagtacccattagaatcccctggggagttttttaaaagtctgatacctgggccaaaccgcaggccaatccaaccagaatctctgggggtgggcccaggtatcagtaagctctccaggggattctggcaaaatccagtgatacatatcttcctatgcccagctccttctcatcattcaggtctcaactcaaatgtcacctcctcagagaggacctccctgactgccccagctaaaatatgcccctcacctcagctcccagttactctttgttacatctctctgttttatgatatttccttcatctgtcataacttttaactaccttggttctttatttatacatgtgtctgctcctgccccagtgtaggcaccccagggacttagggatatacccaccctgcatgacagtgtccccagagccttgaaaaaacttcagacttaggagccaagactatgtagtgctgggtccaacatttactagctgtgtgccattgggcaatttacttagcttctctgtgccttaatttcctgttctggaaaataaggattatcatcatacgtactttctatagttatgtcagaattaagcgagcaaatacaggtaaacacagaacagtccttggcacatcgtaagcactcaatagtgttagctattattcttttaatatctttttttttttttttgagtcagagtcttgctttgtcacccaggctggagtgcaatcatgcagtcgtggctcactgcagcctccacctcctgtgttcaagcgattctcctgcctcagccttctgagtagctgggctacaggtgtttaccaccacgcctggctaatttttgtatttttagtagagatggtgtttcaccgtgttggccaggctggtctcaaactgacctcaggtgatctgctcacctcagcctcccaaagtgctgggatcacaggtgtgagccatcccacccagcctattttaatatctatctaaagtgatctattgcaattcctgccctgttctccctatccacttctctgctttatgtccaattagcttagcaccatttgcatcatttgtctggcatttcatttattttacttgcttatttcttgtctgtctgctccctagactgtcagctccagaagggcagaaattgttttgttcactattgtgtccccagtgcctagcagggtgcctggcacgtagtggacaccagtatgaatacctggctcctcacctgttctcctgtctctccccaccccccaggattacctcacagacctcatcaccaatgacagcgtgagcttcttccgcacgtccaagaagatgtacccgcacaggccagtcctcatggtcatcagccatgcagccccccacggccctgaggattcagccccacaatattcacgcctcttcccaaacgcatctcagcacatgtaagcctcagcactctgcctgccagaggcactgcttagcatgaagggggagggtcaggctttagcaacagtactgtcaccaccatgacttcactgtgcctcctctctaatcctcctggtttaaagaccccaagaacatactgcttgtccatggtgaaactgggatgcaactccagacagcctgggcaacagaccaaggcaggagaatttttaacttgggatacacggcctcccaccaagaggtgtgtggatggaactgcatagaataggtttccttttaatgccatgtgtattttatttaagacatctaaaaacattcttttgaggagggggtctatagttttaccagactaattatttgccaccatttattgagctgtgggctatgtagcaggtgctgtgctaagcccttggcattattgtccagtccctgaatattcacagtgacccttggtgtaccagttatctattgccatgtaacaaatcatcccagaatctagcaacttaaaacaacaaacacaaattatctcacggtgtctgtgagtcaggaatctgggagtggctgttctgagcttctggcccagggtctcctgaggttgcaatcaaggtgtcagctggggctgcagtcacctgaggcttgactggggctcagtcccatggctgggtcttgccacaggagcctctgtccatagggtgtttgagtgtcctcacagcatgatagctggcctcacccagagcaaatgatcagagagagagtaaggccaagaaggaagccacagtgtcttttacaacctaatctcggaagtggcaccatcactgtgccacattctattggtcacacagaccggtccttctacaatgtggagggtctacgcaggggtgtgaaggccaggaagtagagattatcaagggccatcttggaggctgcctgtcacacttggtattcccattttacagatgaagaaactgaggcacagagaggtaaggtaacttacctgaggtcacccagctctaagtggcagagccaggattcaagtccagccccccacttctgcttcccatgcctctgcccacccctgtagtactctatccagctggctgggaaacttcctggaaagttctcctgcttctctctgcctcagaccaccccctgcttagcagtgactcagcagcccttactgtgacattctggggctgcaaggatggggtggtttggaatctgcctgaatattcagggtgtttggcttcattacaatctgaatacattgccctcctcaagcccctcctgtaattactttttgacagacctcgaagcagctcagagagggtaccgaaggcactgttcaccttcccatcccctgatctctggggaggaggctttgacagaagacgatgagctgcgtcccaggggctgcagcattgctgctgtgcacatctgtctggctccccctccaaacccaagcccactcctctccacccaagaaggccagcctcccccagcagccggcaccccgccctaccgccacttagaactcatccctgcagcgggtggaggccactcagccctgtctaagggagaagccgtgggtgagggaagggacgctttgcttcggcagcatctctaaaagaggtgccggcttcaccccaaacagcagcgagcggtgccggaatttcatgatgaaattgtttggcattgcctgctggtttattttccctttgaaatgaaaattacagaaattgaaaatgagcagtgtctgctcttatgtggagaagccccctttgccttcttaggggcatgtttggaaggctgtctcatctctggagtataatcatttccgaaagaaaccaaaaaagagaaagtcctgcagctaggatgttaaatgatgacagtcaagaaggggtggagaggggacagagccggggcgcacggttagagcactggatctttctgttaggggtctcctatcccatctctcccctagaaagccggcacatgccctttcctggggcaggccttgtgtactctggcaaaagttggtagatggtggtaccatccaccccgcagaccccagggccctgcaccctccccatgcacccccccacacacacagtcacatacatacagacacacacaaagacatgcaaatacacacaggcacacaaagacataccacacaagcagatacacacaatgaaacacacacaagcctgggcaacttagtgagactctgtctctacagaaaatttaaaatcagccaggggtggtggtgcacacctgtagtcccagttactggaaaggctgaagcagaaggatcacttgggcccaagaggtcgaggctgcagtgagctatgattgcgccactacactccagcctgagtgacagagtgagaccctgtctcgaaaaaaaaaaacacacacatgcagacacacaaaaatacacagttacagacacacacaaagacatacacacacgcaaacaaagacataggcagagatacaaagatacacacaggcgtgcccacagacacagcccaccagccctcagagcttcccttcaaagggcgctgattgtggcttcaagggctttggggcgagggatgttggggctgctgctgatggccccagacacacagtggaggggctgtgaggacaccaccatcttcccgccatttccccagcagaagggaagggggatggtcttcttcacgcccttttgtgaacgcaccagatattcctcggatgctggaggaggtgaagttttcagatgtttgttgaacaggcagctgggcccatgggaagatgccgacatcctccctgggggagcctggcttgacacaggcaaccagcaagctggcgtcgaccccaagcaccacccggctctgctgccttctggcctcagtgtccttctccaaaagcgctctctccgagccggggctgcagaaatcatcatcctctgaacagtcacccctcactgttctcgagggccgatgtcagcctaacttctcatggattcagggatgattgctgaaaattgcatcctggaatccgggcccttgggcctgcgggaccaattttcccacacgctcgctgctctgagagcgtctctgtccgactgctgcccccagcagccccctttcagttcctcggtgggagagatctgagaggggagctgagcttgttcctgggaatgttctacatggcgggtcaggccctgagacagcagagccagcccacaggagagcctggccgttctgtaatgaaaggaagcatgggccctgatggattcagtggcatgaggctgcagatcagccaggggctgagaaagccgagtccaggggagccttggagacagtgactcacctcccgccttacatagcaacggtgtccacagctgccaagctaccccagcggcagcgtcacaatttctgccccggacgattgtgatatctgagacgctgctgaagtcccgacgtaccaggccagagggagacatgtctgtgcccctctgaccaggcttgtttttcctcctcttcttcgcgggagctccttgcccccagaacacccactgtgaaaagcagtggaaactcaccctttacttcagccttgactgggaagagaggccagatttgcagggaacctggccttcaagaaccatcaggcccagggcgaggaagcccacgttttgtgaggccttaaacagtgcctcctgtcaatggtgcaccccacccaggagactcccccatgctgcggttttcagtagctcggagccaggggcccggcataaactgaggtgacaaggaggtgctcttggtttgctcacaatgtttcctctggttttggtttaatctcccattgactaaccaggaaatagagaggatcagagaagtttggggacctgcccgctgtctcacggagtgagtgacagacccagtgtacctgacttctgccgtggagtcacccgtgattactaatgacaaagggacacaccaatgataacctctcccaagcagtcatcacgcactggccatggttagaagggttccccttacagcctctccctcagtgctcacaaccttcctgggaactggcactgtctgtattctccttgggtaggaaatgagggaactgatgccttgggaggggactaactggccaaagacagaactggggctcgaaccccagcagctggtatagtcaaccactgccatgatatcatcatagatacctgcttggggtccctccatccctcacatcacaggtgctcagacagaactttgcccaacacactcctgctgcacgattaagcagcatgccaggtgcagtggctcatgcttgtaatgccaaaactttgggaggccaaggtgggtggatcacctgaggtcaggagttcaagaccagcctggccaacatggcaaaaccccatctctactaaaactacaagaattagccaggtgtgttgacacaagcccgtagtcccagctactaaagaggctgaggcaggagaatcacttgaacccaggaggcaaaggctgcagtgagctgagatcccaccactgcactccagcctggaccacagcaagactccatctcaaaacaaagaggccaggtgcagtggctcatgcctgtaatcccaacactttgggaggccaaggtgggcagatgacgaggtcaggagatcgagaccatcctggctaacatggtgaaaccccatttctactaaaaatacaaaaaaattagccaggtgtggtggcacgcgcctgtagtcccagctacttgggaggctgaggcgggagaatcactcatactgggaggtggaggttgcagtgagctgagattgcgcccctgcactccagcctgagcgacagagcgagactgtctcaaaaaataaaaaagaatgtggcatgtcccaaatgtgcacattcaggtgccttcctcacaattctggccttacacataaaactatgacttatttcatttttaaatccatttctattatttcaaactaaaatctattgcaaaaggatattccgtggtcctaccttaaccacaataactgccacctgccattcaccaaaggtaactgccatctaccaataataggtacaaggcacacaaagcaatgctatggaatttgagttgggtactggttcccgatgaaggctctgaacttgactttcttcccttttttcaaaaggaagacgagcaaagtctagagaggtgttaaagaaacactagcaccaaacagactttgccctgagagagccgacaagggactggctgtctcactttgtcactcaaggtcactgaatgctgtgcctcttaggagcttcccaagtgcacacttcacacgtggagaaacgctgaaacagggtttggataagcccctgacatgccaatgtcccctttcccaccaggagatcacacctggccctgggctgcagacacagcacagggtggctgctcatccgggcgggtctggcgggggccaggcagggtccaggctgtccctgggtttgaccgatgtgtatgtccttgcccaccagcacgccgagctacaactacgcgcccaacccggacaaacactggatcatgcgctacacggggcccatgaagcccatccacatggaattcaccaacatgctccagcggaagcgcttgcagaccctcatgtcggtggacgactccatggagacggtaggcgcccgctgcatgcctcttggtgggcgtggctccgaacccccagccaggccagggccgagacctcctggcccttcagggttttcctggaggaatagaaatcaaaggcagaatgaagaggccccatgtgctagacctggggaacagcttggagcaatccagacaaaagcctcttccttcatgaaacattttctagatctgtgttgcccaatacggtaaccatatatgctagttatattttttcctgctatttacatttttgaacacatttattgggatgtaattcacataccatacaattcccccaattaaagtgtgcaattctgtggttttaatatgcccagagttgtataaccatcaccacatccatgttaggacatttttcttaccccaaagagaaacctcacagcccttagatggcccactaaatctccctcacccccagccccagacaactggtgatctctttctgtctctatagatttggtgttctgcacacttcctataaatggaatcgtacacgctgtggccttctgtgcccagcgcctttctttcacttagcgccacgtgttcaagcttcacccctggtgtcgcatgaatcagtccccctcattccctgttattgctgaataatatcgcattgtatgggtattgtcacattttatttagccatggctatttaaactgaatgcagtaacattataaagtcagttcttctgtcacacaagcctcatttcacatgctcagtaggttcgtgtggctggagccaatatgtgtccatatcggacagtgcagacattaacacggccaccaatgcagaaagttctgccacacggcgcccttccagatcgcaagatcctgccataggctgcagcccaagtttcactcattcattcattcacctgacagcattattgagtgccagtgtacgtgggatacagcaggcagggaacaaaatgacaaaagtgtctgccctaatggaggcagcatgccaaggcagggacacagatgatccacagataagtaaaagagatggatgccaagaagggccatgaagaaccgtggaggggagggcgggccaggggtgacaagaggcaggaaggtgcagtgacaaaggggacagcccctgggaaagttgagcaaagacctgaagcaggggagggacggggcctgagatctcaagcgcctgtcaccccgggtcggagacgggccaggcacccagtccccactgtcccttgcctcctcgcccgtgttgcagatttacaacatgctggttgagacgggcgagctggacaacacgtacatcgtatacaccgccgaccacggttaccacatcggccagtttggcctggtgaaagggaaatccatgccatatgagtttgacatcagggtcccgttctacgtgaggggccccaacgtggaagccggctgtctgtaagtgtgtcatcccccagggacccagggaggcccctgggcccagctcagggcttcaaccatgcagcccaaacccaagcccaccctgggtggcacacagttttcgcagatgtaccccagggccagcggaaagcaattatgtcatgcatgttatatccctctgctggggaaggagaggccgggagctgttagcacctgtggaaacaggtgtggtggggccgtatgccaggaaatccagggagctgggctgtatacgtgtgtgcgcgcacatgcatgtcaccagcgggtgggaatggtgcttggatttctgttctgggctgggcagtctttgagcctggaggttgtcagggaggaaccccggaccacagcacaggcagctggttgtcagctgggatcagctgagccaactctgggcagcagcacaaagggaaatgctcttccctcccatccttcctggaggaccacgtgggccgcagccctcagccagccattctcctcgggctaacctttgagttgacatgttctggcagcgaacatgctgcgtctggggcaggggagcggacaggccactgttcccggcagcagcttccttggatcggctgggatattatggaggctggctcaaatgaggtttttgaaaagcagatgtgttgctattaagactgtcatttggtctgccttctgctcatgcccagatgtgggaacacacacccagcactcacacagggctggctgcggaattcctcctgaaaaggcgttgacagtgcagtgtggaattccagactgacatgttcccactgccttggacattttgcgagaattccaggaggcaggctgcatgagttcaaggccagagaaagtgatgactgactgttgaccttatcagatcacgcccgtctttggctcttagcgtccccattggactaagagctgtaataacgacagtccacacgtatggagtgtctactcttcagggcctggtctaagaactacataataattcattgcaagccgggccctgtggctcatgcctgtaatcccagcactttgggaggcccaggtgggcagatcatttgaggtcaggagttcaagaccagcctggccaacatggtgaaaccctgcctctactaaaaatacaaagattagctggacatggtggcgtacacctgtaatcccagcactcaggaggctgaggcaggagaatcgcttgaacctgggaggtggaggttgcagtgagccgagatcatgccactgcactcgtctgggcgacacagtgagactccatctcaaaaacaattaataattcgtttcagcatcacaactgccctgtgacgtggatgctcatagtagccccattttacacccaaggccactgaggcacggagaggttaagttgcctgagtttacagcaagtaagggaaggggctggggcttgaaaccaggcagtctctattcccatctgccacgcctctcagaaacttcaaaccatccctgtgaacagaaagaatctgacccactgagggctctacaaacactgacattgggggtttggtcagcctcggaatctgtgatctgactcatagggcccaaaaccacatcccacatggtcaagaaaaagagagtgctcatgtcaggtttgggaccaaagacacacggtatctgtcagccaggactcctttggttgcaagcagaaatgacctttgaaccagataaggcatgtaagataaaaggaacacagtaactatagttactgaaaagtccatgcacagctccagcctcaggcatggctggatccagcagtcttacaatgccattggaaagctctcatttcttatctctcagtcccacttccgccgaattggcttcattctcaggtgggtttttctccttgtggcagggtcagcagctccagattttcagccatcctgtttaggaagccaaactgctttgaacagaagacctgaggctgactcccactggcctgacttaggtcacgtgtccttccctgaaccattcactgtagccagaggtgacagaaacccttgagtaaccaggctgagtacattgggcaggggactctgaatggggccaggtagttcctacagaattagaagctgtgacacagagcaaggcattggtgctggccaggaaaagcaaccactgtcctccttcccctgagcctgggggagcgggaccactggacaagctcagccccattagctgccggttgctgggttctgcagagcgcccgtcgctcagcagtcttcccagctccctcgcctctggattcagttgtagcgcctcacgctggccttcgagccccccatgacacagccccatcttcagcagctgcacacatgcttggcagcctgcccgacgttcacagggcactggactggggagagatgaggggttaaagatgacggaaaccctaggacccaggccctgccctggtccccagggaactagcggggaaggcactcagatgctctgacgggactgtccaccattcaacaggtcctgggtcctgtgctgggcacaccccttaagtcccttaccctacattgggaatgccatcagccagaaacaagagccaggagaggtggctcatgcctgtaatcccagcactttgggaggctgaggcggatgtatcacctgaggtcaggagttcaagagtagcctggccaacatggtgaaaccccacctctactaaaagtacaaaaattatgggtgtgatggcgcatgcctgtaatcccagctactcgggaggctgaggcatgagaatcgcttgaacccaggaggtggaggttgcagtgagccaggatcatgccaccacactgcatcctgggtgacagagcaagacacctctcaaaaaaagaaacaggagccaggaaaggtggcagatgtatgggaattcacttagccaatatttactgagtagctcctctgtgttctaagggtataagtcctggagatacagaagtgaccacctgagccagccttcctgcagcttagagtctaactgggcaatagacaataagccagagaaataagtaaattatatagcatatgagatggtgataagtcttcaggagaaagataaagcagggagggtggggagggggcgcagttccgaatagggtcctcaggaggggccttgtgttgggtatctgtgctgcagaacaaactgccacaaactcagcagcttaagacaacacacatgtacaaactcacagtgtctgagggtcagaagcctgggcctagccctgcagggtcgtctgcttaggctgaaatcaaggtgccggccagggctgtggtctcatccagaggcttgactggggagcatctgcgtccctgctcatggggcaggtcaagtgcaagcagaggacttgaacccatgcagtctgcctcccagactgctcacagtctagctgctgatttagagtggcttgcttcttcaaagccagcaaggggagaaagaaaccagagccagactgctagcaggatagtagttgactatctcataacacaaccacgggagtgacagcccatcaccttcacaacccactggttggcagcaggtgcaggttggtccacacccaaggtgagggggtcacattaaggtgtgatcaccagggacagggattctggggaccactgaggcctgtcacgggcctccttggtcatagagcaaagaactaaaggggtgagggacggtggcccctgatctccagggaaaggacattccaggcagagaggatggtaaagaagaaggccctgaggctgcactgtgcctgggctgtcaaggaacagcgaggagccagtgtctgccccagaggttcaggggaagggttcaggaagggccaggatttgggctggctgtaaagggggggtcgccttcactcaggaagtggggacaggaagggcaggagggggacagggtgaggctgtcagctcacggcatgagctgagacacagaaactaagggggggcgagcacagagtgggggttcagctgaatctgggccgcagaggggagctgctgaggttgaggtgccagactgcagcttccatacctgcagatgtcagcctcccacaaactgctgcccacctaccgctccccaccccccacgcgaggctgaggcaccaccacctgagtgactgagtccccgatctcctgcctcccccaggaatccccacatcgtcctcaacattgacctggcccccaccatcctggacattgcaggcctggacatacctgcggatatggacgggaaatccatcctcaagctgctggacacggagcggccggtgaatcggtgaggacggagcagggcaggtgttgagggggccgggacattgacctgcgggaactcagagcaaaaccctgtgggtctagaacgtggggtctccaagggtcgggagctggggttctcaggtcccgccatgccaaccacttacctgctgtgggagagaagcatggtcccctctccgagattctgtcttcccatctggaatgtggccaaggtgaccagttggggaccttctctgagctaaaattacccaaagcttgaaatgatagcagcagtgatggtaggagatggtgctaactgcacggcgcttgtgtgtgaggccctattctaagtactgtgcagggaaatctaggaatttgatcctcacagtaacccagcgaggtggacattatcatcatccccattttaccagtttggaatctgaatcccaaagcgattgagtgacgtgtcggaggtatcccagcaagtctggatgtagctctgggaattcagatgctgactcaccacgccccataactttaatgctggagggtgtgatgggaacatattcctaggtgtccagagaggcagaataggaaccgtgagggtgagcaagtcagacaggtgggaggtgggctgagtcagggcggggaggctggtgtggccgcagcgacatctggtggccagcgctcttaacagccaccaggttcctggcctccaggtgctacttcaactcctggcttgcacctctggcagcggagcccttcccctgtggcctcccagaggctccagccaggcgagcactgtgtgcccacatctggctgccctgtagggggaccgtgtccattgaggctcctcccctgactgtgaggccaggcaagctgtaatggtataaaatggacatgtttggggacactggcctgggagccaggacacctgggggtcaggggacagggtggaagcttcccctctcagcttcagagtccccatctaggaaatggaaatgaccaggtggcactggatgaaacatacaaattacatacatgcaactgcaaagcaccaaagaagaaaatactcccaaaacccaatgcaattaacctgacatcaaggcaaccactgcgcctgacactgagctcaagacagagctcaagacgccaaaccactgcgcctgatgctgaaccactgcgcctgacgctgaactcgagatagagctcgtctagtgccgggggagttgctgggcttcctgggaggggcttgagatgtgtgtgcgcgcacacacacacacacacacacacacacacagttacttgggtgggacttacagtgattttgacctgggtcatttctactgtgtgtgtctccagacccaagtctctggggaaggggtggctcaactcagaggagggtgggcaatgctctagtgcccagctgggcacactcaccacaattgctgtccaggctgaccgtaaaccaaggctgactcctggtgccgtccctgctcctgggggaacggggggtcgtgggaagccctcatgttgctgagaagcaggagccgtgcttttttccaggtttcacttgaaaaagaagatgagggtctggcgggactccttcttggtggagagagggtgagtgccgggtcctgggagggacacccctgcccacctccctccctctgcccaggaagcttctgtagccccaccgcatcatgctattcaggagctgcccatggctctgaagttggtccaaaggcccctaaacacaaagcccattcactgctcctatagacacagaattggggtctgaggtcacgtgtacgcttttggcatgctttgtccagcctctacaatgtcttcaatttatttaatttattgccaactcatgcaatttgggaagtttcttataaaattccaatgtcttaagtttcctaaacatcagaagacccgggcaggtggccctgcgccctccactgtgaggaaaagccggagccgagggggcacccctctaggtgggcacacatgcctccggggctcctccagagctgagaggccggccccgcggctcctgctctctgccccatagcaagctgctacacaagagagacaatgacaaggtggacgcccaggaggagaactttctgcccaagtaccagcgtgtgaaggacctgtgtcagcgtgctgagtaccagacggcgtgtgagcagctgggacaggtaagaaggctcccttccctcccaacggctccccctcctgactgcagccggccctgacctgcgaggctctgagagccgctgagccagcagggccagggcctcccaacgggtagtcctttgctgccgtgtggtgcccaagatgctgtttggtggtgcaggatgatgctcacaataagtgattcatttctcagcagcctttggaccctgaccgtgtcagaggccaagtgtcccgtgggtgtgtgtatgcccttagcgcctctctagcccttgccgatctctcttgcacgaaggccccagcaggagttaaattattttattttcaccatattcactttgacagtatcctctttgtgactggttttccttttataggagtaataagacatggctttttaaaataaatataggtaaggttttaaaaagtgaattgattgcaagagaaatattaaggaaattatggccaggaacagtccgtggctcatgcctgaggtcccagctactccagagctgaggcgggaggatggcttgagcccacgtgttggaggctgcagtgagctatgattgcgccactgcactccagcttgggtgacagaataagaccctgtctctaaaaacataagaaaaaagaaaattatctgggaagtatcagagatagccagaaactgacatgtttgggaaagcctgaaggaggcttttctgaggctggaaagccagggcaggcttggagaggagggtcgggggcggggcagggcagggaggggagtgggatggaaactctgccttggctggcccaaggggtgccggaggtgtgtccctgccctgcctgtcaaaggctgggactttgagctggggctggagctgtgtgcctgtttcacctatgagaaaaagcaaaaccagggccctggtattgaaggccaaggcctgaagtggatgcgtttctgatggactgcatttgaatgactccatcttaacactgcacacagaattagtacaggcccatacaggcctgactgtgcctccccacccagtgtgtgtttgtaaacccacagacccctcttagtcacacaattaacccgtatctgccaccgggcaggagctgtggatttcatccctccgttgtacagcatgaatgcgtccccccgcttgccaggcactgtcctaggcgcagggccacagcctcgaacatgctcaacagaagctcctgccctcccagagctgatgttctggagagagttcagccttgactttgtaccgagatcccagaagtggttctgattttagttctgggctaaaaggagtgaaatgaggaggccaggaagtctttgcccctcgacgagggaacgttgtcaagtcccccactggttctttctgatgtctcccctgacccagatcagggcttgggcagccagaatgacctctttgctggggccaagaaagaggaggtatcagcattttccaaacaatcagagcacaccactgaagccaaaggaagagagtgctgagggcggagtttggggcacttagcctaggccagctgggaggcagcaacccacggcccccgacccagccccggagctttggggacctcaggctcagacgtctgccccccatcccaggcaacggccctgctcacaagccggtactccccgagtgccgttgccatgtccctgcttgtgccgtgccttctggaatgccctgcccagtgtagaagctgtaccctgtggcccgaggacgtctcttaggggcctcacacccagccatagcattgtcttgggtaccttgtccgtgctaccccacgtggtagatgtttttttgtcatttgctgaacaaacgtgcccaggaaccgagctcatgtgcatctgtctgtctcccggtgacacggggacatcctaagggcagggcccggctagaattcatgtcatcattgccaaagcccagaccagggcccaggccgggcaggagtaaatgtgccctgggcacctcgtaatgatgatcatcacgggcaacacgtgagtgtaagctctacctccagccaccctatctggcaggtatgttctgtacacggggaaactgaggcccagggctcaggcaaactgcccacagcctcacagcttcaagtggtggaggcaggatttgaacccaggtagttgggctgcgggaccttcgttctcagcagctgtagggaccccaagtcaagccgacactggcccagccctgtggggctcaggcgccgcccccgccaggacagcctcgggacgggccatgtggacacggcttctacatgagtagttgcaggggcagcaaaccctttccgcacaagatcagacagtaaatagtttgggctttgcaggccacatatttgtttttgttcttgctttttacaactctgaaaacgtacaatgtaaaaaccgtccttggtttgcaggccatacaaaaacaggctgtgggctggagttgactagcaagagggctgctgtttgccgacccctcaagtcgtgccccagctgagtttgttgggttggagcggggagcaggcagtggggaaggagaattccaggcagagagagctaagtggacaggaggctgctcgccagcgcacacagctcagggcttcacgcagaactcagagccctggcttttcttgaaaaatcagacctgggcttctgggcctgtgctcccctctggcgacagtcagatgggtatagccggtcacagtgcccactttagcctccccaggtcccccaggcgcttctgggctggcctcattcagggccatgcctgctggcccatcagtctacttctgcactaaggaatccaggttgctggaagggcctgcatgcattgaaggggatgggagggtggcagggcgctgtgaatgcaattagattcagcctccaggtgagaacagatgggcgggacaggggcaagatgagcaggtgaaaggcaccagggccttcaacggcagcgggcgggggcagacggtgcagcagagggttgggggggatggtggcaccagactccacacttttccttacagctcttgcacctcccagttgtgtgacccaggacacatctctctacctccgtgtgcctcatcttgaatcggcacagtaatgacagcacctgcctcgtagggtagcgtgaggtgtagtaagcaagttaatatattaacacacagtgcttggcacatgctaagtgctggagagacacagggaacagatctgacccatggcctggaaaggtcactttggcacagaataggccctaaagagtcactgggtcaatgggctggagcagctgtggacagaagggaagagaatccagtttacaggtggttgcagaatcccgtgaggggatccaggaggctggaactggggaagagcagaaggatcaacacgagagatttggacagtgattctatctacattcagcgtctgaccacaggcctggagttgagtgcacacgtggagcctctgcacacactgcactgattgagtctgggaaggtggtcaggggagacctccttgcgctggagcagacgggaaggaagagaagcctccagcagcaggaagggctggagaaaaggcattctaggcagaaggaacagtgagcgccaagtccctggggcagcagcccacaggggatactggagagagggctgagggagaggaggaccgatgggtaggccagggccagattgcagaggatgttcaaagactagtatcaggagcttgggtcttgtcttaaagacagtgggagccattgaagggttttaagtaggagagtaatatgatccaacttgccctttaaaaagattcctctagctgccatgtgggtggattttaggagcagacagaagcaggtaaccgtgagagtggtggctgtcggaggcatctcgctgggggatgatggtagctctgcccaaggttcaagcagtggcagtggagagaagcggcattggagatagcagaggtggggctcggtaacagctggatgcaagcagggagagggatgtctccagggtggatgggggtggcaggggagaggcgggtttaggggagcagatgagcagctggccgaggccctggcatgtctttcagaagtggcagtgtgtggaggacgccacggggaagctgaagctgcataagtgcaagggccccatgcggctgggcggcagcagagccctctccaacctcgtgcccaagtactacgggcagggcagcgaggcctgcacctgtgacagcggggactacaagctcagcctggccggacgccggaaaaaactcttcaagaagagtaagtgtcacaacctggctgagtgggacaggaggagagagaccatgcctggggggccccattcattcactccgacagttccacagagactgtcactttgccaggtggtgatctaggggctggggacacagccacatctcctcacgagccacccattctagtggggagcagtagtaataaacagataaggccaggcgcaatggctcacgcctgtaatcccagtactttgggagtccgaggcaggcagatcacctgaggtcaggagctccagaccagcctggccaacatggtaaaaccccgtctaaaaatacaacaattagccagatgtggtggctcacgcttgtaatcccagctacttgggaggctgaggcatgagaatcgcttgaacccaggaggcagaggctgcagtgacccgagattgtgccactgcactccagcctgggcaacagagcgagatccatctcaaaaaaaaggaagaaacacacatacaaggttctgtattgattggctggtgaaaatgctaggaccagaggttcacaggaacccagctctgtgcttcccctaggagccatgtttcagcgttcaattagtcagtgtttgtggtgagtttatagaactaccctgggctgggcgcggtggctcacacctgtaatcccagcactttgagaggccgaggtggacagatcacttgaggtcaggagttcaagaccagcctggccaacatggtgaaaccccatctctactaaaaatacaaaaaattagttgggcgtgtggtgtggcagcagagtcgcttgaacccgggagcagaggttgcagatagctgagatcacgccattgtgctccagcctgggcgacagagtgagactcggtctcaaaaaaaataaaaaataaactaccctgaagaacaaaaatagactatagttgagtggggaaaagcctcactcagctgaagaagtgtctacaccttcacacctcattctcggcaagggccgaggagaggacagtcagacagaagccagggagcaggcgaagtggagagagggactcttctagacccagccagaaggctcagccgccaccctgggccatcgcttcaccattctgaggctcagctcccaccatcaaacaggaagaatggtccctgcatgactttaaaacaagaatgagcctgtgccctgaaaatgtgtggaggcgtcggggtccgccggctagaagtgtgccctccaaggctgggcagcttcccacgtagcccatttctctggcctaaggacagccaaagcctaatgagagattttaggtgttgtttttaaaaaaaattatggtgaaattcccataaaatttatcatcttaaccatttttaagtatccagtagtgtcaactatattcccactagtacgcaacctatctgctaaatgaactcttcatcttgcaaaactacaactgtccccattcaacgttatctccccattctcccaccccgctcccacccccaccccgttctcccaccccgctctcccaccctgctgtcaccccattctcccacccgttctcagcaaccactcttcttctctatgagcttgactgctttaggggcctcatgtaagtggaattgtacagtatttgtccttctgtggctggcttatttctcttcgcataatgttctccgggttcatccacatggtagcctgtgttggaatctccttcctgatcgggcacagtggctcacgcctgtaatcccagcatttcgggaggccaaggcaggcggattgcctgagctcagaagttcgagaccagtctggccaacaaggtgaaacccgtgtctactaaaaatacaaaaattagccaggcatggtggtgggcgcctgtagtccctgctactcaggaggctgaggcactagaatggcttgaacctgggagcgggaggttgcagtgaactgagatcatgccacttcactccagcctgggtgacagagcaagactgtctcaaaaaaaacaaaaagtctccattctttataagacggatgatattgtaccacagactagttagagattgaggtctctgacggcaggcgcagtgatctcctctggtccagccagccaggcagcaaatgtcttcatcgtggagcagataagtctctctccataacagcccagccactgcctgaaacaccgtttcccagctgatgaccctccgttacatttcctcaccagctgattaggaactactacattaacttttctagctgaacagaatgattggtttccagattggattacacagccagcatctccttgcttcaatatgtggcacagtcgataatctttaaataatacaagatctggcagggagaaattcagctcttttccccttattaatgcttagaggaaagaaaaatacctaaaagtagctgagagtcagctcagccctggtcagaatcctcatgtgagtgtaatgtcagagccgggacctgcacctctcaacagccctgtgagcagggcaggggtgatcatcaggggatgatggacaggaaagactgggtcacgtggctgatttggggactccagccccatctcctgcctggcattcttccccctgctagagtctccgacaagacactctgtccctcttttctgagcagtcagcctagagcaggctgaactgggggctttctgtcccccaggggacacttggcaatgtttggagacagttttggctgtcacaattgtgtgtgatggaggggtgctgctggcgtctagtgagcagaggctatggatgcggcaaaacatcttgcaacgcacaggacggcccccaccacagagtttgatctgaccccaaagtgtccgcagtggtaaggttgggaagccctggcccaccttgatccacggggatcctggctgtggcgtggggaggttaggcagagccagccagctcacagcagaagggggacccaggaacaggagaaggggacgaggactcgggggatgggcccagctgactggggttcattcatttcttgaactttgtgcaagacactgagattagagttgacctggagagacacggacttggacctcatggatgaaacaagatgtgaacaagtgaacaaagggccacttccgctggtgaaaaacgcatgaaggagacgcagcggtggcgggactagcagagaggggtggcggctccagaatggcgctcaatggacatttaatgagaacaaagtacagaaaggagcaggtcttgtgaccagccagagagcaagtgttctgaggaggaggaagatggagtacaaagaccctgtgctcagaatcagggcggtgagtcccagtcacagagaggtgaccggtgtggccgagggtggtgagaagcaccatgggcatgggcagccacatcacacaggcggtcaccggcgtggagaggcagggagtgggcccagggttgtcaccttaggtgaggacgtcagctgcaggcagagtccccaccccctgcagtagctggtccacaccagctcatcaggcatgaatgcttcactagttccgtttcgtgccatcctccaaggagcctttgtagggtaggcaccatcctgagaagttacccaaatcgccggggccacacatgtgctcaggggtttgcacctgagccatctgattgcagagtcaaagctcttggccgccgggttatgaagtcctgtcccattccctgttggtgtggcaggaagggtacctccaggactctggacatgaacacagagtgatggggagagcaggtagtgtggcttcagtccaggaaaggattcacacagggctggcataccgcttctgtgaagagccagagagtaaaggtcttgggctttgcaactcagccctgcgactgcagaggtataagggaatgcgagcagctgtacccagtgaaactgtattcacaaagacagatggaggctggcctgggcccttaggccatggtttagggacccctgaatctagagctgggagatggagggtggaaagaggcaaagcagctcacttatgagccgactgagacaaaaggagtggagaggacacgctgggtctatttcctgagcctctcggggcaggacctgcttggcacagggaccatcctcggcaatttgtgtacttgcatcgggagactaaaccgagggagagaagtgcccaggagaaggctgccctgtgtcagaaaaggcccaaggctctgctggagaggggaggcctttcccggcccctcaggatccttcggcccttgtgactctgatgcaaggtgtctgagaactgaaagatacaaaacatcccccaagagtgggggtggcacccgggccacgtgagaagggagccctttcctccctccttccactgccttccgccaccacctgcctccagctggtcctctttggtcaccatctcggggtcacttgggatccaacaaaacctgggtcactaactggctccaggcccttctctttaaatgaggcacatctggagaaggatgacaactgcagtgcgtgcctgctggggccagacatgtgtcaggtgggcagaggttttaaaacaggaaggagtggcgggggctgtggccaacagggaagacagtgggcagccaaaggggccgcccatccccggcccgtcctgaccatatggaactgtgggcccgtgagacatctgtttcctttctggaagctggaaatctggatccctacatcaccgccaccacctcccctttttctttaatgttaccaactcagatttgtttttgagacatagaagatacaggctacctggggtgtcacttcagcctgcacccctgagttttcagcgtcagggcgtatgcaaaagcccccctcagccttgttgccggcccacctgggtgtagcacctgcctaccacctggtgggcagcctccagctctctgggactcaaagaagctaagtggcttccccagtccccgtccatttctacccagagacaggcactgcagggcccctttttcccagtttaaatcaacatttttacatccatgatactttttttcctttttaattgaggtgaagttcagataacatcaaactcaccatttttacaattatatacaatgcagaggcatttaataggttcacagtgttgcacacctctacctagttccaaaacatttcatcaccccaaaagggaaccccgtacccacaaagcagtcactcctcactaccctctcccccagcccctggcaatcaccaatcttctttctgccgctatagatttacctattctgggtagttcctataaatagaatgtaacaatacgagcccgctttgtgtctggctggtttcactccgcctgcttttgacattcatccacgctctagcgtgaatcagaacctcgctcctggttctggtcgcatattccgttgtacagatgatgtaccgccatttgtttacccgcaagcagctctcgcttgaaatcctcttgagtcagtggcttcttggctccaggacttccgtcttgccggtgtgatcacctcgaggccctcccctgcggtccaggatctgcgagcaggcgggtagattccacgacccctcgagtcgcaggcaaagctgagcctcatgcttggaagcccggccctatcttgatgaaggacccactgccctgggagcctggccagcctttcctgcctccctaactctgccactcctctaatgcccacagagtacaaggccagctatgtccgcagtcgctccatccgctcagtggccatcgaggtggacggcagggtgtaccacgtaggcctgggtgatgccgcccagccccgaaacctcaccaagcggcactggccaggggcccctgaggaccaagatgacaaggatggtggggacttcagtggcactggaggccttcccgactactcagccgccaaccccattaaagtgacacatcggtgagtgtccaggtggaagtcgagggtgaaggggacaggacagacctcggcaaagggcttcccacacctcttgggcccctgaggaccaagatgacaaggatggtggggacttcagtggcactggaggccttcccgactattcagccgccaaccccattaaagtgacacatcggtgagtgtccaggtggaagtcgagggtgaaggggacaggacagacctcggcaagggcttcccacacctcttgggcacctgggctgctccccctccaccacctccgagccacacgtgatcccttctctcaagcaggtgctacatcctagagaacgacacagtccagtgtgacctggacctgtacaagtccctgcaggcctggaaagaccacaagctgcacatcgaccacgaggtgagtggagagcgggagaggagcatgctctcggccaccacgggcctggcaggacccccggttcacagtgggagggcagtgaggccagacccagggaagaggctggagaggtgaagtgaggtccccacagattcctcaacgcggggataggtgtcagtcccagcatgagacagatagcttcctgcccaggccgtctgagggacgatggcttagccacgttgtcccccttttgacttacaagaagtctacgctacaggaggcctttcatcaaacccaggggagacactggaggcctcagtgggctcagcgggttcctgcgcaggccaggccggaaaaatgactcggttcccttgcaagggctggctggaggagaaggcgggcttccttcaggcagaacaagtacctcctccccacccagacatgccggtgcttgccctggggcccggggagtgcaggctgccgctgctgagcacagacacggcagcgtgggggcagtcaccaggccaagtctttgttgtccagccttgaaggtttcaaggcctcctcttctgcccctccctcagattgaaaccctgcagaacaaaattaagaacctgagggaagtccgaggtcacctgaagaaaaagcggccagaagaatgtgactgtcacaaaatcaggtgaggcagtagcaaagggacctccctaagaccccactctcctacaggacagttcagttcatcccctctcgtgattgacccctttcattttttatttttatctttatcttctcccctcatggcattaaaaaaatccgtaatttacctccctgttgtcagccagtgtggcacacggacctgctcctcagccaggctggcgcccagattccagtactgctagcaagagacccgtgctggctgcgcagagccggctccaggccggaaaagtgcctctgccgattgccctttcagaaatcccccatgtggtttgaggtccatgttcccggcttaggggtcccctggcccaaaggactgaactctagaacagctctaatagaacattctgtgctgacggaaatgggctatatctgcactacaccacacgtggctggtgcatacttaaaattttggctagtgtcactaaggagccaaattttttattttgcttaattcaaattgaagtagccacctgtggccagtggctaccatactggacagcacagctgtagaagccctgctgtctttccagaaagtgttgcaaaacacaggcttccctgtgttgaccccgaccaagtgtgagtaggcagggtggtgagggaaccaacctcaagatgctgaggctttgacatgtaaaattaaccatcaaaaaagaaaggaaaaaggatgctgaggctgatgcacctaaagccaggcccagcttctagtcgtggctaaattacaattaacccaacctgctaaagtctagcaaaagtccaggcagagtcctggctcatgcttggagaaagaagccactcaggcaggcacctgctgccctgaggatagggtcatgccctacccaccaccaccccagaaggagggacaggggtggggcagcagcaacacatgggagtcccagaaatcacagcttgcacctgccagcggagccctctgagccactcctgaagcctggggctgggggggtctgttacagctaccacacccagcacaaaggccgcctcaagcacagaggctccagtctgcatcctttcaggtaagagcagcttgaggtcctggggaagagatgcagaggcctgcatgaggaggtggccctcccttaagctaaaactcagaagaaaaggaaagaagtccaggcccttccctgggaagtccacggtagccctcgaagaggccttacttcccaatcaacactgagcgggcctccgacgcccccttgtggctaaatggggttaccgcaactccaccaagcagggcaggacacaggaaggaggggaaaggggtgtcaacaggagtcccagtagctgcctggttctgtccccagcttgtgcccccttgggagttaaagtagaatgacaagacccaggttctggtcccggctctgccttggagcagcactgggacttgggaccctgaattgctatgcccatggctctctgttggagaagcctcagcgaagcccttaggtggacaggaagagcagagacatggggtcactgatccctcagaggcccaaggtgtgtgtggccctctgcgcccataggaagggcctgcaagagaaggacaaggtgtggctgttgcgggagcagaagcgcaagaagaaactccgcaagctgctcaagcgcctgcagaacaacgacacgtgcagcatgccaggcctcacgtgcttcacccacgacaaccagcactggcagacggcgcctttctggacacgtgagcaagcccagggcaggggtggacaggctgaggcccaggggttcaagaaacttctccacttagtgacccagacctctctcagaaagggggtccccaacaccaggggtccacggtgctcgggacagcctcttggcatttgacgaactggttttaggggctgtccctgacaggaatcactgttggcagatggggcctcctcccgcaggcactcaggacatgctctctcttccttggcagtggggcctttctgtgcctgcaccagcgccaacaataacacgtactggtgcatgaggaccatcaatgagactcacaatttcctcttctgtgaatttgcaactggcttcctagagtactttgatctcaacacagacccctaccaggtacaggcaacccgagctagagggatgggggtgtggggtacaccagtgctgccaggtaggccccccccaacctcagggaagtgatgacaaattgtccaagtcccactgagtccctgagccggtgggagtaagttgtgaagctgctgagattgggggttctgtgttcaatcagccttttttgcctccatcaccctgctttttgcctccatcaccctgcgtgtgtaatatatatggcttcttccctctaacttaacatgcagcatgcaaccaggttttgccggaacttgtgaagactcctaacactgtcaggctgtaggatcaagccaaatatcacccactgcagggcctacacggaccgcgcagctaatataacagtaacacactgcaccaagcactctgctaagtgcttccgtacagtaagccatctaaacacacatgcgactgaagtggcccaggaccacacaagaccaaaaggagcagtggcatgtctggtcatcggaacatgtgggcccttgtacagggacagtcactactgagctccagcactagagctttcctgtactgtggccttggtattgcccaggctttgacctttcaagaaaagcctgaaataatttaaatgaaatctgatgtttaaatgtcagcagcacaaatgctttaattactatataggtgtgcagtctttctccttagataggttcaccctcatactttaccaaaggggtaggttaagtccctcaccggtagctcccagactacacaagaacccaggccacttacccgtcctttcatcaaatggctgctttgcaatcaggaggagctgagggcccctgaatgaaggctgctgataaaaccaagacttggaaggctttctttccaagcttgggaagtttcctgaccagtggctgcagaactccaacgttaaatacacagacgtggtttttattctcctgagttttcactctcatgaagagtgaacctggtgggacttgaagccaaaaagtcacctaactcttccaaacgctggctcttgcagaagttggagtaaacaggtcaccagcccctagcaccttccacccgccacctgcctgaaatatgtcccctggttggtagaagggcagggcgagagtccctgtacttaccttgttgacagactaccttttttgcaaccagctgatgaatgcagtgaacacactggacagggatgtcctcaaccagctacacgtacagctcatggagctgaggagctgcaagggttacaagcagtgtaacccccggactcgaaacatggacctgggtgagtaggcaccccaacgtggggcccttggacagcagggtaaccaaaggaagggactcaggaggtggtgtctaccccaagaatgagcctgaaatcaccaggctttgggaggtgatacagttccagacgagtcatgggagcccctgtccatagcaggcagatgacctttaacaagctgtgattcctgagagaggaacacctgcaccaactgcccaggaaacacacggaattccgtctcatttcattgtcctcccttttgtccactcatgcattcaacaaacacttcctgagaacttacacctgaaaccatgttgactaaagatgaccccatcctcgctgacttgtgtggagccagtgttgtcctaagaagagcagtccacagcaggaggcctcttgcttgtatggaaagggtaaaactggatggtagaatccagtgtgactggggaagggcactgctaaataaaaccagggtcagacctctgaactgagtcctgaaaagtaggatgcaatcgaccactgagaaaacgtggagggctggcgctccaggaagcttaaagtgtgaggagcagaaagcagctcagggggtgcagccaacacaactgaggccagtggagagtggcgggagggcatcgggccaccctgtgtggggcttcctaggccacggtagagtttagatttcatttgtggtgtatcaggaagccaatggagggttttaacctgggcaccgacatttgctaggtggagaatgggactttatgggagaaaacagcgaagatggcccagttatccagggagaaatggtggtggcttggactagaggtgggagcagtaaagatgatggatttcagattcaggtggtgaagcccccagacaacatggtgatgggaggtgcgggattaggagtcccaggtaaatcctgagttttgtttgggacaggacaaaatctgcagttttaagtttagaatgccaaccagatagatattttaagatgaaaaaagctaaacaggcatggttgctcatgcctatgattccagggctttggaaggctgaggtgggaggagacttgagcccaggagttcaaggttacagtgagctatgatagcaccactgcactccagcctgggagacagagctgtcgccccatctctaaaaataaaaaaaatatattaaaaaaagaaaacaaagctaaaagaaaaatgaagttcacttactagtgagagagagtggcctaaaaaaaacctttggtatttaaggtcccttggggaagggactgtgtctaggaggatgcctagagttcatgtcaggaaaatggctacacagcttaggaggaattcagacgctaccgtcggctctagttatgaagagggaagagctaatgtgtttacacaagatgttgcactaatacttctggtcaggagcctgatatgatcagaattttcactagtagcttcctaatctctgccactcaagtgctgctactcttgtgatcaaagtgcaatgacatattagtcactgtgtgccaggctctgtgctgagcattttacatgtgttagctgataagctttgaggtgaatcttatcctcattttatggaggagtaaggtgaacaaggtgggctgaccccggagcccacgcacttgatcctgccacatcctcgggaaaacttccccagagcccaaaggggaactccctcctgcacttggtcagggctcttggctttctgtcctctggagcacagatgttcatgcctgcatctacctccctcaccataactaaggtcagcgctgaatgaagccatcagggtcctgaaactgatcatggtgacactggattttaggcaatctacaaggctatctaggagacttagggcaggttcccctcataattcagtctacccctcataattcagtctactctgagtagggaacactatcagcatcatgggattgtgacaaaaaagcataagatggttttctggtgtgttggggttgttttgcctaaactatctgctcctgttttgtttttcatttctccttcatttaggacttaaagatggaggaagctatgagcaatacaggtatttcgttttattattaaagcctaaacaaagttctcctatcttggcccatccttcagtctcatctctgtgagtctgcacctgttatcttgagaaactgcccttccctctggtctgcccgagaccaggatcacccaccaaagataggtgtcacctaggagaccttctttgtatagttctttggggactttttctttcttggtgatggttaacattcattctcctttgacacttgaaaacttaggcagtttcagcgtcgaaagtggccagaaatgaagagaccttcttccaaatcactgtgagttgaggaaccagcttacaaatagaaatctggttctgaccgcttcattttgccaatgctattctatttgcatgccatttcttacataccaccctttgtttgttctcatgatgagggtgggggggaagtactaatgcacatctttccctaagaaaacacttgaatccatttcatgttttagattaatgccttgtccagtacactgctgttctcgctataatctgtgcttggtaaacttgagctattacttagaggttgagaagcatttaaatattacaaattgctaggcatcttgaaggctgtggctacaaaagtgctaactgatatacaacatcagtagtaggatggcctcattaaatggtttccaaaaagcccatgctacaaactctcactccagtgccattggaggctgacagggactaagagactggcaacctgtaaagttcacctctattctaaagggagcaggccagtttgctccctgcaggaatgggctgaggttcgccagattttctcattcgtctaccaaatccaaaaatgcaagtatgtgtgagaattctttatcattatcatctaatttgacattaagttaaccatgtgggcaaattatcgcccttggtgaactgccacttgcaacctctggtctactcatttcttcctttatatgcatataaacctgtgtggctttaataggacattagtaacaggtcacctaagcctttcttcggtgcttctagaattaaggtacagaatctttacatatcacaatctccttagccactattctgtccagatccttaaatgccatccttgccaggcattgggtgtataagtaaacaaaaaattgaggtgactaggtggtggcaatcccgttctaagtaacctagaaatattcattctcagcagccttgaagcaaagcttcctcagctataggaccgattaggaagtcatgataaagaccatgatagctaagtgctaagatgagtttgttttgttctttaggggacaactgtgggaaggctgggaaggttaagaaacaacagaggtggacctccaaaaacatagaggcatcacctgactgcacaggcaatgaaaaaccatgtgggtgatttccagcagacctgtggtattggccaggaggcctgagaaagcaagcacgcactctcagtcaacatgacagattctggaggataaccagcaggagcagagataacttcaggaagtccatttttgcccctgcttttgctttggattatacctcaccagctgcacaaaatgcattttttcgtatcaaaaagtcaccactaaccctcccccagaagctcacaaaggaaaacggagagagcgagcgagagagatttccttggaaatttctcccaagggcgaaagtcattggaatttttaaatcataggggaaaagcagtcctgttctaaatcctcttattcttttggtttgtcacaaagaaggaactaagaagcaggacagaggcaacgtggagaggctgaaaacagtgcagagacgtttgacaatgagtcagtagcacaaaagagatgacatttacctagcactataaaccctggttgcctctgaagaaactgccttcattgtatatatgtgactatttacatgtaatcaacatgggaacttttaggggaacctaataagaaatcccaattttcaggagtggtggtgtcaataaacgctctgtggccagtgtaaaagaaaatccctcgcagttgtggacatttctgttcctgtccagataccatttctcctagtatttctttgttatgtcccagaactgatgttttttttttaaggtactgaaaagaaatgaagttgatgtatgtcccaagttttgatgaaactgtatttgtaaaaaaaattttgtagtttaagtattgtcatacagtgttcaaaaccccagccaatgaccagcagttggtatgaagaacctttgacattttgtaaaaggccatttcttgggagttttttggtgtgtctgtttttttaaagtattcaagatactaccagtcaacatctttttggaagaaaatgccttgggtttagaagattttcttaaaaggggagtagatggttgtagattgactaaaaagtctaccatacttcaagggactacaggtaagtctcatagtataccagctttggtacttcattttttaaaaaagtattaatcaattgcaaagaaattcgccttggccaacccttctttgtgtatcaggtagtctaacctgatacaagtagttgacagatttcaactatcaatcaccagtccaacccatttctcatttaacagatgacggagataatccctaaaagcacccacatttgtttcaatgccccaaacaggccaaggctccctagcaactccctagtggcgttttttaacttctcagaaactgttaccattatttgaaataggcttccttaacctcctttacccttaacccaacagggatttaaaaaaaaaaaaaaaaaaaaaaaactctttaggctccaattttaaatagaaacctttatttacaatgacatccaaaatggtcagcaaagcagtcacagctcaccatcccccataagtcatttcatgtggtttcaattctttgcaagataaagaataatttctatttttttaagcaacataatgtaaacttgattgaaactgaattcattctcaagagtataagtcaattcctgagaatttaaatattgctctcatattttattcttcgaaactccatatattagaaaggaagagagaaaacaccctgctcgtttattaacagtgtgccttggagttgaaaacaataaatcaatccttgaggttttgctcctaggaacctaattgtgaacaaaactcacagcttctgcaaataaaaagggaactgggcaggcatacatgtaactggcaatccattctgtttactttcagctgcacccacctctggatcaaagaacttctaggacatcaagccaattatcttctgtaataccctacccctaatatagatacccccaactcacctca

SEQ ID NO: 1274 - DNA, 34029 bp, Homo sapiens
aatcatcatctcagggtctggagtctaagatatctgtaggtatggagaaccctttttagactggattttcagattttgatattgagcttctctctctgggggatctggggtcgttttttcctcaaatcaggagtctcttttcctctagattttggccctgtgtctcaaattaccccacagtggggggtggtgaagtatctttctctgtgggtctagggtctctctgtctcagggtctggggtctgcatctttaggacctctgtctctctctggtgtgtttttgagtcaggggtctctctctctctcacaatctgggcctcccggagtaggggtgggggctgcagagtctctccctcctcctcctcctcctgctctcttcgctctcgctcgctcccccgccccccctctctctcggctgccgctgctgccgttggctcttattctcctcctcctcctcctctctcctcctctctgcttctctctgctcctctctcctcctctctcctcctcctcctcctccacctcctcctccttctccccctctttctccccctctttctctcttctttctcccccgtccccccgccccctccccccaggcctgatgagcaggtctcgagcctccatccatcgggggagcatccccgcgatgtcctatgcccccttcagaggtacgtggtggggggagggggagggccatatggggggcaacagggggaggggcagggggcgggggagagtcggggccgagggaagggagcggctgaaatggagggagaggggaggaccgggaaggcaggggtgggagcaaccgggaaggagggattggaggccagagggataggggtagataagggatggaggggccaggaaatgggccttgaaagggggctgaagggaaaatgatgaaggggaaagaaagcgccagaaaggggtgggaaggtagaaggattgggttggggaaaaagctgcagaaataatttgggggtgggagctgagtgatgaggaaaacatcaaggaaatagagggacagagtcttgggagaggggctaggaaggagaaatgaaaacataggggtgaaaagagaagccaagaagatgtggggggataatttggtgggggactcagagtatggtaaggggcggaaaaagagaggaggatggagggagagaaggggccagatggagagagagggaggcagtggggggtggggggatggagggtccagatggagggaagagagaagagagagggaacggtgggggaggggagaccagggcagggggagggccaaattatgtgtgcttgggggggtggcagtacaagtaagatgaaatgatgggagtaggggacaggttaggatcctgccccagactctgaccctcttaaaggctcttgaccagtaaaatgtaacctctggggtcttaatgctgtcttcacttcatcacttttacccccttcccccacccctccaatccttatttccattccccctccctcctctgctgtccatcacctatatctttccccccatatggtgtccgttccttatatgagtcccccttctgtccttcccctatatcagtcccctctctggtgttcattgcctctctcttatctcttttctatgtggtcgctcccttatatctctatcacttctttactagtccgtcttgaccccttctcatagcctccgcattaggtctgcctcctttgctctgacacatgtccagtcgagcccttcaggtgtattcccttgcccctgggcatttaccatcatttctgcctccttttctatctactcctattatttgtctcccagaccattccttgtcaccacaagtctgtgcctacccactttcccttaatacctcaactcttattatcatttctcttttcttgtctcctctacttattggggtgttggagatttggggtacaaagacacaggttttgatgattagaacaagggatccccatctcagcccttgagggatttctcatcctagtaaaaatttcccgtttctcagccatgttgctctgcctcttgcatctgcctcccagaatcattcttcaccaagtccagacagtatgtgtgtgtgtgtttctagagttgttcctaagttccctgctgccaggagaaagatgccctctgaagtctaacccgcctcccttggctgcagcctgaaccagccctttccccaaatgcttatgtgtatcaacagatttctcctctgggtataccaagtgtctaagtgcggtgggcatgttgcctgcaatgtctgtagtttcagaggctaggtattggtgatctctgtatctagagaacattagttagtctctgagatgggttgagatagagtttcaaagtatgtggtttctaaatggtggacattctgagggttcatcgctcactgtgatctggaggttgggtaaatttgagagacatatttatagacagaaaagggctgaatttgcaaaactctgctactcagtgcattctgttggaatgaagctcaaagaccagttctcctgcagtatactcatggttatcccataaaggtgacagagtttgatcttttttccatctaaaatctgataccttaagcctaatttctagctctttgctgtcgccaatgtgacatctctcttacttcaatagggcctgtgtggcattggggtttaaaggagaggcagtttgcagggagagcggcatggcaagaacaacagagctggggaaggaggaccctggtctcatctcagccataggcgacacttggtctactgttctctcttctcaaagttttgttcccatctccagctcttgtctttggaggcccctctgtgtcaccaggcctggatattccattctttccccctgacatctttcttcctcaagctcctcactgtgccttgagaaggctcctgacctatggagtggcttccatcctgtccactgagactaggtggggtgaggtggtgggggcagtgttgaatctctgggcactgaatgggagaagagataaatttggtctctacttgtccaaacaagggcatatttcccaccttctgccctggggcctccacagccagatgccgacaaaagccatcttctccttaccaccagaagaaccagaactttccctaaaggatgagcagggttgaactaggggaggagggcacagaggagggaagagttgggaggggaggccctctcatgtctctgactgtgaacaggtaagctccccgacttcttcttttctagatatttagccctcagaatctcatgatcccaatgttcctacacacacaccccatccttctttcccacagccatgtagctttcctcatactcttttatagaggggtggtgccaccttccaagtccttgtcttctgcagctatttggatgccttcctctacccagatatctgacaccaacttctctgtttttctcctgccaattttgcggcacctctaccttattttcctgaagtagatggagagctccttcatctttctctgcccccaaacgtgtaccttctctgtcatataattcccatccctgaacctctgcatttcttcccccaagtctccagagccttctgtgatgtgatcctctcctcttttcccctttgtataaatgcttgtcttgtgttcctttagagttgccaggtgtctcactttcaactgtgatctcctgaaggccggtagggtccccttctcactttgtggactctcttcttgccattttaggcctctgcttccaaatgcatagagcctcccttactgtttctgtgtgtctctgtcctccagatgtacggggaccctctatgcaccgaacccaatacgttcattccccgtatgatcgtcctggttggaaccctcggttctgcatcatctcggggaaccagctgctcatgctggatgaggatgaggtgagtgtggtgagaaggctgggaaaacgcatgtgggagaatggggagagtcctcattagtgaaggggagagagacacaaagaaggcagacaaagaagaaacatttgcaaatggcaggagggtggccattgagacttgggttggagtgtgacaagaggggtagtcattctctcatcttgggcagggagtctttgagggttatgagctgtgttggggaggagatgtggttctgaagatttcgggggtggggaggctcctgttttcacactgtccatattgtaggataggttagaatggggaaggggaactgaagggtttggagaaggggtgaagacatggaaggccctcccaaccaaagcaatcctcaggacccctctctgctttgcccactgagcaagactcccagtcctttctccatcagggggcagagtgcaagaagagaaattgcaggacgcagagaaaaggcaggggatagaggaggttttaggtagctggaggatactgggaaagaagactgaggtcagtggatcttggcatgatggggtgaagactgggagagtgattgagatcaaggtttagagagacactgagagggcttctgcaagggagtggttggacatcaggaaggaatataagggaggggaactgggagtatgtggagttatctaaaggagtacaagtggagtaggggcagggactagccagagtaaaggagatgaaacggacagaggcctcttatgggaggtggtggccaggtatggagatctgagagccagggaagtgtgggttctgatttgggagctgggtcagcaggagtgtccattggaggaaatagaggataaaaactggaatggtgccccacaagtgtgagtcagggaatgggggtgatttgggggacaagctttaaaaaatggtagggtagcctggaaaaccaaacgtggtgagagatggaccctgaaagttattgggaatggtgtgatgaggaagggttagaatttgagtcagggctaactagagtgtcaagggacctatgggggcaggtgagagtgtggagagatggctgggtagacagcttccaggccacagagtaaagtagaggtgttaaggagaggatatggtgactttgaaaggagaggtggcttggggagtctaagttttggacaccattgggagacatttgagtgactgtggtcaaacccctagatcaaggtttggagtctgtaggagaaatgggggaaactggaacccagagtggggactgttatagggatgaagagggaagacaatggattggggtaatgaaggaatgacagagatagggacagactgaagggaccagtggccagcaagttgaggggcaataggaatggccggtctggagcaggaagggcgtgtgtgtgggaggaggagtagatagaattgggaaaatgagcagcctgaacagacgcagggagttggaattggatgggtggtggaactggggctgggggatagtgaggggtctgttcctgtggctctttgtagaggtggaggagactgcaggggtggaggtgtatggaggtagggatggaggtggacagggggagctgggtgtgaagcttagggaaaggtgatggctgaggggaagaagggaactgagagatgctgggtcgggtgatggaaggagatgaaaggtgggggaaggtgaccaggccctctggcgggaggggaggttgggtcccagtctggccgcaagccgggccgtgggagggagacaagctgtggatcctgattataaatgcagcttctgctacccccgtgacaggctcggagggagagaagggggtaagggaggtgggaggttgggaggaaagcagggagaatggaggaactgaaggtcaagggaaaactggattcaggaagtagctaacttctgaggagttgcagaagagctgagtagggtttgggagaattctccggaaggtgtttcaagacaaatggagggagaaaagagggtgggacggcaaagaatgagagagagagactgggggagagaagggagagatccagtcaccaagtgtggaggggccggggcagaaaaagtgggcaggcttagggggaaaaggaggcccgcccttcctgggaggaggcggaggggggaagagggaggggaggggcggcgtgggccagggaggtctgacacacccccacctcccctagatacaccccctactgatccgggaccggaggagcgagtccagtcgcaacaaactgctgagacgcacagtctccgtgccggtggaggggcggccccacggcgagcatggtacggcggccgagcaggctctcatgacccggacaggcgcggggagagggctgaagatggaccgggctggcggggcgggggcgtcggggagcggcgggagctggccgggggcgggagaaggcggagacaaagtcttgcttcccgaggggagatggcgccctcctctggaaggtggagcgggacaggggctgtgggtgagaggcccctgtgggtcctcgctcggcttcgctccctttctcctctccagcagtgaagtttgactattttcctggtgcttgtaaaaatagtctccttagatctttagcttccagtccgtgtgttcctgcccctgcccctcccagcccctggtctgggatcttggaaagaatgacctagttcctgccctccccccagacctcttccccacccctatgctcctgattcttcttccggaccttcagtccttgaggtctccttttattaccccctgttttctcctctcatcagctgcttctattttctgcaattgtatcaccctttctctttcctccctgatttctcttattttctgtacccctcttgattaccccgtccctcccctctgctcccggcgaaagtccatcagactcccatctcatctcctttctgtctgtagagctatctgcgcggtctgtctctccaactctctccctctctccatctgtctcttcccctccctccccctttctgcccccccaaccccctctttagtcatttaaaaaaagatttttgtcttcctgagaagttcgcttaaaaggtttccatgggaacagtgaggggagatgaaggcagagaacagagatctgcagccaaggtgcagagagacgccctcagcccccggaaaccccctcgtcactgcccccttccacttcatttcccttcccggacctagcgatccaggttccccattcctccaacccccaggtgacccctttttcccaccagctccccctcccttcaggaattcaagctaccagtttctctcccttagagagccagtgacctgtccccatcctttggctccttccagccttctgataggtccaggccctactagccttgtgggccggtttggggaccttgggtgggtgggtgggtggtcagggatgtgtgtcattgtcatggaaaccccataccatcggggtgtgtgggtagcacatctctgtgaggcaaagtcaggtggtggtggagtgtatacagagaatgtgtgtgatgtctgtcacatctgtgtgtatatgtatatgtgtgtatgtcatgttcatgtctggggaagatgtgtgtgtttgtgtgcatgtgtgtacacctgcgtttccaggccagaatggtcacatgctcacagagcatgtttatcatgtgtcctgtggttggcagatctgcccacttattccccatctttctccttatcctgagtcctcagggtctaggggtctctggcgggggtctcccgtgtgttttgggtggggacaccgtgtgtgtttggagttgaggtggcatgtggaggttgctgtattggggttcagtaggggctgggaggggttccaggggcatatgtatttggggggagggcttagtgaaagttgatgggggtgaacgtttagggtcttcaggcagacatggaatgtgtaaagggcatggaggatgtgcagtggacataggggtcgttgggaccttggggacttggcaatgccaaggtgtttgctgaggctgtggactctccagcccgggagaggtcgccggacctttgaggggcattggaatcctgggctcctcctctgctgggtggagccgcgaaccctcgttctctccgcggttttgtgtgtgtgggggggtcctgctcaggaggggatggtgggtggcctggtttgttttgggggtccccttgcccccctcccccgtctctctcgcgctgtctccgggcgacagggctcgtgacagaggcggccacggcagcagcggtcgcctagcaacggcggcggggcccgggcaacggcggcagcggcgggagcggcggcggagggagccgttcccgcggccgtcaccgcgcggccgtcccggccgtcccgggccccgccgccgcccccaccgcgccgggcggcgcgagccgggccgtaccgccccctctccctccgcaccccgcccttcccccgcgcaggggcggggcccctcccccaccggggacacccctggcccccccggggggcggtgcgaggtaagggcggggccgggcggactaggagcgcgcgtagaggggggggcgccgcgcgcgtggggcgggggcgcgcgtgtgcgtgggcgcggggaggggggtggggaagccgcggtggcggcggcggcggcggcagctgctccctccgcatgttctcgctgcatcttccgagtggggggagttatggtaaccggagggggacagcggaggacgggagggtcggggaccggcctcgtgcggacagggtcttgagcacgcgggggcggccggtgtgtgtgggatcttggagcccctggtggaaggggcagcccgtgtgtccgcgtgtgtgttcgtgcccatgctcgtgtctcctgtgtgtcggtgccatgtgcacacgggggcccagttcctcgtgcacacatgtgcagccatccttgtgcaagtgtgtcctgtcttatcttgcctctgcctgtttcctgcctagggggctgttgggccagccacgggcttgtggggcagtccgcggccttgctggtccatgtcacctctgaccctgagcatgcatatccctggctggggctcacctcctgtcaggcttctgtgtgtgggaatgtgtggccctatgagcaggattttctgtgtccctggtggcaggtgtgtgtctttgcatgtgtgttccagcactggcctgagtatctgtgtcaatcccagcatgggtgtccagggcgtgtctggatgtgggtggtgtggctggggggagtaagtgtgtgaatgtgttccttggaattctactgtgtatgaaacacctttgggctgggcaggtgtaagccctgcttggtcagtaagtggggacagaaaagcttaaaaagggaagaaatggggtaaagaggaaaagtggggaggggataggagagaaggaatgagagaggcttgaagaagagagcagagagcagcaggccagggagaaagaatagctggagaatgggaatgtgggagaaagccaagccagacttagaagagagaacaggggataagagcttaagatggggaactggatagagatggtgggagaagaaggggtctgggagctggggaggcagtggggaggagagagtcaggccttctggtaaagtgatctctgaaagaagaaagggaagaagatgggagaaggcactggattcttgtaggccttgcaggatcaggcttggttttggatcagggaaggccactcaggcatacgggctggctcacagtgaggcctgtcatagcagggactgtcattagaggttcatatccccagcacagagctctgtctcccatttctctgctctgtgtccaaccctgttcttcgcccttctctggcaacctccctcctctggctccccttgagagctgccagctgggtgtggagaggaagaaaggccaaagggaaggttagggatttggagggcagggggagattctgtgggtgatggcaagattagagatgttggaggggcaggagtccaagcccttgctgtgtgtgtgtgagtgccattgtgtgtgtacacagggtgtgtacatgtgtgggtgtgtgcacaatgcctgtgttacgggtttgtgtaggtggctgttatgtgtgtgcatgcgtgtatacatcgtgcaggcatgggacatggagacccaggatcacagtttgtgcttttcaggtttgctgtgtgtgtgtgtacacgggtgtgtgttgttttctctgtacatgtcactgcatgcagcattaataacaggatgttctgtgtttctgtcactctgccccccctttcctctgtgtttctgctattcttttcctgcggcaacaaaagtgtttaataagcatatgtgtatgtggcctctgtgtacctgtgacttatgagtgagttcatggatcttagttcttggtaatatgtgtaaggttatattacttccaagaaccaagcaagccaattagcaaatttgttcttctgttaatgctttagttccaaagcggaattttaatgcatttaaagttagactttatgcctttattagatgagcttgcacatgaaaataatggctgagctcggttccctgaaatgagagtgaggcagccatacctgagaaatgcagaaaaaatgttactagggaagagatatcctgaaccattggatgcattgcttagtgtgtaccagaaggataattaacacatttgctcctggtttttctttactctggtggcaatctcggatgcctgtgttagagtgagagaagggctgggggaggaaagggggttgtcctgagacagagtggatgtggttgtacttttcacgtgaatgaaaggatgtttgtgcttctgagatatggggatacctttctgtggtcaggatcatggtgtactcaagcatgtatttcaggggttaaactggaattcccctgcatggggatatgtgtgtcttagggttataggtccatttctgtagtgtgctgtccacatgattgcccaagagacttgggccacaaagtccacaccagcagctctcatgtgggtcactgggttcaagtatgtactcccttgttgcagagctcacatatgtcaaagcatgtatcctgtggggtgtgtgggcctcagggtctcagaatgtggatccgtgctatgcccgtgctcacagttgtctgtatgtctcaaaagcacatagatccccagttatttttctgtattgtggttctcatatacacgtacctccatagctcagtatatgtttctgtactatacacctgttcctgagggagtgatagggttctcgtgtcatggggtccacatttttgtatgcaaacctcctaacacctgggttttacaggtaaagggaagctgaggactgattctagggcagtttgcaggcaatttgcaattctggaagcagacagtgaaaatataattgtggtcctcccttgttctgttctggaacctagagggttaacaggcagctcttccggtccacccccctccttccagcctgtagcttcttgttgccgtggagatggtggccccgccccgatgcagcacctgcccccccattggctgcagtggtgactgtggggctgaggggggagcccaggcctgggcagccattctggagctggagccggagcttggcatccccccacttacattctcttccagcccctcggcccctctaaattcccttgcagccgagcctcagcttcctttttcagcgcttgccatccctctaggctcttggcagactgagctgcatccgcattcacctcccctcctcctcctttccctatccttacttgggagtcccgagaacccccactgtccatccttcctgctccctgcccattcccctgcattctttgcttttcccctccccccaccaaccttctgagcccctgccactgcagtgcacgtggaaccggctccttctcccttccccccacctgccccttccttggattttctgtccccagcttctccccctgctactcttcacaggtctcttccaagacctccccctccagtccagggagggggtcatgggaggcagccctggccctccagacagacaggggttccaggaggtggggggcaggtggaagatgtgcccaccagggggaagaggaaagcctgcctatgggcaatgacctttaacccatctttccccccagctagccccttctggggtgggtgggcaccagggacctagcctccctggatctttggtgtccttcattactggggttttactgaccctctcagccatgctcccctgctgactgccagccccagtcatgggcctaaggcctcccaccccatccccctcagggggctcctgctcaggttccttgccccctccttcccgctgccagcctctccgccgtcgctgctcttcctgctgctttccggggggtaggtgaggccggagctgaggggcagagggaggtgggggcatgcactggggtcaggggtgggaacctgggttaacagcttcccttctggccccctccccaacttcccttctggccatttcctcccctccagaataccacttgggtcgctcgaggaggaagagtgtcccaggggggaagcagtacagcatggagggtgcccctgctgcgcccttccggccctcggtgagtggtgcctaccagatgtggctcagttgggccccctcccctccagccccaactggggccctaggagtctgagaaagagggcaggagggggagagagggagtgagagtgagaaaaagagtgtgtgtctgtgtgtgtctccccacctctttggtttcccccttcttggctctgcccccctgcttctgagaccagccctcccaccttctccaagctgtgtgtgtgtgtatatgtgtgtgtgtgtgtgcttgcactgtacccgtgggagcaaggaagacaaactggtattagggttcctatccccctttcctcgcctctggagacttcccttttccccatcccactttcatccaggggctctctaccagctgagggatgagtaggtagaactgaccctgccccaacccaccccatccccatttcccccccagcaaggcttcctgagccgacggctaaaaagctccatcaaacgaacgaagtcacaacccaaacttgaccggaccagcagctttcgccagatcctgcctcgcttccgaagtgctgaccatgaccggtacaggggctggagcatgtgggatgagattgatgtaatgtagggtctcctgtgtgagatgcagagggagggggttatctgtgtgcaaaggttgaaggattcaactcaagttggttgggggatgtcatggcacaggggacagaacagaaaagaactagaatagggatctgtgagcagcaggagaggggtagggtggcagagagaagacagacagacaggctggaaagggaatgaaggtgaagccaaggagggactcctcagggactcctcaggccaagaaggatgggctctagcccaggatcaaaggagctgtacaggaggagagtgaccctggaggaatgtttaaggaatgcagggaaggggttggtaggtgagtgagcaataggctgtaggtggaagggtgtcagggaaggtcaggaaatacaggggcagcaggttggagtggggctgggggtggctgaatgaatggatgatggctagggctcaaggacctcatcagtgagggaagagacagtatagagcatggcagagaaggggaggctgggacaggtgtgcagggtgacagaatgggaagcaacccatggactgaggcatgaagaagcagccagcggagaagtccagaaggcactgtccctgagaccaggctgaaggagacctccactgtttgcctttgttgcctgccatttggggttcctctctgggtttccccctcacccagtcactccccagggagaaccatgccctccctttcccccatgtctggccacccccaggattgggcaggtagggaggttgggataaagtgagtcacacctttccctgcccccctcccatgttgccagagctggatttggggccggcagggggtgagggcatggtattcctggccgcgggggcgggggggggggtccgggggccgggggagcgtcgcgctgacggcagccagagcctgcgatgacggggctgctataaataacttcttggaggctcccacacccaagctcccctcccgctttcccactgctctctactcttcatcccctgcccatctccataccgcttttgtattgctatcctacccctcattattccatgcccctagccccctttatcttctgccctcctgcagtgatttttttgcattccatcccctcttagccctcacctcggttctcccggccatctctccagttggccttcctcctcttctcctgtcctctgtcttgctgcacatacctttgtctccccctttcttcttcttgccctacctcctcttcttccctagtccgtgtattctgtcttttatcctctttgagctcttttctgcccacagctttctcctatttcttatgcttttccctcactctttcccctgcttctgctaaaacttgtcctcttatgctgtgttcattcattctttgaatcattaaatgtttatcaggcactagccgtgtgccaggcccaggctagacatatctcttctctgtgccttcacttctttacttccactttttcctttatactgaggctctggtttctggggttacctggaggtactacctagaagtgccccaggcccactttgttctctccttttttttttttcttttctgccatggtccatttctgggttgagatatttctagatgtccccagtcctcgcaatcccttaggtgtgagatggtgggagtttcttttttttcctttttttttttttaaatagaaatagggtctcactgtgttgcccagactggtcttgaactcctgggctcaagtgaccctcccacctcggcctttgaaatgttgggattacaggtgtgagccaccaggcccaggtggagcaggggagttccttaaaggattctgatttttctcacatccctcacgtccttcctgataggcagggtttctttctgtgtctgtttgggaagggtgttcagggggccttctctccaagtctccatcctggaacagactgatgatgcagggtacctatgtgtctaagaagagtaggggggccgggcgcggtggctcatgcctgtaatcccagcactttgggaggctgaatcacttgaggtcaggagtttgagaccagcctgaccaacagggtgaaaccccgtctcagctaaaaatacaaaaaaaaaaaagaaaaaaaaattagctgggtgtgctgaggcaggagagacgcttgagcccaggaggcagaagttgcagcaagccgagatcacaccactgtactccagcctgggcgacagagcaagactgtctcaaaaaaaaaaaaaaaaaaaaaaaaggaagagtgggaagccctgatcccttcctctcctgaacctcctgcctgccagggcccggctgatgcaaagctttaaggagtcacactctcatgagtccttgctgagtcctagcagtgcagctgaggcattggagctcaacttggatgaagattccattatcaagccagtgcacagctccatcctgggccaggagttctgttttgaggtactgggtctggtgggctggggagggccaaaggacaggggtgatggaaggtggggggcagagaggtctagagaaagtggcacaggtggggacatcaaggaaacagaaacttctgggactggaggaaagggtaggccagggaggaagagaaggtagcagagtctcctcccctctgtagccctttccctcaactccacactcctttctaggtaacaacttcatcaggaacaaaatgctttgcctgtcggtctgcggccgaaagagacaaatggattgagaatctgcagcgggcagtaaagcccaacaaggtattggggaataaaggggacacaacctgtgcagggcaaaggttgcaccaacacgggaagctgggggcctagggaggaaagtgagttaaaggaggagaggcttggggaaggagaggattgaggtacagtgtatctggacaagcagggggagacccccattattctgagtcccccatttcttttcgctttctgtactgctaccctgccttacgatctctttccctgccatagaagtcatagacttacagagttgatggggctctggaaattctttagtctagcttccctgcaggcaggaatgcttcactaataccccgcaggacacatcaaatacacttagccaagtttctgtaccttggtttcctctctaagacagagggaactggtggcaatgggttggattaaatgatctctaaggtccctttggcacataaattctatgagtctgttcttcccaaaacttcatgcttccagttctgtcagctattctctgtatcccagtttctagcaagcttacagtcctagtcacactcctctggggggaactcttgtgtcttgatgtccttaaagaactcaacccaagatgctgacatgatctgacctatgcagagtacaaacaccatgttccctttcaacacactgcaatatcacctgagccttaccattagcttgtgctcaattgtatccccccaggcccttactgattcttttttttttttttttgagacagagtctcactctgtcacccaggctggagtgcagtggcgtgatcttggctcactgcaacctccgcctcctgggtttaagcaattcctgtgcctcagcctccccagtagctgggattacaggcatgcaccaccacacccgactaatttttgtatttttagtagagacgaggtttcaccatgttggccaggctagtctcaaactcctgacctcaggttgtctgcctgcctcagcctcccaaagtgctaggattacaggcatgagccaccacatctggccaagctttacccattctatatgcaattcttttttcacaatttctgatagtctctgcaggactttccagttcccttcaaattctacattaatatttttggcttgttattccagcttttgaaatctttccaatactgtttgtgttgtctagtgtatgtctacgcttctacagtagcttcctggggctgctataacaaactgctacaaactgggtcacgtaaaacaacagaaatttattctctcacagttcaggaggctggaagtccaaaagcaaggtatcagcagggccacgctctctttgatgctgtagcagggaatccttccttgcctcttcctagcttccggaggttgccagcagtccttggcattcctgggcttataactgcatccgtctaatttctgcctccatcttcatgtagctggcttccttctgtgtgtctctgtatcctgtatctctgtgtctccaaatctccctctccatataaagacaccagtttttataaggtgggttaagggtccactctaattcagtatggcctcttttttttgagatggaatatcgctcttgtttcccaggcttggagtgcaatggcatgagctcagctcactgcaacctccgccttccaggttcaagtgattctcctgcctcagcctcctgagtagctgggattacaggcacgtgccactatgcccagctaatttgtttttgtatttttattagagacggggtttcactatgttggccaggctggctcgaactcctgacctcaggcaatccacccacctcggcctcccaaagtgctgggattacaggaatgagataccatggctggcctcttcttagtttgattacatttgcagggatcctgtttccaaataagatcacattcacaggttcagggtagacatgagttttggtgggatactattcaacccagtacaccgtctcaccttatgattgctgtctgtatcccactttcttactgtctctcctcttttggtgtctctctgtcccttccccctttaacatcatgcccaccccaccatgccaggacaacagccgccgggtagacaatgtgctaaagctgtggatcatagaggcccgggagctgccccccaagaagcggtactactgtgagctctgcctggatgacatgctgtatgcacgcaccacctccaagccccgctctgcctctggggacaccgtcttctggggcgagcacttcgagtttaacaacctgccggctgtccgtgccctgcggctgcatctgtaccgtgactcagacaaaaagcgcaagaaggacaaggcaggctatgtcggcctggtgactgtgccagtggccaccctggctgggcgccacttcacagagcagtggtaccctgtaaccctgccaacaggcagtgggggatctgggggcatgggttcgggagggggagggggctcggggggtggctcagggggcaagggcaaaggaggttgcccggctgtgcggctgaaagcacgttaccagacaatgagcatcttgcccatggagctatataaagagtttgcagagtatgtcaccaaccattatcggatgctgtgtgcagtcttggagcccgccctgaatgtcaaaggcaaggaggaggttgccagtgcactagttcacatcctgcagagtacaggcaaggccaaggtgagtgttgtgccctcagggaaaggtgacttgggaatgggcacttgcttgggggttagtgaggacagggcaaattcacgagattgggttgtgcagaggctgacacttggattttcctgggcctcaggacttcctttcagacatggccatgtctgaggtagaccggttcatggaacgggagcacctcatattccgcgagaacacgcttgccactaaagccatagaagagtatatgagactgattggtcagaaatacctcaaggatgccattggtatggcccacactcaggccctcttcttcccaaacctgccagatgtccaccccagaccccaagtccacccttccacagcttgatacttcctaacccagagtcctaggactccagcctccaacacctgattctgaaatttccccaaccctggccacccccttccctgcccttggaaagtgtgaccacaccctcttgtgcccccaccccccaggagaattcatccgtgctctgtatgaatctgaggaaaactgcgaggtagaccctatcaagtgcacagcatccagtttggcagagcaccaggccaacctgcgaatgtgctgtgagttggccctgtgcaaggtggtcaactcccactggtgagactgggaacgctgggctggggggccagggtcgggggaattatgtgttcatctgttcatctatctgtccatcctcaaagaggactgagcaccatttatgggcaaagcattgttctaggcgctatagagcaaacaggtgaaagaggcctggtccctgccctcagagggcctccaccagaatggggacaaattagaagaaaaaaaaaaaaagccacagagccataatggtgtgtaagtgctgagtaagggtccccccaacctctgtgtgacataaggtcagagagaaggcagagctttgagataagtggggaagaggtgcccccttgggtaggctttgaagactggtttaggttctgatatatggacatagttggcaagaaagacatttcagaagaaggctgtgagaaaggcacatgtgtgatggtgaaaaggcccaggagttttcaggggacattaaagtaggttagtagcaattacatcaggtttagtggagcatgtgcctcataatggggagtggcgggagagatgtctgggcaggaagattagctttagaaactggaaggcctcaaggagtctgaggtcattggtaggccttgggatgccattaaaggtgtcagaaatattgtgatttagaagattaatccataggctgggcacggtggctcacacctgtaataccagcactttgggaggctgaggcgggcagaccacctgaggtcaggagtttgagaccaggctgaccaacatggagaaaccctgtctctactaaaaatacaaaattagccagatgtggtggcacatgcctgtaatcccagctattcgggaggctaaggcaggagaatcacttgaatctgggaggtggaggttgtagtgagccgagatcacacgattgcactctagcctgggcaacaagagtgaaactccatctcaaaaaaaaaaaattaatccataagtagagtgtatgtagtagagtagagggatgtatgttgggggatgactggaatagagccagctgggggctcggaggcatgaaagtcagatcctgaatcagaacagtgacagaagttaggaaggagctactggaaggaccctctcgggaaaggatcagtaggaattgtcagcttattggaaaggagggagcatgtctgtggggagtcacggatgactcaagaggccatgaggctggtggttgggagaccggtggcctcattgacaaccaggaaagtcaggaggaggagccagttggaggtgtgggggcgatggtgagctctgctttacaccagccgagtttaaggtgtcagtgggacattgaagtggaactgggaggtgcggggagtgagctctgagccattccagggactggggatcatgcctggggcacctccatccccatttccctggaatccagaagagttggggggtccgagctccctgtacctcaagtgaccctccatctctctcccatctctgtctctccctggtgtctgtttttcttctcctcctctccttgtctctctcccacacccctccatctctctcccacgtgtctctcccctcaccttctctccccctccatttctctctccctaatctgtctgttccctctgccatggcccccttcttcaagcagcctcccatcttgctcctgcggtccctccttccctgtctctctcacccctgtttccacaccctcacctcctaccacccccctcagcatgttccctggaagctgagggtctctggggctcagtcccggtctctctctttctctctctctctctctgtctccccgacccttccccccagcgtgttcccgagggagctgaaggaggtgtttgcttcgtggcggctgcgctgcgcagagcgaggccgggaggacatcgcagacaggcttatcagcgcctcactcttcctgcgcttcctctgcccagcgattatgtcgcccagtctctttgggcttatgcaggagtacccagatgagcagacctcacgaaccctcaccctcattgccaaggtcatccagaacctggccaacttttccaagtgagggaagcttcaggagtgggcagggcagggagtggcagggcagggagtggcagggctgggggtcggcaagaagggtctcctgagtccccagagatcctgagatggggaggctatgataccttgtgtgtgtgtgtatgtgtgtgtatgtgtgtgtgtgtgtgtgtgtgtgtgtatgtgacctttatcttctgcattcttggctaggtttacctcaaaggaggactttctgggcttcatgaatgagtttctggagctggaatggggttccatgcagcagtttttgtatgagatctccaatctggacacgctaaccaacagcagtagctttgagggttacatcgacttgggccgagagctctccacactgcatgccctactctgggaggtgctgccccagctcagcaaggtcagcagatcccctctttgccctatccccagatggctccagaggttcctggagcctgagaaactaccctttgaagattttttttctccccttgtttctcgaggtgtcaccactactatcccaactcaggccccctccacctgcaccctcagaggccctcttagagctgggcactgagcccccaggtaacagcctcacccttccaggaagccctcctgaagctgggtccactgccccggctcctcaacgacatcagcacagctctgaggaaccccaacatccaaaggcagccaagccgccagagtgagcggccccggcctcagcctgtggtactgcgggggccatcggctgagatgcagggctacatgatgcgggacctcaacaggtgagcaccctgggacagccaggcctgtgccctaggagcccttctcctattctagatactcctcactgggccccacatgcatctctctagggcttgaaagaagggaggaaaaagcaccaagttctcaggggagacgataaggagacaggtacagtcagtggtaggctgagagccctttacagcctgagggagtgagagatttggagctctaggaatagggctgaggctccaccaactcacggcttagttgtaagcctagagcatccctgctgcaagctctgatttgctgtccctctgcctgcccatgctagtccccaggctgaggttcagccagcatgtcatgtcagccatgtgtcaaaatgttcaaacatctcagtaatagctagtgaataagcacttcccccagcccccgaccacaaccccacagacctccccatgatccagcacttagagcagtgacagcagaagcctagcagggcctgcagcctgctccagagtcccagcctccattctgataggtggtgcccgtgcttcatttgctgctcattattttgatgatggccctgctttttcctctgcccgtgtcttcctccatgacaccatacccatcccaccattcccgcctctcctttcatttgtccacatctctctccttctctgtctgtgctcgcccctctttccatctctctccagctccatcgaccttcagtccttcatggctcgaggcctcaacaggtgaggggctctcccctcccccgccctcctctcctctcctgtctgttccctctcccactccactggccttcgccctactcctctcctctcctcctccatggacctcatctcctccatatgtgcccagccctgcccccatcccttctcttgctgcccccatctcccctcctctaggcctcacccccttcccggaggggccctgtcctttccctttactcacctgtcccctcccatcctccctgcctgccctcttcagggctgccaccgctagctctcagcccttccctctgggtcccacttttcaccccaaggcctgtgccagaccacagcaaggttcaattgctaggagccctgaccttaccttctgcttgtgtgcccccttcccttctgacagctctatggacatggctcgcctcccctccccaaccaaggaaaagccacccccaccaccgcctggtggtggtaaagacctgttctatgtaagccgtccacccctggcccgttcctcaccagcatactgcacgagcagctcggacatcacagagccagagcagaagatgctgagtgtcaacaagagtgtgtccatgctggacttacagggtgatgggcctggtggccgcctcaacagcagcagtgtttcgaacctggcggccgtaggggacctgctgcactcaagccaggcctcgctgacagcagccttggggctacggcctgcgcctgccggacgcctctcccaggggagtggctcatccatcacggcggctggcatgcgcctcagccagatgggtgtcaccacagacggtgtccctgcccagcaactgcgaatccccctctccttccagaaccctctcttccacatggctgctgatgggccaggtcccccaggcggccatggagggggcggtggccatggcccaccttcctcccatcaccaccaccaccaccatcaccaccaccgaggtggagagccccctggggacacctttgccccattccatggctatagcaagagtgaggacctctcttccggggtccccaagccccctgctgcctccatccttcatagccacagctacagtgatgagtttggaccctctggcactgacttcacccgtcggcagctttcactccaggacaacctgcagcacatgctgtcccctccccagatcaccattggtccccagaggccagccccctcagggcctggaggtgggagcggtgggggcagcggtgggggtggcgggggccagccgcctccattgcagaggggcaagtctcagcagttgacagtcagcgcagcccagaaaccccggccatccagcgggaatctattgcagtccccagagccaagttatggccccgcccgtccacggcaacagagcctcagcaaggagggcagcattgggggcagcgggggcagcggtggcggagggggtggggggctgaagccctccatcaccaagcaggtaggtgaaggcaggaggaaggcgggctgggtcacaacagggagggaagaaggagatggggggtggggttgaaacagagtctgtggcctgaagttacaatcttcttgcctccttttggccattaaacaaatgtgtatagagggcctgctatgtgccatgtgctatgccaggcactaaggatacggcactgaaccctcttagcactctcattccagaggggattaatccataagtagaatgggggtgactggaatagggccagctgggggcttggaggcatgaagatcagatcctgaatcagaacaacaggagaaattctctggcattcaactcacatctctggcattcagaggtgataaaggctacagcagggcaataggactgggactgtcgtctcctttggctgtgctgttgccctctaaatgtaccctgctttttcccaccttttctttctctgttcgccctcactgtgccttgtcccagcattctcagacaccatccacattgaaccccacaatgccagcctctgagcggacagtggcctgggtctccaacatgcctcacctgtcggctgacatcgagagtgcccacatcgagcgggaagagtacaagctcaaggagtactcaaaatcgatggatgagagccggctggatagggtacgatgggctctaccagctccaagccccagtgtttccttttacccacaggggagatctctagtcacttccaagggaaacctccagggtcagttatggtggtaagaaaaggcaaagacctgatcacctcttgagaagccttccgtccatctggggagaccagatacacacagttgttaaaagtcactttcaactctattttgtaggttatatatatcatagactatctggggatcatctattttaggcttacctccatgttcttccccaggaggaacataagccctggctcctgtgactgcttaggaaaggaaatgttactttactggcagtaggagctaataaattggatggggatggagggggttgcagctatattacaagtgatgtctggcctacccagtcactgtcccatgggcataagtgacagtcagtgggcagggaatgcatgtggtaaagtagtatgtatcagtcatgtgtgaaaagaccatccagaccctcacttggtggaggctgagggcaaagggcaccaagagctctggggctaacacagataacttagcagaaagttacttgaggaagctgttgttcctagggcctgaggaagagggcggctgcaggattaggtcatatataaagaacatatgatcctaacacggggaagtggtctttgagcataggaaatgttgggactgactcagatgggcttgaccagcaaatttaatgagaattaaaccctaatattagccccaaggcagccaccgtaggaagttaattcacatctctcctctgcatgtagaagggttggtgatatatgtatgtatcctcttcagagaatgaggaaatagtcttttgaatcatttttttttctgtgcttcagatgaggaaaccttgttgagaaaggctgtagactagcactatccaatataactttctgcagtgatgaaatgttctgtaatctgtagtgttcacatgtgtctagttgtgattcaggaactgaatttttagatctatttaattttaattttgtaatttttttgagacagggtcttgctctgtcacccaggctggagtgcagtggtgcaaacatggctcgaggcaacctccgcctcctgggctcaagacatcctcccacctcagccccctgagtagctaggactacagggtcgtgctaccatgcctggctagttttttttcttttcttttttttttttttttttttttgtagagacggggttttgccatgttgcccaggctggtctagaacttgtgagctcaagtgatctacctgcctcagccttccaaagtgctgggattacaggtgttgagccactgtgcctggcctaaattttaaatagctacatgtgggctggtggctaccatattagacagcacagctgtagactctagagccaatagggcagataaaatgactcttctgagctcttccagctctggaattcctagattctcagcctagaattcacttgtagacctcctatccttggcaccttgacagagccaaggagagggtcacatggaggacagcacctgcctttcccccgtcaattgccttttcttcctatgtctccagcatgtgttctggggcctggcttagggctgaagagtcaccctatttttaatttctgagcacagttactcaaggtgtgtttgtgagtgtaggtttctgtgtgggtcttcatgaggggccatacatagacctcagggtgtgggagtctgtgaccttgctccattttgagggaacctcagcaccatggcagggtcttctcaaaagcaggtgtgtggatatgatccacaggcagggaaggggttggggaaggcagctggatgtccctcaacatgcagtggctgtgcttggcagacagggatggaggctgggtggtgggcttggggtggggcgcccctcatagtgcggggtcgtgtgcccggcgggcaggtgaaggagtacgaggaggagattcactcactgaaagagcggctgcacatgtccaaccggaagctggaagagtatgagcggaggctgctgtcccaggaagaacaaaccagcaaaatcctgatgcagtatcaggcccgactggagcagagtgagaagaggctaaggcagcagcaggcagagaaggattcccagatcaagagcatcattggcaggtgaggggcggcctggggagggggttgtgagggagagcctgaggctggagagagcaagtgggtgagctactccgctgactcccatccccaaactcaggagcccaccaggagagcccaccactctcctccccaggaagccacccactcactcatcaccagatggagagaaaccccaacctgcttagtgcattaaatatctctttaccaaaccctgacctctcttctgatagagtagcttcggaagcccttggaaaatgtacctgttcctgtccaaccatcactgcatttgcatttaccctaggccagagctccccactagttattctcaacttaacctgtgatgttcactccaaacctaagcagggctccctagccagagtaggccctgcccttcctgggtggaccctccctctctagccttggaaaggtgttctgttagaaagggtcttttagcctgtgtatgttttcagctgctccagcaagtcctgggctccaaagagggtatcctcagcaaagaggtcaattatcttcagagtggtggggtcggggtgggggggaccctgggcgcactccaaccagagccacctccattttgatccattctaaatgtattttatgtaagatttaattagaagaaaagggcttcttgaaatattttttgaaaaccactgctctaattgatatcctttatgataaatcacctcgaggatcttcacagtgaggtgacatgggggatgcagaagccaggtcctcagccatggaaggtctggggaaggggcactgctgtcctgattgggacgatggaggcctggaggtgtctggatggtagaagtctttgaggcacagaaagctgccttagcagggaggtgtaagggttcctgggaggaaggtggagagcatgatcctgaggaacagggagtcttgcatcacggcaatggagggactctgattctaagggataaggatgcctgaggtttttccagagagctatggggttccatgggcaggctctgagcctgtgcccgccactaaccccactgaagcccgtcccttcaggctgatgctggtggaggaggagctgcgccgggaccaccccgccatggctgagccgctgccagaacccaagaagaggctgctcgacgctcaggtggaaattacaatgtcatttatcttctccgtgtcccatccccatccatcccactgtctttcgtgcactcactacaccagccacctagccccatcaccatctgtctctcatagtctgctgtttgtccactggctgctcctggcagccccctagtgaccccatcttcatcccatcgtctgtgcctttgtcactcctggcagcgtcagcccaactcctgtgccttcccatccagtcttcccactcctctctgcatctcaggaccttctctaccagaaccttggtctttctgcccctagaccccacctagttccaagaacccctgccccttctttgctcactcctattcaagccacgttgttcagcttcctctgcgctcttgggccagagggctagaagctgccgttttctggaatagagcacagggcagtatgatctgtagtttctccaggccctggccggtaccctgaaaacttggggacccatcacctctgttctcttggctccctaattttcctgtctccttggcagctcctgcatagcttcctcttcctgactcttcagatcttgaaggccttccatcctgtaacctccctttgccctcagtatttaagtccagcctccctctggcctccctcccactctggccctcagaccttcccagctgcctgctgcccagcctctcttctcacaagccagcttctaggacctcccttctgcacccttaccccttgctttcccaaaattctgctcattttcctacccatactcctctttgctctgactgctaggctccccccgcctgccatccccccaccaaggctcctgaccccatgaccccactctctcccactgcagctcctcatcaggtaattctcctggttccgctttggccacgggcggaggacacagggggaggtgactccggaccactgcaggttggtcgtgaagcccactccctccaacacctccggagcctctcccctctcactgctgccctccacacccagagaacctccacagactccagccctccgacacctgcacagatccatctcccaagacaccacccaaagagagcatttgctgctgcttcccagaactgtccaacaataccttagcaacaccaagagttgggccctagatgggcccagcacattcacaggtcacacccacttccctgcaaaacccaccccctcccagcctcctcctgactctaagccctcctcttcctctacctctccagtgtatgtctgtcaccccccatttcaccagagcgtccttaggggctgggggtgggtttgttaatggggtggaggcaatgatgggttggaggatcttggctataggggctgtgctgactgcagcaggtaggttgggtttccctcttccttccctaatcttggttctctaccctcctttccactcctcacctgattctctctcttcctcctccttatatctgtgaggcagaaggcatctgaagctcatattagcccccattgggtgggaattaggagtgggtagttaactcagggagacttgagataccctggaaaaaatgctattgagatgtcctgacattaggcagggtggatggaacaagaaggagcaagaaaggaacctcaggcagatgttaggacatggacttgatcatgtggcctgggagtttagaaatggggagagacatcctcctagatcagatcgtgggctcagtaggcatgttgattcccagggagaggtgccaggaacagcatggtaaagaatgtactcttcacagctcacatccccaggttgctgatgccactcactccccctctcctgccatcgagtggccttgccggacacatcaccctacctaaaaagccagtaaatgagaacctgtcagctatagccatcatttctgagatgcgattttctttgggattgagctgcagtgggcagtggctccttacactgtaattttaattctctgcctgcccagcctctctgtcaaagtagctggtgatctataaagatgctaaaaggcaccaggggactttgccatttaaaggactcctgcagtgaattcttttgtaaaatgaataatggcaccctaatttatccactttctaaatttgggtccatgggggtgtccagggcatgcttatgtgctgtcaccagcagacaaacagagggaatggaatctgggggttccttccctgctctcccgccatactcaggataccctaccataagtgatttcctctcactgacttgcagaaaatgtgtgagatacccagcaagctaagaaggcagttttgctgggtatctcatacccaaggctggggtttgggtgatctgagaggttagctccttgatcctaggatggaagggagagcttatatagaagcttttacttggaaggttttgtatcctaaggtcagacatagctatattaccaagcctaaatgccatgtggcccaggaaataatttggacatttgttctaaaccacttgtggtaggtattggtctctctgcaactcagccattaattagaaattagttttgagcctgaattttaaaaagccaagtgttgcccccagcccacacacacacacacggacatgtacagtacaaaccccagataattacaacagccaaagagagaaggaagtgaatttcccaaccagaagcgtagggaaattcagatggctttcttttctcccagcagaggaacagaaggcggagctaagggcaggaaccaggagttggtcaaggagctataggaggtgatgagagtagaaccaggggtaggagctggtctggtacccctcaccctctaattgggagcccagggagaaggactgaaaagaagatgggagtggaaaagaataaagccagtttctgcttcccagggatgcagagattggggcatgctgtgtctgcagaagctcctagtcatttccgccataattgtgagagagaggggcagccctcccacaagatttttcccttcccatatcacttccctgaatccccttcctttccccccagtacagttaaacctctctctaatttggaatgttatatttgagaagatggccactgtgaataagtgacaaacggaatgacagtgtctatttaatgaaatgcatgtcttcaaaatatatacagaactcgatgaacaaggctttttccactcctcagggagcatgcattaatgaatagataggattcaaaagtctgttttctggtatgggttaaatatcccctcctacagacatatttccaccactaatttgcttagtacaccttttcttcacagataaaggaaaatgcaagctcagtttttcttcagattatgaagaaattccaaatccacaggggtttggattaatgaggttttgctgtactgcctccccttattcctcaacatgaagttcccacctcggattggggatgggtgggagggggtttcaagaggaggagggtgggatgggcaaggaatatacacaggtgaagccagagaagggttaggttgggggtgcggtgggaacttgctgttttgatctggtttcctggtgtgacactctgggttaaaggcttgaaggcccctgttaggagtctaggggtgagattctcttctctctgatcccagaggacgttaacttctactgcaggtgagaaacaaaataggaggatggtggggactgtcctgggaggagggggtggtccatggcttgtggtgtgggctggctataggggaggccactgctaggggactggcatccaggcccccttgaagcgtctcaataagtccgcgctctcctttttggtgtcttgcaggagaggcagcttccccccttgggtccaacaaacccgcgtgtgacgctggccccaccgtggaatggcctggcccccccagccccaccacccccaccccggctgcagattacggagaacggcgagttccgaaacaccgcagaccactagcccacccagcatcagagaccttctcttcctttcctgtgcaccccaccctgtaacagcaccaaccaccaggattggacatcaccgaggaacagcgggattgcctccccgaatgcctccctgggaggcacactgattgcccacccccaccactgcaccatttccaggagggagagtggggaccctcagccgcccccttttccttcccattggggtgctgccctctctttgacccccagggacccttgccccaggacaccgcctaccccgtacagaccccttcactccggggtgctatccccatcctctgcctcatcgttcccctgagcactgggggacagaccctcacccccaccctgggggtgtggcacctccaaactttcaacttcagggtgatttttttagcagtaaccagagctgacaatctaactcccctccaccgccccattttggcctcccctgccccccttgttatggggaggggaccccgggtgagggggccctattaccccttgatttctcaggagcgtctgggggggctcagcacgcacaaactccttctccttctaccactcttaaatttactccctccccacccagaacccagatggggtggagggggccaccggggcagggagggggcggcaaggggggaatgggagttgtctccccttctccccacacctgatctgctctcggctggtcccagagcggggtgagggggcttatgcccccccctcccccagtgtgttgggtggggtggaattgaggttagggtgaggggtcagggtttaggagggtgtgtatgttgggaggacaggctagttgatctgtcctactctgacacacagtcccctctgccccttccttctctcttcttggtctctactcccagggggaggggggaacttactctaggaaaagccatgtctctctcccccagggtggggggacctgtgttggaggaggggtgttggggggcccccttccatgactctgtcccctgggggaggtaggacagggctgggcttccctctcatcctccccctcccaatctccttccacctccctccctcccgccagctccacgatttttcggtgtttctctgtacatagttttctggcgggataggggaggtaggatggatggggtttggggtgggtaggccatgggaggggagaagcccctccttggcaccccctcttccctgactgctgtcccctacccagccttgcccccttcatccttttgcgtttggtattgagactctcctagactctactcctctttcttttgtatggacagttccccttcagtcccatccccctacacatacacccagccggggccaaatttatacttatataaaagttgtaaatatgtgaaattttatccctgtgccctttccccacctcaggccctacccctggaccctccccaaccttccttctctcttctttggctgttgtaattatctggggtttgtactgtacatatccggggtgtgtgtgtgtgggctgggggcaacccttctgtacagagcttcctggccccctccccccccgcccctctgcttccctccccacccaccacctcaagggtagggagttgctcttcctacctgttttattttgttttctcgttctccctccccaccccactcccagccttatctatcccccctcactgtccccttttctccactcccagccccatttcctttttttctggagtgtgtggtgaaacagaaaaaaacatgtttaataaacggagattgttctttta

SEQ ID NO: 1275 - DNA, 117314 bp, Homo sapiens
gaaactctggcaagttgcgggcgcgcggggagctgtcgcgggcagcgcgccctcgggaggacgtggccccggcccccgcccgcagtgggcccgaccctcatggccctgagcaaagggctgcggctgctggggcgcctgggggccgagggggactgtagcgtgctgctggaggcgcgcggccgcgacgactgcctgctgttcgaggccggcacggtggccacgctgggtgagtccgggccgggggcagcgacgcccggaggagagggcgcccgcattcgcccagcctcgggaagacgggtacccccccttcccgaggggatcgggcggcgctgggactgccggggcgtaggggtcgcgcgcagaggggtggctgtttgaatgaagtggggctggggactcgagagagcactctggctgggccggtggcgcacggaggccggccgcccctccacggggatctccggcccgcgccgccagaggatatggttgctggatagccggctggggcgctttgcgtattcatgaggatcccggggtgttgacttagccggcctgaccctgtgcctggcgccttttcttttgcacctgttgatgaaaccagtgattgccctttggtttgtgttggcggctccactcctggaggggatggggacaaaagccccaaaacataggctctggagaaaccgctgatggcagctttgtcccacgtaaatacttggtcgagaagcatcggtgctgcaatttatagaacttgtaaacaaatataccatgacctttatgctgtcttagatcctgccaagccagcgaatttcacctatggacttcagaagccttgaaactggcattgtgctatgggctttagtacgtgatctcacttaattctcacaattctactaaaaagctattattatccccattttgcagatgagcaaactgaggcctaaagaggctaagttgcttgccaaggtgacaccatccacctgacttttatgtggctgtttctgtaatgtcattcaatgcgtggcttcctggtatcgctaacctgggtcccttgttttgtgctaaccattataaggaaaacctgggtagcaccaaagcacgtgaaaccaggtctgattgttagacttctaaatgtggacacccgagagtaagctcccaccactaggcgtccagctgtaacagcttgccggtattcctagctaaacaaggtgcagcccggggtcactcgtacttgaggtggtcggcaaatgcagcaggctgctttgtagatgcctctagccttcttttcacatttgtatgcatcgactcccgttcggatgtatgtcttggaaggactatctctcctatttctgattccctaatcatttcattaacatgcatttatccagcttgttctcagtcacttgattactgaaacaatgtctccagtagtctcagcatcaaaagtaggcagtgaattgtagattaagttattttcagattattctaatttgtgctgtcctgaagagtctaagtttggttatttggtgtggccttgaaagaaaaccacagaaatttccattccattttagatgtctacttcataccacatttatcggaagcgaaagagtaatttcatggtacaaaactactgtttcatcaaatagattaagatgtccttcagttggattacggcaacattaagccaagttcatacacattcaagaattctttgaagcagcttagaaaaaagagattttattttttcaaaagtgaagatttaaaaatgattaatgacagtaatgtagtgcatattttccattaggagctgaagtttgggctgagatttacatcacggtggtgattacagtataccagattttagaacagagaatgtaagaaaggaattggctcgtcttcaactcatgtgcagtccacatttgtcatttaacctagcattcatttttcagtagaaaactttaaaaaaaaattttttttttttttgaaacagaggcttcttctgttgcctaggctggcatgcagtggcacagtcacagcccactgcagcctcaacttcccaggctcaagcgatcctcctgcctcagcctcctgagtagctgggactataggcacatgccaccatgcctggctaattttttctctttcttttcttttctttaaatggggtcttactatgttgcccatgctgttctcgaactcctgggctcaggtgatctttccgccttggtctcccaaagcgttgggattacaggcatgaactacttactgcgtctggcctgaaaacttaattttttaaagtctgttttgtttaagtaaaatgaaactatttttaaaaagcagctgtagcatttggtggctttgctggtccagagaatgtttgtaggagagagccttatgttactagaaagttgtttaaaactttcaacatatcctaaatgcatcactattggataaaatggctctgaacttgaaattcccatctgtgttccaaagggctagctagctgttttactttcctttcttggagaaagtgattattttttttcttttttttgagatggagcttcactcttgttgcctgggctgagtgaagtggtgcgatctcggctgactgcaacaccgccacccccacctgggttcaagtgattctcctgcctcagcctccccagtagctaggattacaggcacacgccaccatgcctggctaatttttgtatttttagtagagacggggttgtgccattttggccaggctggtttctaactcctgaccttaggtgatccacctgctttggcctcccaaagtgctaggattacaggcgtgagccaccatgcctgacccgagaaggtgaatttttacaagaaggctgcaatctctacttttgtatgggacaggacacttgtggcagctggcgtagctggtggtctaatcttgacctttcaccctttccttgaagttccgagtcgggggtagcttccttttctcttcagctgtggttttcctgtgatgggtccctcccagttagtaatgagaggctgagagacaagttgtggtaactgcttcgtgggtagtggtctttcccggcccctgagtcattctaacttccatcctgctccgctgcggatgcacatagctgctttcctaggggcgagaggagatgaggggactgggcctgatgaccacaggcgctgccccttcatagcacattttattcctgaaggatcctaactggaaaagtacctctcgccgaaggggctgggtggttccttatcattttcaggcaaggcctggagacaggggcttgaactgggctgtgatttttaggaaaaacggatggtccatgattcgttgattgctggactccttccatctgaacctgtcttcacctgtcttcacctgtcctgctctaaagtgaactcttcacactagggccgtctggcctgctagcaggattgttgaaggaattattccaaattcctgcttctaaaagaattaggttgtgaatctgaatctgtcttttatgtagatcagtgggagcaaaaattccagaggcagaaaagccaaatgtattggcactgatttaaaaggcttttatgaagtctcgggaacctgactggagggtagttggccttctcagcacaggtgggaagccccgtagccggtaccagcatccctggccaacaatccacaattagcaaacagatgttcccttatttgcacatgggacaaaaacctactcctgtctctgtctcttgtaaacttagggaaaagtgcttattgttaatggattttgtgtattttcagagtaagcgacagtgttccaaagttcaaggttctccaacagcccccaggaacggtggcctgagggtgtccctgtgtttacagtgcgggctgtgtgtgagtgaagtcgtgcctcctgccgcccagccgggctttgctgtgaacaggcagcagggagggagggatggggcaggagacttgagagaattaattaagttaattaatgggtgtccctaaattactttgagcttctggggggaaaggttctgtgtaaacaccaggcccccaggttctcccagctgctgttgtgcgaggccacgtctcgagtttagctttgtttgaattggtgagatggccccagggcagagcaggactcagtctgaactgttgcctagatcactttctcaggcattatggccagatttatttggtcacggactggaattttgatctgctagagaggaccacagagaatcaaataagtcaccattttataaatgctcctggacaaagttgaaaccacaggtaggaccaggcaagggttccggggcccctgacgtgggaaactagagcagcgacccgggaccacagtggtctgtctgcctccaggactggtttgcctcctctcctagccggaggctgtctcagcgtagtgtttacaaaatgcaaactgggatggtgtgtgcttctcccgcgggttttgtttgtttgtttgagacggagtctctttgcccagctggagtacaatggcgcaatcttggctcactgcaacccccacctcccaggttcaagggattctcctgcctcagcctcctgagtagctgggactacaggcatgcaccaccacgcccggctaatatttgtatttttagtagagaaagggtttcaccatgttggtcaggctggtctcaaactcctggccccaaatgatccgcccacctcagcctctcaaagtgctggggttacaggcaatgagccaccacgcccggccttccccgtgatttttgtagctcacctgtaagatcgtgatttcaaatcttaccaggctcttgttttggctgtgtggctcaaaaacttggcttttagcctttaattgtgaaaacgttcaaacacaaaagtagagggaaaaatgaatcccctgtctacctgccattcggcattgatagttatcaatatattgccatttttatttcacttgtccctgtattttttatgaaaacgtgaatctcctaaaatttagtttgtttaaagccaggcaagattctaatttgttgggttggcttttttttttttcttgcatttagatatagaagttcaatttttttattttattgtaaattgacaaattattatcgttttttgagatggagtcttgctctgtcgcccagctgggagtgctgtggcacaatcttggctcactgcaacctcttcctcccaggttcaagtgattctctggccttagccttccgagtagctgggactataggcgtgtgctaccatgcccggctaatttttgtatttttagtagagatggcatttcaccatgttggccaggctggtatcgaactcctgacctcaggtgatccacccgcttcggcctcccaaagtgctgggattataggcgtgagccactgtgctaggccaacagattaggatgattatatattatggggtacaaagtgatcatatatgtgtacaatgtggaatgattaaatcaagatgattaacgtagtcatcacctcaaatacttctttgtttatttatttatcttttttgaggtggagtcttgctctctcacccaggctggagtgcagtggcaccgatctcggctcactgtaacctccgcctcccaggttcaagcgattctcctgcctcagcctcctgagtagctgggactacaggcgcgtgccatcacgtccggctaatttttgtatttttagtagagatggggtttcgccgtgttggccaagctggtctcgaactcccgacttcaagtgatccgcccgcctcggcctcccaaagttctgggattacagacatgagccactgcacctgaccacttattgtttgtagggagaacatttgaaatttactctcctagtgatttcaaaatatacattattattaactatagttaccatgctatgcaagttcgaaatttacttggcagatttcgtgtggccagcagcagaaatggtggcatgaactgattctgagacattggccaagacacatttttaaaagcaaagtgaccacttgggaagggtcgaccacagcctggaagaacagggagcgctctgctggtgagctcgggaggacaaggtctgggccctttgacggcactgcctctagccccgggcaagagagggccgagggccatgtccagtggcctctatgctcccctttctggatgacattcctgctgctcaagaccctggagtgtgctaagcacatagtgcagcctgctcagccccctcccagggcctcaggcagactgtgcagccgtatgtccaccccaggcccgggcgttggggtggcaagggcatgttacaggtggaacgggacacacactagctgggactctgtgtgtgtatgcacgaggctccctgcaggggggcatgaagcccaggttgggggaagtcggggaagagaaggtggccaggctggggccgccctccccactggctacataatgaacctggccttccaggtagtcacggtggcatacttttcgaggtaggaggatagaacctattttatttaactgttttactttgttagcttgatttaaaactgaacagctgggcatacaggatgcagcactcatgagtactctggccccagaccctacagatattcaggcagacctgtcctgggcacctgtcccagcccgtgtctctctgctgtgtctctcttctggagcgttcctggggtgctcagggtcccctttgtgctttttggctgctcagtttctgttgctgggctccttcggccttcccactgaggatggggaatatattctgttttctttccacttgaattgtccttaaagccatgggtaaactggttcaggctcagacttgggaatttgatcggagtccctttagcatttctgggcagggcttgttggtgtcgtggccagctgtcctcgaggtgaaaaccaaattgggttgggagggtgcacatgacacttaaagcccccagagctgcggtgccatcaaccacacactgtggacaggaggctgtcagtgggcaggctgggtccaccttcaaagtccatacgaaacagcccagttcagggtactgcttcttttcgagatctcacgggcaggagccttctggcactgttcatgtaaatgtaagtcattctttctttctggaggaaaatttagacaggtgaatgaaaaccggagtgcttaatccgctattctacatgcagaagtttatctcaggaaacagtcccagatcactagcccattttgcttcaaggatgtttattgcaagctgttttgagtttttcactggttaaataaactttggttcaacttgatcataatagctgacatttgtggagtgtttaccacctaccaggtgctgatccaagtggcttacatttattaacttacttcatccttatgtcaaggcaagtactagtaatctccattttacacttggggaaactgaggcacaagaggcctaagaacttgcctgaggctccacctccagtggaaggctccagagaacaatatgttcagtaaaatctcattcttatgtaaaaaaatgaatatatatatatatatatatatatatatatatatatatatggaaaaagactccctttgtcctgttgtctctggcttatcttggttttcatctgacatacacttttgatcgaggaggttcccacttggggaaacagccagcccctttctgagcagagggtgtggcactacaaaggcgaaacatgatctctgggagaaacatgcttgaagcccacgctcctgggggcagagctgagcctccacacggatgtccccagcactgggagcagaggctgatgcggccccaaggtgctgaggaaagcgccccccagtgcaaaggatgctacaaggccccaggcttctcaaggaacatgaggcctggcaaacccagaacgttagactgggtcggctccaagatgcccctgggtttgagctggagaagtgtctgcgggagggtgctggggctcctgcagagcgtgtcttcctgaccctgtgggcttttctggggggggctaggaggctctgccaagttggtggatggaactgtgccttgccctggggggcactgggcaggagccagcctcggagcgtgagtctggtgctgcgccaggaggctagatgccccggccaggtcctgtgggctgcgccgtctgtgcccttggcccgcgaggctggcaggctgccactgcttgtaaagcctcctggttgaaaaggtgactcggagcagcggattcactgggagcctgtcagccacagaggcagcttgtgcttgtgccccaggcccaggccgcaggaggtgggatcaagttccacggctccagtgtgaaggtctgagcttcattctaaggcaggtttttgaggacatggggctctcgggcacctggttgtattcctgcatcctgcattcctgcccactctctcatgccttcttctccttctccttggcgtgccccaagccagccttccatctcagatggagttgtatgtttctagtgagcccacacaccccctgaggacagggcctcacccccgcacgcctgcttcttcatcacagctgctaggaaatgaagatgcatgtccccaggggcctttgaagtaggatgtggtctccctgagcagaactctgactctaaattctctcctggctctggcgttggtgtgggacttgggttgcgggagggggcaggttgttagcggctgctgctcagacccagcggaggaccgggctgctccaggctcccggcaagatgtagcaaaatggccaaatttaaggtgagcacgggctcccgtgcagtttctcacccctgctgctggctgcctgtctgtgaatgctaaggcgaggggtggttctacattgacttcttactgactggtgggagtaacccggaagaggcaaatgacttccttccctttcctcggctctgaacctagaatgttccagtgataccacctccaaactcttcacctgtgtcctttcccacctctctgccctgaggacagggaactaagtggctgctcacggtgggtaaaactgaggcttacaagacaccttgggcaatgggacagccagaccccagccctcagcacctgcctctcccatcccaagccccagtctctttttcagctgcaaagtcaatacctttgctttcagagagggagcatgtgccacgccaggagaggctttgggtgtatcacagatggagactgcctagcttaactgcgcagtctgaatgattctaaggaggggaagagagaacgcctctggagcctggcacacacatttgccggagaaagtggtgagtgcgttgtgaccaggtgagggacgaaccttaaggagattggctgagaacacctcccctcctcaccctaagtcaacaaacccgggacagcagtgcttccaaaaccttacttgttcacctcacctggagattcttgtggcaaatcgggttctgcctcgttggctctggggtgggccttgagagcctgccgttctaacaagctcccaggtgatgctgatccacgaccagctttgagtaccaggatctcgcatcagcttgggagggaggagacctgaatcctagccctggctccttaggctcttctttccagtgggggaatttagttaattgctccgggccccaatatcttaatctgaaaacaaatgaatgacaacctagttgcctttcctactctgagattccatgcgtcttaaaagaaaaaagttttaaaactaaacatgtcactgtcaccatcgctacttcacacacctaaagttataaaccactcagaaatgcaaatcttaggagatgtgatctggcaaggcaaaatcgaagatggctttgaggtctcagctaaacctagaaatctgatgctctgcattttttatgggatgcttatgaattaatgaaaatacatgagattatctctccttgagtctaccctttcctacaaccagcaaaaacttataaaaagcaattgaagcttactttgggaatgccaagggattgattaaaatatggactgtgctgattccatggctggtttagcagattcttgttaaaagccatgactttttaaaatttttatttttttgtgggtacatagtaggtatatatatttatgggatacatgagatattttgatacaggcatgtaatatgtaataaccacatcatggaaaatggggcatccatcccctcacacatttatcttttgtgttacaaaccaattatactcttttagttattttaaaatgtacagttaaattatatagtcaccatgttgtgctatcaagtaccagttcttattcattccttttatttttatttgttttactcattaaccatccccacctcctccctagacccccgccgctacccttcctagcctctggtaaccatccttctattctctatgtccatgaattcaattttgatttttagatcccacaaataagtgagaatatgcaatgtttgtctttctgtgcctggcttgtttcttttttttttttttttttttttccttttttttgagacagagtcttgctctgtcacacaggctatagtgcagtggtgcgatctcggctcactgcaacctccgccttctgggttcaacctcccaagtagctgggattacaggcacccaccaccacacccagctaatttttgtatttttagtagagacagggtttcaccatgttgtccaggctggtctcgaactcctgacctctggtgatccacccgcctcggcctcccaaagtgctgggattacaggtgtgagcaggtgtgagcaactgcactcggctggctggcttgtttcacttaacataatgacctccagttccatccatgttgttgcagataacaggatctcattcttttttatggataaatagtactccactgtgtatatgtaccacattttctttatccattcatctgttggtggacactgaagttgcttccaaatcttggctattgtgaacagtgctgcaactaacatgggagtgcagacatctgtttgatatactgatttcctttcttttgggtagatacccagcagtgggattgctggatcatatgatagctctacttttagttttttgaggaacctccaaactgttctccatagtggttgtacgcatatagtacatatagtacataacatatataacatatgtatactacataacgtatatatagtatataacatatatagtggttgtactaatttacattcccaccaactgtgtacaagggtttccttttctccacatccttgccagcatttgttattgcctgacttttggatgtaagccattgtaattggggtaagatgatctctcagtgtagttttgatttgcctttttctgacgatcagtgatgttgggcaccttttcatatgcctgtttaccatttgtatttcttcttttgagaaatgtacattcaaatcttttgctcattttttggatcggattattagatttttttcctgtagaattgtttgagctccttatatattctggttattagtcccttgtcagatgagtagtttgcaaatatttcctcccattctgtgggctgtctcttcactttgttgattgtttcctttgctgtgcaaaagctttttaacttaatatgatctcttttgttcatttttgctttggttgcctgtgcttgtggggtattgctcaatacatttttgcccaggtcaatgtcctggaggtctttcccaatgttttactgtagtagcttcatagtttgagggccatggcattcttaaaaacataactttcattcttgcatagctttttttttttttttttttttttttaagtaacctggactgtcatttggctagggaggcgggagtttgtgtgtctggaaatgtgtgggtttttttttttttttttttttttttttttttttttgggacggagtctcgctctgtctcccaggctagagggcagtgcagctacctcggctcactgcaagctccgcctccctggttcacaccattctcctgcctcagcctcccgagtagctgggactacaggcgcccgccaccacccctggctaattttttgtattttttagtagagacggggtttcaccatgttagtcaggatggtctcgatctcctgacctcttgatccacctgcctcggacttcaaaagtgctgggattacattacaggtgtgagccaccacacccagccagtgtgtggtcttttttatctgtctgtttaaactgtctgttttatatgttgcatgaaccccgctttaccatgaatcttatcaatgactgataaatattgtctattggaaacattctctttaagaggaggtgaccgttctctgcagctcctgctgattcagcaaagctgaggtcaggtggagccagctgggcagagatgagtgattagaaggctgtcattggcagtgacagtccacgtgctccagggcagaacagtgacactggctgtcacagtctgtttcaacaatggaggttgtttgtttttatttaaatgatgtgaataaagaaaggaatctttgaaaactaaggctggagctgcccaggcctgagccaggcccttgtaacaaggcccttctgggtgggggatctacctctcttttcacctggaccacctggcggtgggtggcgagctcagaaccacagctgggtggaaaatgggagggccagcagcgagctgcaggaatggaattccatgatggcatctcatgtctccagagtggacagacagaagcttgtgttttcatttcaaagggcatctgccacgccctccaggcagaccacataaatggcatttttgggtgaggcctgagggattctgtctggtggtatacactgattttaaccagaagcaatagatttgggctctttttgacaggggaagatagatgagagatgatttccatgaggatgttgaaaatattggcaattctgaagaccccagggagtcccagggggttcctggccaggagcgcccctccattgccctgcaccaccttgctttccaggctgtggctctgtgtgtctgaatctacggcatgggggcacttccttctaattcacagaagaagctatatgggccccagactgcccatcctgctaaaactggcaaaggccttttcccagcctgagcagtagtgattcagccaactgcagaagtggtatttggagctcacccttaaaacataaagcaagttatgttcagactatatacaggcaatgagaaaatatgatgaaatatgactgcgtatgaatagccccagacttctagggcctttgagtgtgtctgtcttgggcaacatcttctccttttagatttcaggctcagtttactgtcaggaaaattaagttgctgagagcgtctcagaattttggcttaaaagagaatatacacctggaacaaagacttgaggggtgctcctattaaaaaaaacaaacagtgtgtgagcttcaaaggagcaccttgaaactccagttccatcacatccactctgctgggccctcctagggcagctctctgtcttgtgcctgccttctcttctgaacactcctaaggtattttgagtgcggaggataggatcatacactcaggaaagccgagagctagatcctgaagcatctgtgcgggaaatgcccatctgtgcctgaaatgagcatctgcgagtgaagtgatcccatgtctgggatctgtttggcatgcgccaggagacagacggacacatgcatgcacacacacacacagcggggacggggagttggtgaaataagagtgggaaaatgttgacacctccgtgagccgggtgacaagctgcttggtggttcactagacagggagttataaattggccgcttttcaacatcgacagataaaaatcaatagccttcccataatgccatcattaatcaattagagtctgtaatgggaaaagcagatgccactcccccacagtttctgggaataaacaaagtgtataaggcctaaaagaagaaagctatagaacttgactgaagcccacatctgtggaaaggcatactatgttcttggagtgggaacatcaacactatagagatggcagttcctctccagttaatctggaagtgcaagtatcgatgagtaaatccaattaaattccaacaagagcctggtctaaaatgtaacaggctgattttacagtatcgctggactccccctacatccaaacttattcttaccttcattctcccattttggttaatggcagcaccatccaggcaactgctggtaataaaagcctgtgagtcattctgacgccccttccttcctcagcctcatccaacctaccagccagtagtgaatcccaccccaaaacagatggtgaatcccaccgagtcccccggtcatcgctgctacatcgagagtgcagccactgccccatgtgctttcctggtctgcttggcagcctttgaactagtctcctggctcttcccctgctccccgtatagggatctgcttgaagctcacacagccctgatcctctgcccctgcctctttctccaccctcatctcccaccatttcctgggctcactgcattcagcagcctgacttgttcctgctcagaatcttcacacccacctgcatgcactccctcccccaggtgatatggtttggatctatgtccccacccgaagtcatgttgaaatgtgatccccagtgctggagatggggcccagtgggaggtgattgggccatggtggtggtttctcatgaatggtcagcaccatcccccctggggttatcattgaaacagtgagttgccacaagatctgattgtttaaaagtgtgtggcacccaccccaccctcttggtcctgctcctgccatgtaagttgcctattcccactttgccttccaccatgagtaaaagctccccgaggcctcccaagaagcagatgctgccatgcttcccgtatagcctacagatccatgagccaattaaatctcttttctttataaattacccagtctcaggcatttctttatagcagtgcgagaacagactagtacaccaagggttggcctggctgctgctgcctccgtctccccacctaccccacccccccccacccagcttcgtgactgcagtaagaccttcctgacctctgtggctggaataccctgcagcccccacacaccaactgtctctgccccatgcctggtttcctttcttcttggcgcttatcactgaaattaccttatgtgtgtgcttacgtgggtgtcttctgttgtccactgcaaaaatgcattgtgggttgaattgtgtgccccagaaaaatacattgctgtcctaacccgggataccttgcaatcttatttggaaatagggtctttgcagatgcaatgaagatgtaagttaagatgggatcgtactggtatagggtgggcctttaatccaatgtgactggcgtgcttataagaagaaaagggacacaggcagacgcacgcagaggggagaatgtcatgtgaaggcatacagggaagacagccatatgacaatggaggcagagatgggagtgacactgccgcaagacaaggaatgcctgggctaccggaagctgggaaaagcaagggaagatgctcctacccacgccttgatcttggatttctggcctccagaactgtgagacaataaatttgctgttgtttcaagccccccgttctgtggttctttgttacagcaacccaggcaactaatacaggggcattgtgtatctcgttcagtaccttaccttaacactgcctcgtgtggaaatgaggcttggcaaacactgttgaatgacgaagcattggcaaaaaaaatagccaagattttgaaaaggatccacaaaggcagactgatttaccaggtagcacaacatattataaagccctaaccatcgtggaggctgtcagcacaaatcaacacagtagagtggaaggctcagaacagacttgtgtgagcagtgttactttgtttcttataaaggtgatgacttcagtcggtcagagaaaggtaagggtggatactcagcacctgctgttggtgtggttgatcagtgcagtgcctaagaggcccctgctctattcaactggatattcacgcaggcattcttggccggtctgctcagagaggaataggctggaaaccttggctggccagcaggatgctgcctgctgctctgcttccaggggagcgaggggtcttcctggcagtttttgcaggtggctgcacacacaggtgtccttctggtcactagctcctcccccagctgaaagccctgggtccccaaggagccagaatcccttataaaattaccagccttacagagccctgggttcacacaggggacattccatgttacaagagttaccacacctaaggaagccccatgcctggcttcttcaccgagtggttataattcacttatgggtcttccctgtccagaggcaatttgccaatcaaggtcatttttaccatgagcaatgttgtctagtaacagagttgacgttccatcttgattggggttcccagggaaccagagctagataattaaacattaaattctcatacagaagggaagaaagattttgctaagcctgtgaccaaaactatccatatggacactaagtgagagtcctatgttttatcatacattaaaataaatgcagaggtatttaagtgtaaaaaaacaactttcaaagtattagaaaatataggctatgctttcacagtgttacggcatggaaagatgttctaaggaaagcatcaaactcagaagtcataaaggaaataaacctgacagatatgggaaatatttttattgaagtgtaacatacatagagaaaaatgaacactcgaagcgttgagctccatgaatcttcacccggtgaacacacccacatagccagcacgcagatctggagagagaacgtttgcatcccaggcccctgcctcccattccccctgtgtccgaatgatagatttgactacataaaaatggaaaactccaatatatcaaaagacaccataaacgtagtgaaaagacaagcaacagcccagaaggaaagtttgtgcagccttttgtaacatagaaaaaggccaaagatggatgatcatagcatataaaagaactcctatagatcatgaagaaggaaggacaaatagttcaacagagaaattggcaaaggatataatgagcaattctccaaaggaaaaatacaaatggccaaaacaatggagccagtgtggccggctctgcccagcacggccatttgcacatggtcactgttgggtgggtgagggctgcttgccccgtctccagccccactctcttgccatctccccctgtgattcaggcatggagctcaggccccaggtggcaggcagcgcactctgctcagttaccccagctcctggcttcatggccatgccctggcacctgtctccctccccttagcctgctgacctttttcccatgggatgtttggttgtctctgtacaggctctgagccagccctatgggcttccagacaagcccagattgagcctgccctctagggagcacccctgtgtagcttccagctgagaccttgagacacaggcccagggagccaagctcagggctgcgaacatccaggtggggctcaggtgctagaggcggacaacagcctggtgcaggacccagagtggcaagaggtagtaagggggccatggtgttcagaaattggggcaggtggtgggtaaggcatcctgcttctaaaggccagggtttgggagggcaaggaagcccctggcaggagtcagggcaggcatcccgggcaggtagtgtttgttctgtgaagcaggcttccccaaggaggggccctagagcagaaagctgtgatgtgcaggtgactgggagacctgttctctttcgagccgtgcagctccggttagtggatgacagatttcaagccctgctcaggccagtgtttttcacacatgtttgacctttggttgacagcacacagcacaacagcttatggtccaggagtgcacctcggcatgcagtttgggaatcctggcgatgatgtgattaagattctggggccaggttctcaccaagccaaaaggctttttttttttttttttttttttttttttttttttttttgaggcaggagctaattctaggtacagaaaaccattggtaaagtggaggaagctgtttccagatccacggaatgacggtaactagcgtcacttgagaaggtttcttctgcccttttgtaaaaaatagcatgatgttttctcctagagacagacagggcctctgtacgtaagagcagacatgtatggagaaggccggagagtcacaaaccatatgtgcctgagatgtgccacctgtggggctgtgaataaggaagcagaatcagtgtgtttactcagagctggatttggctgtttgttccttcatctttcttggaccacatgtcctggtgttcagaggctcctgagagcctggggctcagtaggccgtctcatagcccctctaacccaggtgagaaaacaggtcccagtgggtccctaacccatgctcattttctcaccaaacaacaacaaataaatcagaaagtcctgaaaaatgaattctggcctgttttctggattctggattgaaatatggagtaggagctgacttttagtaagttgatcaactctccccgccgaccccctagccttctggaactgtcttcagtaaacacaacccccgccacccctgacctacccgcaccgcactgtggtcggcctcttctttgaacacttcccttacagcacgcactccccccaagctgggccttctcttgagaccactctgctgtccttgggagtgatggtggaggcggggtagacaccctgtccctgtctcgtggtgctcctttgggccacagctcctcttccctccgtaggaggaaccatctggaatccatcttcctccttgaccacacctctccattcattaaggagcagagttccctgctcactgggtctctctacccctcctctgtccctgtctgggtgaggtcacagagagcctcacccgcctgctctgttggcctctcacttgccgtcctctctgccccgttccctctcctgcacacctgtccgcggtatccccagctcttagtgactctagccctctcccgccctcctctgcaccctgcatgcacttgtgttgctgaatgtggccggagaaaaacacagccatcttgactgttctgtgagacttcatagatttccagggctgtgtggaatcaaaaaatcttcctgcatttccccagccatctggcctccaggatgactatttcacatctcctcaagcctttcacatctcatccccctcacacctgatgattttgcttcctatttcactgggaaaatgaaggtaactgagaactttcttttttttttttttttttttttgagatggagcctggctcttgttccccaggctggagtgcaatggcacgatctcggctcactgcaacctccacctcccgggttcaagcgatttctcctgcctcagcctcccaagtagctgggactacaggcgcccgccaccacgcccggctaattgtcttgtatttttagtagggacggggtttcatcatgttggccaggctggtctcgatcttctgacctcgtgagccgcccacctcggcctcccaaagtgctgggattacaggcatgagccaccgcgcccagccaaaggtagctaagaactttcaacagcccccacacctactccctggctctggtacagtggacagcctcccaggcttgtcccccctcccagtgaccttgacccctctcatcttttaagacctcgctcccgcagtttccccctttccttcctaactcggtcatttgcaccattataccaacaggctgtcttagctcacattaagaaaccctctcttgaccctggcctccacctcatctcttggttttcccatgtgacgaggttgtctacacaccttccctcttcccagtctcccttgaagtgactccagccaggctgtgtcctcccactcttctgaaacctttcctcaaggcctccaggaccttctggctgctcagtcttccatccaacagcatcccacagatgaagcattttcttcgcttggcttgtcttacgctctgttctcatcatattgcttcctcactgcctgtttttctccagagcctagaaccatgcctggcacacagtgggcatctagaccctttgctgagtggtgaaattgaagtgtgacagggtgcgtggcttccctgctcaggctccctcagttcccaaagctgtgctccttcctggatctcatgtagcacaaggaggcatacgtgggtcgcaccacatggcttctagaggagtatgtgtgaatgtgttcatgttcatgtggaaatagggaggcggccctgaggtgggaggagccttcccaagaggaatcacctgagagaggaagaagagctggggaggaactgaggaactggtttggcaggttcaggaagaagtgagtgaagaaactggaaaagtagccaggatcagaacctgcagccgcaggacctaatttgttaggacctaaattaggggtgattgtgcaaggcagtgcagcatggaagccccactccaggacttccctggtggctaggaaacattgctccacccctccctcttgtcaaaagagaaggtgcacacacttggagagaaatgggtatttttgtgcttctttcttgttccctgttgggtaggagggttggggctaccaggcccagtgaaaacacagcccagccctgcctgttctgcctcatcctgaagtgtaaggaactgcccattgtgctgggccctgtcactggctctgcccgaggcatatgtggcactgggcctggctttttaaggtgcaaactgttttcctggatttcttatttttaagggaaaaaactcaactacaaagactcagtggccagtcctgtgctcaagccctcttgttaggggagctggcctccctctttggccacagctcagtgcagggaggggtgtggaaagtgctgggaaagggggaggacccaccctccccacagatgggtttctggctctgactgcgggaaaccaaactttcttgtattttctctggctgggttgtgatgtgggcatggcgttggtgggaggtagtgcatttgctgagggtgatgtgttctgagtgtcccctcactccgtggctctttcatgtggcctggactttttggtgagggagcagcagtgggaggacaggagagtcctttagcgggctgatgtgtgtctgccagttggctttgtcttggctcgcagcttctgtttcagacagatgttttgatccccctttgcttagcaaccagctgcagccttgctctgtcttgggaaaaccactgtctttctgaagagctgcttcagctccaaaactgataactctggaaggagcagccaccagccagtcagaactgagctccgaattaacacatgaaggagactttggcctcttgagaccctgaaatacaagaagatggtttcatgtcatgtccaagaatgtggccacaaatgctacctcagtctcgggctgtctgcattgttaaatgacctcattatttttctgacctgtgggccgggcttcgttggcatttccttaaggcgtgttattgtggaaaatattattcaagaaagaagagcatgtggtttgcttggttactgagctggactggctctgggtgaccagagctctcacgcagagccgtgcacggctgctcccactgagaccagcctctgcctcgggatggtctgacccacggagctctgttttgggacccagaatccatgagccacatttgctgtgctgtgggacaaaccacagtttccttgggagcctctcaagtggtggctgtttctcttccacacccttggaccactggagctggagacggggagttccccagcctcctccaaggataagcctattccttaagcctccacaagccccatcattatttatttttatcataagccatgttgttcgagtagcatagacaactttctcaggttaccagggaaacaggactagaaagtcaacccacgatcaaattaccttgccgaaagggaaccagctcagttaacccttgaccccacacgccattgtcagaggcgtatgaaccagagcgactccatcttgaataggggctgggtcaaatggatctgagacctgctgggctgcattcccaggaggttaggcattcttagccacaggatgagataagaggtcagcacaagatacaggtcataaaggccttactgctaaaacaggttgtggtacagaagccggccaaaacccaccaaaaccaagatggcaatgaaagtgacgtctggccatactcactgctcattatatgctaattataatgtattagcatgctaagagacactcgcaccagcaccatgacagtttacaaatgccatggcaaaatcaggaagttaccctatatcctctaaaaaggggaagaaccctcagttcctgggaattgcctacccctttcccagaaatgaataatccaccccttatttagcatataatccagaaataatcataaaaatgggcaaccagcagctcatactgctgccctgcctatagagtagccattcttttattcctttactttcctaataaacttgctttcacttcatggacttgctctgaattctctcttgcatgagatctaagaactctctctcggggtctggatcgggacccctttccagtaacaccacgagactgcgtccctcactgcccctcgtttcggcagttgcatggttccttggtgagttttccctctttctcgctgtcatttctcactatgagtctggcgcttgttcttggtgtcttcagtggccacgtcgttgatccttcggaggaccttcgccccctctcctccagtgagtgaccccacccctgcagccactcgctcccatgccacgcccctgacccctccagcatctgtctcaaacatcccactcttctttctccactttcaccttgtcactcatcctgcaattcccagtcccagtgactattttttttttttttttttgagacagtcttgctctgtcgcccaggctggagtgcagtggcgcgatctcggctcactgcaagctccgcctcccaggttcacgccattctcctgcctcagcctccctagtagctgggactacaggtgcccgcaacgacgcccggctaattttttgtatttttaatagagatggggtttcaccatgttagccaggatggtctcaatctcctgacctcgtgatccacccaccttggccttccaaagtgctgggattagaggcgtgagccaccacgcccggcccccagtgatctttgaccccactgggatggcgacccttagaacccatggccttctcatagcccctcgtctgtctcacaccttccctctttgccatgtcagtgaccagccctgccttgcactcaccctccccacccgcccttctcttgctgggtcctccccacctggtgaaacctcagccctggttacatcctgcactccacgcctgcaccagccgctgtgcagtagaagtttctggagatgccccactaccacacgggcagagcgtaccatcaggtcacaacccctgagccaaggtgggcctttcacttgcgtttctgtgctctgtccactcccccaccctcccagatggcaactccaccctcccctttcctcagctctgctgtgcctcctccccatcctcactttcagctgatggcctcgtcctctcattccaccccaaaatttgaagccactggaagagaattcccgctggctccctgcaccaccactacccgcccaccatgtctgtcccccttcccacctgctccccgcagtgcactgtctacgtttcaggccagtgctacctgtgtgcagatgcccatggcctgctccagggcatggctttcggagctccctgctcctgccacatccgtcctgacctctctcttggctgcattggtcctgacctctctctcagctgcatcaatcctcgcctctctcctggctcatttctgccagcacaaaacttggtataaatgcccctggcctaaggaaatcttttgacccactttcctctccagcagcctctccatttctctgcttgccacacgcacacatgcacatatgcacacgcacacacatgcgcacacacgtatgcacacacgcacgatccatgcacacaatgcatgcacacacaggaaattcctcagagaatcatctgttgccactgtgtccattttctctctccctccccattcaggtttttgcccctcaactttactgaaactgttcctctctgagctgccaaagtctgactaaagtgacaaattctcagtcctcaaattatagatgcagaagcagcctctgacctgctgactgctcttgcttccttgaaacgctttcttctcctggccgccaggatgccacgcactgctgggttttcttgtatcttcttggtcacttctcagtccaccctgaccttcaaacatgctgcacccagaagtcggtgccctccactcactccctaggggatcccctccaacctcatgattattttattttattgctgggattacaggtgcacgccacactcccagctaatttttgttgttgtttgagacggagtctcactctgtcgccctggctggagtgcagtggtgcgatctcggctcactgcaaccttcgcctcctgggttcaagtgattctcctgcctcagcctcccaagtagctgtgattacaggcgcatgccaccacacccagctaaattttgtatttttagtggaggtggggtttcaccatgctggccaggctggtctcgaactcctaaacctcaggtgatgcactcacctcagcctcccaaagtgctgggattacaggcatgagccatggcaccgatctgtttatttttgagacagtgtctcactctgtcaaccaggctggattgcagtggcgcaatcatggctaactgcagcctccacctcccaggttcagatgatcctctcacctcagcctcccaagaagctgagaccacaagtgtgcacaccttgcccgactaatattttttattatatttttagagatggagtctccctatgttgtccaggttgttctcgaactcctgagctcaagtgatcctcccatctcagcctcccaaagtgctgggattagaggcaggagcccccacacccggccccatgattgtaaataactctgtctgctgggacgcctgggggatctttccaaccagatttctctgctggactccagacttgcagagctctgtcgtcagcctccacgcagggctgcaacagagccacggcatgtctggtcccagcagatgctctgcccagacctgtcctctcactctttgctgtcacgccagggccactccatcccttccattgttcaggcaatgaacatggcatcatccttgaaccctgtctttctctcatatcccataaccaatctgtccatggttccaccttcaaaatatacccagatatgtgatgatgttgaggaattgctggtaacttttttagatgtgataatggtattgtggttgtgttttgtttttgtttttgttttagacggagtttcgctcttgtcacgcaggctggagtgcagtggcgtgaccatggctccctgcaacctccgcctcccaggtttaagcaattttcctgcctcagcctcctgagtagctggagttacaggcatgcaccacctcacctggctaatttttatatttttagtagagactaaaaacagggtagtggtgtgatcacagctcactgtagtcttgacctcttgggctcaagcaatcctcctgtctcagcctcccaaatagctgggaccacaggctcccaccaccacgcctggctaatttctttaaaaatttttatagggatggagtctcactgtgttgcccagtcttgtcttgaactcctgggctcaaccagtcctcctgccctagcctcctaaagtgctgggattacagggagggagataccatgcctagctagtttcatttgttatctgcctggtgtgtgtagacatctgctttgtcacctccattgtggagagcaacatggggtttcaccatgttggccaggctggtcttgaactcctgacctcaggtgatccattccccttggcctcccaaagtgctgggattacaggcatgagccaccacgtctggccatggttgtgttttttaaaagagctcttatcttttccagagtcttactgaaatatttacagatgaaataatgtgatgcctggaatttactcacaataacctagggcagtgcttctcaagctttggcatgcattcaagtcccctggagggctcattaaaacagctttctaggtcttgagcccagagcttctgattcacaaggcctggggtgggccccgtaacttgtatttctaatgcttggtgctgctggtgtgaggagcccattttgagttgagctgatctaaggtataggagagtgagtagcctgggcgtgggctgggagaaggtggagttggtgggtacgtggtaatgaaggtacaagggtttattatgtcaccctacttttctttggaaagttccgcaactaaaaagcacgtgtgtatgtgtgtctgtctgtctgtctgtctccagaactcttcagctcttccattgctgcgccctggctcaggctagagtcctctcttgcccaggtggcgctagcacctcctaactggtctccttccttctctccttgttcctctagagtcagttctcaacagagcagccaggatgatccccagacccctgcagtggcattcagagtgacacccaaaacctttctgtgacctcaaacttctgtgcagtgtgttccccacgccacttcctccatgaaccttcagtcacactgcccgcctcgctggggcttgcactggtcaggagtgcttctgccgcaggacctttgcacgtgcccttctgggcctacagtgctcctccactctccatgcagccatctccctggcttccttcaggtccgcattcagatgtcacccttgcaatgaggccttctcagacaacaccatctaaaatgtcacttccccttccccactattcataccctactccctgctcactttttctgctccgcgcctgtcactgtctatattgcactgattgatcttatctatcctggcaggaagcttgagcagcgcccgcctcttcctggctgtgcctcggcagtgcccccaccccagcctcccaccccatcttggtctgcaccccctgccatcactcatccattcattcctcctgttcctcttggccactgccaaatgctggatggtttccatctgtttggttcactgcagtgtctctgtccctggaagggtgccagccacagaaggcacgaagatgtgtccacagagccggcggctaaaaatctggcaagaggagtcgaggaagggggctgaggaggtagaagggagggctttcctcaaaaggccagaaattcgtggccagccaaaggggaagcaaagacattctcgtgtaggaaaacttacaggaaatgcaactaaaagcgtgggagacaggaagtctgtgtatttctgagattatcaagaaaggggggatggaagttgcaaatgggcaggccaaattcagtctgcagaggtgtgcttccagcccacgcagtgcttaaaataaatggagatggttgccagcactggaaggtctggagtgccctgtctcctggaaacactgcagcctggcaccactgggctggtgagcatgactggcacctgcagcagctgcccaccagctaatggcaggtgtgtgttctctgctcacccaaagcccttccagcagcttcattttgttgttgttgtttatttgtttttgagacagggtagtggtacaatcacagctcactgcagtcttgacctcctgggctcaagcaatcctgctatctcagcctcccaagtagctgggaccacaggttcccaccaccatgcctggttactttttaaaagaatttttgtagggatggagtctccctgtgttgcccaggctggtcttgaactcctgggctgaagcaatcctcctgccttggcctcccaaagtgctaggattacaggtgcgagccaccatgcctggctagcttcatttgctaccttcctggtgtgtgtagacatctgtgttgtcacccccattttggaaagcaaaaaggatttcttcttccttcaaacataattgagaaaatacagttgtttgggggcaagtagggtgcggggtgactctggaaccggcctcctgggaagccaggcctctgggagtgctggaggtgggcagtgaggctgccaggcccctgccttctggggtggggtgcatgctcctgatacatcagaagggtcgggggaggacttggaggtgaaggcactgcaggaagagaggaagcttactggagagacggtcaatggggcagtcaggctttaaaaggacgggcccaccaagtgaaaagatgaccaagtgtttgggctgaattgtgtcctccaaaaggatatgttgaagcctaacccccgggacctcagaaggggatcttatttggagatagggttgttgcagttgtaacgctgagatgagattatactggagtagggtgggcccttaatccagtgtgactgctgttctaagaagatgtacatgtgacaatggagggacatgtggggagaggatggccacgtgatgatgggggggacatgttgggagaggatggccacgtgacaacagggggatgtcaggagaggatggcctcgtgacaacgggggaatgccaaaagaggatggcctcgtgatgacaggggacacatggggagaggatggccttgggacgacaggacatgtggggaggggatggccacgtgatgatgggaggacatgtggggagagaatggccacataatggtggggggacacatggagagagaatggccacataatggtggggggacacgtgaggagaggatggccacatgacaattgggggacaccacgcggggagaggatgaccacataacaacgaggggacatattgggagagaattgccacgcgacgacggaggaagggactggagtgaggaagtcataagccaaggaacgccaaggacagaacaagcagcaaacacaagacacagggccaggtaaggaggtccccggctccaggtatcagaggagccctgctgatgcctggatttcagctctctggcctctggacccagaagagaatgaagttctgctgcctggggcctcccagtttgtttacagtgagtctgttcatggtggagaaacatcttctcatgatgttcctgtccaccatggtcaaggcctgttttgagctcctgcattgtataagtcagaggtaaagctgtttttctcaaggggtcaataattgacagtattggaatgggacaaggtggtcctgttgggttttgtttgtttgtttttaaaatatgaggatagaaagtcgtgtttttacttgtgcttaattttcccagtggccgggatgtgaagtccacgcctgtcatctgtaatgcaccagggcaaggggtcggttttgtttgcatagcttctcccagggtcatcttcccacccctcaagtgtggatttggccacaacactttgtttagcaatttcctgtcattttgttttatttggtcaggcttatttgcatagttgaatgaatgcacaaaggcctccttgtttcgtggttcacaaagtcagaactggatcataccagggcatacgggttctgtttcaaggctttgtaaagctgctagggttgaaataggtatttttggtgtcggaattattttattgcatttatcagtttatctactgagatggggcactgagaactgctgatttacctctctgcagccctgtctgcagtacctgaaggctgggggaagacatttggcaatgcacacagcctttgtttctgcctgtgaagttggggtttcataggccacctcccaggagggccctgtaggtgcatgacagagtccgagtgtctcaccagtgggtttgtcattgcacccaagcagatgctgggggagaggatgcctcttccttctcctcacccttcatcagtgtgtgagcagaggcaggagacctgtgggctggaaggcccacatcctccttcccaggctgtgaatgtggcacttacatggcaggaggactttgcagatgtgatcaggaccttgagaggagacattatcctggatgatctggatgagtccatcgcactcacagggtccttaaaagctggaagagggaggccaggcagggagagggaaggaaatgtgaggatggaagagggatccgattgccgcgattgctgaatttgaagaggaaggaaggagccgagagccaaggaatccaggcagcctctgggagctgcaagagacaaggaaatggattctgtcctgcagccttcggagcagatgcagacctgccgacaccttcctttcagctcagcgaaatccatttcagaattttgagtgcagagctgtaaggtcatgagtctgtgctgcttaagccactgtgtttgtagtcatttgttgcggtagtaaaggagactaatatgctattttgccaccattctgagcttttgaggcaggctgatggaaaaggtgggacagtggcttcccagtacttttctaagtgatcctgagaacctaatatcccaggcacttcatattctgtaactctccaccctgctgccagcagagtctgcttagtcctcaagacgaggggcttctgctgctctcagaggttgatgatttcattgattatctttaagttactctgcactctcccttccccagagaaaacccagtcaaattcaagtgagcattggggaaaatattcattcattaaactggttcttaacctttttgggggcaccgacctcttgagattctgttgaaaatgggattttagcccccataaaaatacatatcaaaaatttgcataaattttggccaggcacagtggctcatgcctgtaatctcagcactttggaaggccgagacgggcagatcacttgaggtcgggagttcaagaccagcctggcaacatggcgaaatgccgtccctactaaaactacaaaaaatagctgggtatggtggcgcatgcctgtaatcccagctgcttgagtggctgaggtggaagaatagcttgaacccaggaggtggaggttacagtgagctgagattgcaccattgtactccagcctgggcaacacagcgagactgtcaaaaaaaaaattgcatacaattttgagaacaattttgtatacagattcccccaggagctaccccttgaagctccaatggctgccaggggcttcctctgtcaccccaggtgaagagcccttgtacagattaattcacattaaggctgatgaatggctgttttcctagtaagtctcctcgctgtttgccaggtccttaaaccatgttcagtggatcctcattatttgtggattccatatttgtaaattcatctgctctctaaaatttgtttgtcaccccaagatcagaactcatagacaccagcagagtggcaaaaatgtgttacccgatgagccttttcccagctgaaaaggatgctctgccatcttgtttcagcctcttggtgtaaacgagtgtggttttcatgatttgtttagtgccatgttttccatgttttgtgctttttcttcgtggtttcactgtttgaaagtgctgtctagtgtttccaagtgcaagaaggcagtgatgtgccttatggggaaaatatgtgtgtttgataaactgtattcaggtttgtgttctagtgccactggttgagtgttaacgaatcaacactgtacagatgattcctgacttacgatggttccttccagtatgatttttcaacttaacaacggtgtgaaagtgatatgcattcagtagaaaccatctttcaaatacccatgggaccattctgtttttcactttctgttcaatagtctatacatttcataagatattcaacactctttcagaaagtaggctttgtatttcatgatttcgcccagctgtaggctaacatgtgttctggataggtggaaggcaagctgagacatacctctatggtgtttggtaggttaggtgtattgaatgcattgtcaacttaggatattttcaacctatcctgggtttatcaggacatgaccccattgtaagttgaggaccatctgtttattcagtaaggtgtcttttaaatagaaaaacacataaaacaaggttagtattgattgattgacaaaaatgttgcaacctgaggctttcaggaacctaactctgcatttcctttaggagtgctgcttgcttcagtatctgctggtaactctatggaacatagctactgtgaataatgggaattgggtgtattttcaagttgttggcctctccagctacgctggtaatcagtcctgctctttaaatcacatcttaccatcagtcctgcctagagaaatggaggaagggaggtctctggtcttacggtctgtcccgactctctgccccaccagctatgtcccgagaaccagcctggacagagccatctgattggtgggtggtagcaggtcatgttgtgaggccctggtgcctgccttctgtcctcctgtgctcgctagaggagcatgaggcaggagcagccagtccatgctggttcctgagcgaggcagctctagggctgccagcacccactcctggggggctgagggtaggaagagcttcagaggggaggatgggactgtctgactatatttccaatcccagttgggacttgtggtctgatgaggacaagtgcctttgagggggatggggatggttgagaggaaccaggaaatcaaatgtgtcctggaaaacatggcatggtggatcttttgagttggggtgttgggatgtgtgtcagctaaaacaaggttcacctgcttcaaatgttcatccaagctttctacacttgcctctctgagtcaacatctttagagacagcaggaagtgatgaaagtcagttcacagtccatctgctctgagggcttggtatgaggggctgatgttttctgtcattttctcctttctaacatttcactttgggatcttagttcctggttgaaattccttaactgtgggagtcgaggcagcctaagaatccttttcggctgcttaagacaatgaggtagagagggaaccagctgccccttttcttacctccatgatgatgtagaaatggttccatccagcccaagggttcttctggggcccaaagctccttaagggctctgtgcataggatttgaggattagttttcttgggtggggagaaaagtccatctttatttgtataaatcctacctgaaatgcagcatttcctctaattaggaaggcaggcaacaaaaccagtatgttagctatgtctgtgactctgtcaccaatgtgggttagccgtatctctgaccctgtcaccaattgcaattacagatgtctccacatcacattagtgttgtttcagatatcttgaagtagcatttgttcccattactagttttaaattaaggtggttaatagaccccactggattttgcgatttaatatgctgataaggcacatatattgctatactataacattttttaaaaattttgataactagatttcaataagattggtatttgtgatcatatttattttcttgatttttataacagctttattgagatataatttctgtaccatacaactcattaaagtgtacaactccatgtttctaaaatatattttcaggattgtacaaccatcaccaccaccatcaccataatctaattttagaatatttttgtcccccttaaaagaagcttcgtactcattagcaattatctacattccccctttccccactctcagcccctggcaaccacaacatctactttctgtctctagaaatgtgcctgttctggacgtttcatagaaatggaatcttgtttttgagacagagtctcactctgtcacccaggctggagtgcagtggcgtaatttcggctcactgcaacctccacctcctgggttcaagccatccccctgcctcagcctcccgagtagctgggattacaggcgtgtgccaccacgcccagctaatttttgtatttttagtagagatagggttccgccacgttgcccaggctggtctcgaacttctgacctcaggtgatccgcctgccttcgcctcccaaagtgctggggttacaggttacaaagtaagccactgtgcccggccaaaatggaatctttctgaggtcttttgtgactggcttttttcatgtagcataatgttttcaaggttcatctatctttgtattttgttctgtgcacttaaaacattattctgagaaggggtctaaaggcctgccccgtcgtcaccagaagggcctgtggcatcattggagaggttagggctctccctaaccattagggctccctgcgcctaatggttcttccctctgtcagttttgcattaaaactagtacatgccttggcttgagcatggacaatcactgccaaagacccggcaggcaaggcacgcagctttccttgggatgggttggacccaggccctgggcactcagaggtactcaggcacctctgcccagtctccccaagttaccacctccacaggtgccttggagtgagtgggcatctccaggatgtagcctctagtggatgatacccgtggacagggacagcaaggtagagtaatagggccaggccccaggtgcctgcccccagctggacgccagaaccccaggaccccagctcctccagcccccaggaagctgtcagcacttccagagagcaagctgttggtgggaaggtctgaatccttgcagctctgtgattcgcgaatcataaaacctccacacttggtgtttgtgggccgagctattgtctttgtgttttctttttggagtgggtgggaagccagcttggcaagccgggtgtgaatgaacaggaatgagcaggagacgctcgctgatgccttctgtgatgtgtttcttccccagctccagaagaaaaggaagtcattaaaggacagtatggcaagctcacggacgcgtacggctgcctgggggagctgaggctgaaatctggtgagtagccgctcgctggaggagcaggcgccaggctccccggtgggcaggagcctctgtgtcggaaggggcctcagtgcaggcattctgtttgaccgctcttctctctctcttcttttttttttttttttttttttctccgagatagagttttgctcttgttgcccaggctgcagtgcaatggcgcgatctcggctcaccacaacctctgcctcctgggttcaagcaattctcctgcctcagcctcctgaatagctgggactacaggcatgcgccaccatgcccaactaattttttgtatttttagtagagacggggtttttccatgttggtcaggctggtctgaaactccgacctcaggtggtccacctgcctcagcctcccaaagtgctgggattacagccatgagccgccgtgcctggccgacctctcttctcttttaagatgtttctttatgcctcgggacctgctcctcctgcaggaacctgcaggtggggaggtcaaggtgagtgttgcctggttgtcacctgcctgtgctggggagcagggtggggttcccggcacccccaccctgtgccagagaagctcgtcttcattgcttgccggcgagggcctaagtgtttcgaaagtctggtctggggcttctgcccagggcattgtccgcagtactctagaagatgtgccaaggcgggtgggtgaagacagggaccagggcagatgcccgggggcacaggggtgggctgggagttgtcagcaggagaaaaaagccaccgatgtgtgactgtcagtcagtgtggggtgggagggagaggaagggacagtgtgatctgacttgcgaagggagagaacttccaggaagacgtgggcatctctgctcactctgagagactcgggggtgagccggtggtggccggctgtcgtgggtggtcacagccaaactcagctgttcctggagctcaggagccctggggctttaggttctaccacctgtttccttccttctctctcaggggcccccttgccatctgtgacctggctgtggacatctcttgtgacttctggggccgagacaagagcccagtcgcattcctgattctcagtcccacctggctgagatgggaatggctgtatgggttgtctgaattcgggctttccctgagccaagcgcacacctcccttccctgctcacagcagctgttttcagagactgaggatgtttaaagctgccagaaaagcacggttacgttggccattccttttctgggtgttttctgtcatggaatgtttttccctgaactgtgacgattacagtgatcatttccaaatagcatttaggaaaaatacacagtacccacatgacaaagtgcatttatgaaatgtctgtttcgtgccaagagctagccgtacattcacttatttaatcctaaaaataggctaccgtgataatgcatctttgtccccgtttacagtaacgggaacaggctcagaagcttcaagtaacttgccttaggtcagaaacttagttggggtttgaagcgcctccaaacgcttgctttttctgtggaaatgtgcgggctgccgagggttttctgcaggactttccgctctgcagcgatcttcctgaagttgcaggaaatccctgtggcccttgccttccatggtgatgaccgtgaggatggtggcctgcacctgcatgggactcacttaggaacttgttaacacggctcccgaggccacctgtgctgttgtcaccctgccttgcaggtgtggcagggatgccgcgttccatccatgctgatgcccttttttccacatggtagtatctgggcccccaggatgcctcacagtcttggcttccttcagttatagttggcagctgcttttggtccttacatgaatgactcattttgcatccgacagggactgggattcgacgaattacagtaaccggctcaaggtcacgccattctcaagtggtgccctgggttttaaactcatgccttgcggcaccagggactgccttcaaccaccaggctgttctcctttctgaaagggacaggtggctgggctcacaagggggacaggaagtgcagtaccttcccccatcccaggggaaaagtgttttttcccagggctgtgatctaagatcagctgtgggaaattggtcctaaccaggaagggtggcagccccaaagatgtcttattagagcgagccagggtgtctgcgggggtcagcagggtctaatggggcagggagtgctcagagaggagaccacctcccagggctgccctaggcgaggcctcctccctgccttcagccagtccccgccaccccacaccccacagaagggaatgaggcttcttgtggaccatgcgagaccagccctgctccgaggctttgggtgcccccaacccctgcccacctgtgagagtcaccccccggagtgggttggagtttctctgagtgtggtgtgtatgagtttgactttggcgatgtcaggataatttggtctgttttcaacacattctggaaagcaccctgagcatctgaaggatggaaggattgggctttaaatcaagttttttcagtccccattggttatcttaaggggcgtttgactttaacttgattttctttttcccctgtaagtccctgacccagaactgtgatctattttcttttgtgttttcagctgttgagcatgttgggcagcacggagtgtagctacaactgtgtgaccccacctgtgtgactgactccacctgtgtgactccagtcgtgtgaccaactacaactgtgtaactgactccaattgtgtgactaactccacctgtgtgactctgcgtgactccaactgtgactccatctgtatgactccaattgtgtgacccccacctgtgtgactctgactgtgtgacccccacctgcgtgactctgactgtgtgacccccacctgcgtgactctgactgtgtgacccccacctgcgtgactccgactgtgtgacccccacctgtgtgactccaactgtggactgactctaactatgtgactgactccaactgtgtgactaactccacctgtatgactccaactatatgattgacttcaaccgtgtgaccccacctgtgtgactccaattgtatgactgactctaactgtgtgactccaactgtgactccatctgtatgactgacctcaactgtgtgaccccacctgtgtgactccaactgtgtactgactctgtgtgactgactccacctgtatgactccaactatatgactgacttcaaccgtgtgaccccacctgtgtgactccagttgtgtgactgatttcactgcgtggctaactccactgttgcctgactccagctgcgtgacttcagctgtgtgactccatgtatgtgaccctagctgtgtgactccaactttcagttgccacgaagacaaccagctgagtcaggagtgggcctccctttcaatgtttttagctaagcatctctgcgcaaagaaagaggcttccccacaggctcttaatttgggacaagttttcccttagtttgggaaaaatttcaatctacctaaattagccttttacattagaaatcgagaaatatgcacaaaaattcataaaagcctttttccaggttccaaggtttttgtagaaagcccaaagttcccctttccttcctgaaatgccagcaggaaggggttggagctcccgtgattagccagggagtcaggcttcctgaagtttacacaatacaaagcatattaagtgagaatgtagcagaaaaaagaacttatcccaatgattatagcaatttaaattctcttgaacccaagctctcaaggcctacctgttttatagcctcaagggactctactcctatcccagactataatgaattgtgtctcctggagttgtgcagtacgcaacctgtgaagctgtacacgacagccctataaattctctagcagacagccctcctagattctagttcccacttcacagctgaactgcatttaatctctgtaggactgttttcctgtctgtaaacctgggaaaactgcctcatctctatgttgcctagttctcaggaggtccacatgggccatgcacatggtagccatgaagagtgtggagtgctcctccaacaccaggcgggctggccacaggcagtttcttagagtgtggcctggggacgctgccaccactgagaagctctgctgtctctcctctgtccctgggagggctggagggaggagggtgctgagtgagagggacctggcctgcagagggctgaggacgaggtgtgagctggaaggccaggctgtgtggcctcggggtgtggactcctggtggggggctcctctgcacaggctagcagagggctggtttcatgggcagtcacttcagaaggaggattccctggaggggagtttgaacccttagtcttttgggatgcagtgttctctagcaagtcttgaagcgaactggcctttgtcggtcttagattaatttaattcctgtgcccagtggtgggatattaccaagagagttgacacccagctccctgagggggaagctctgagatgatgcagcatttgccagtttccaaggtgtaaattcacgggccagggctgatttcaggttcccagcgtggagctgaggaaggatctgcaccaggggtgctcactgcgggtgttcactgctgtggccgccgctgcctacacctccctcatgttctgcagaagggaggcgggagaaggccctgagaccatgccgcatgggcacacagtgcttagggttctgaacctgcgggtggcgggggaggctcaagggtcatctggccgaagcttcccccttcacaggtgggaaagcctagacatctttagtcctttgtttggagctttaagtctgagggtgtctgtgtgagcagagggacagataggatggctggagggaccccagggttgggattggcacagaccaggctgggaaggtgaactcagagctgagacaacacaaggaaatgccagcccagagccttgtgggaggcctggggtggtcccggtaaacggggccttgggtctgcaagccacgtatcatgactccaacagccagctttcctggcctgataacaaattgcctaggacctgccactggctcttgcctccctccacctcactctggcagctccctctgacccatgcatggctttgctttggccagagccctggaaccaaagccctttacctggaggggacattgagactattggcgcatcctcctgggaggcccagagagggtaagagccttgcctgaggccacacaggccactggaggtgtgcagagcctggagccccactcttctgagttttgtttttccacttgctatgagatccttgatggtttcagggccctggtctctccctcagctgaggactgccaagaaccccgcaagcctagttagcttcttggctgtcagagaattgatcctgcctcacaaaagcaaatcctgtgctctaggtgagcatcgggaggggcctcacacacctggggcaggtggggaccagtggcttgtaccacactgacggtggcccgggagtcagcgaccccccacagcctggtgctaggctcaagccaggacactttccttaaaacccatagtacaggccaggcatggtggctcatacctgtaatcctagcacctcagggggccgaggcaggaggatcacttgagcctagaagttcaagaccagcctgggctatgtagcaagactatgtctctacatagtgatggtatctacagcaccatgccaggagcggtggtgcacgcctgtagtcccagctacttgggaggctgacatgggaggatcgctggaacccagaaaggggaagttgcagtgtactgagatcaagtcactgcactccagcctgggtgacagtgcaagaacctgtctctaaatttaaaaaaaaaaaaaaaagcaaacaaacaaaaaacccatggtatacagagaacacagtcaggcagtcaggctgtcaatgagattaggcaggacacagtgaggctgggattgaaggaggaggaagccatcagtgctgggtcaggtaggcagggcggggccttcccggagaggcagcgctccacacagcggtcctgaggtttgggtaaggctcttccacagaggcctctgtggttacacccgtcccaccaactgtctgggacacacaggcaggggcagttctaaggaaaagtgtccaggtccttggcttttttctatcatggagcacctgtgatggaggacagggttcttattcccctctgaggtctccctgcttccatgttagggtagagggtaggcccttctctcttctggaagctcaccgtgtgccgtgctccaggaagtaactccccctaggattccagacaaagggacagttcaaaagcttgtcaacagcattgcaataaggtcaggactaggtagcaatctgtttgcaagtcaggtgatgtccaattgtttgcttcccccataacggaaggagaatttaattggggtatcagctgacacattagtaaccattttatcagcaggttattgtcatttcttagcgctaactcagaaggactttgaagaatcgagtgacatttctacaatgaagccctttccattcccatctatttattaatgtgaacaggatcttttagtgtttgcgtctacaaaaatgaaaactagaattagaattggtgcagaacctactttcattccttcaataaatatttattcatctcattaagagatgcctttccaacacattatgactttttgtatcaaatgattatttgtcggccaggcacggtggctcatgcctgtaatcccagcactttgggaggccaaggtgggcggaccactagaggtcaggagttctagaccagcccagtcaacatggtgaaaccccatctctactaaaaatacaaaaattagctgggcatgggggctcatgcctgtaatcccggctactcaagaggctgaggcagtaaacctgaaaggcgaaagttgaacccgggagacagaggttgcagtgagcccagattgcgccactgcactctagcctgggcgacagagcaagactgtcacctcccagagaccccacctcctaaaaccatcgccttgggtgttcatacttcagcatattaatttgggggtgcacacattcagccaatagcaggtacactggttgaccacactcttaaagaggacagccaaaaaaaattatttggcagtgttttatttacattgtattgtttacattgtttgaccagttaggtatcactggaacgataaaccagaacgctctctttttaaacacttggagttgaggaacacacggctgcaggggctgatggggtgatcagaacaggacgtagaagcaccagatatgctacattaggatggaattctgaagaggggggactggaaatatgagtgaaagttccatgtggtaagaaagagcatgctcctgcaatcctgtaaataatagatggcaatgagtatcacgttactgtgtagattccatgggatactgacaagaggctcccagagttttagttttacgtgtcaatatttagaatacactgcacaatatattatttacaggcatttcaactaccgatgaaaaccttcaatggcagttttaaaatgggcagggaacgctgtctgagtccagtgtgttgctgtgacaaagttccgtagtagacggggtggcttatcagcaacagacatttatttcgcgcagttctggaggctggaagtccgagaccagcggcccgcagattggccggctgtgaggacctgcttcttgctccatagatgctgccttttctctgcatctgacatggtgggagaggtgcaggagatctctgggcacaaaccccattcatgagggctccactgccataacccagtcacctcccaaatacccccaccacctcaaaccatcaccttgggtgttcgtacttcagcatattaacttgggggtgcacacattcagtcaatagcaggtacactggttgaccacactcttttaaagggtacagcaggccaggtgcagtggttcacacctgtaatcccagcactttgggaggctgaggcaggtgaatcacctgaggtcaggagttcgagaccagcctggccaacatggtaacaccccatctctaccaaaaatacaaaaaattagccggtataatcccagcaactcgggaggctgaggcaagagaattacttgaacccaggaggcggaggtagcagtgagctgagattgcaccactccactccagcctgggcaacaagagtgaaactccatctcaaaaaaaaatagccgggcgtggtggctcacgcctgtaatcccagcactttgggaggccgaagcaggcagatcacctgaggtcgggagtttgagaccagcctgacctacatggagaaatcccatctctactaaaaatataaaattagctgggcgtggtgacgcatgcttgtaatctcagttactccagagggtgaggcaggagaatcactagaacctgggaggcagaggttgcggtgagccgagatcacaccattgcactccagcttgggcaacaagagtaaaactctgtctcaaaaaataaataaataaataatacatgcatacatacatacatacgtacatacatacatacatacagggtacagcaaactaatccgattggaaactgccggactttggggctagatggagcatgggcttaaagtgaaacctacattttggctccaacacagactagctgtgtgcttgggcgggtgattcagcttccctgggggacagtcatgcgtgtgtgaaatggcagtggtagccctgagacagcagcatgggtaagcaggctggcgacgtcatctgcaaggaggtgtaattaggagcaccagctctggggccagacttggcttgagaaacttgcccaggcactgtagctagaaagtggatttggatcccagctccccgctctgtcaccttgggcaggctgcttaacctctctgtgcgtctgtttccctccctgtgagatggggctggtaagggcgccccttgcggtgggcgggaggatggagtccgcgcctgtacagctcccctgcctccactgcgctcaccagataccggctctcctcactcccctgtaccactcccgaccccctcctccctggacccaggagccccagtgctctgtggcaatgttaagagcctctcctggctgctacagtgctcctctccccagcctcccccaggccgtggtcctgcccaggaaatgcacctgggactgttgccaggcactcaggccccccacacggaggctgttgaggaagtggtgctagaaatcagctcatgactctcacggagtgatgtcatgcaaaattttccatagctctggcagccacaggggccatcctcctgcctctccgagggcacttctgctgaactgtgcttttccctgcactgtgtcagaagaggcaggtgggtgccgggagcgctctgtggccaaggctctgatcacaagctgccaaccccggaaccccacctatcctacttgagaagctgaactctgacccctgtccctgtccccagtgtgataacttcctttgttcttaggtggttttgaggtggtttcctgaggatgtgtctggggagatgtgatgggatcaaccccctgccctgctggcagccccaccccatggcatagcagcaggcccctgggagccctgagcgctcattaaaggaacgcactttaatgacagccacacgccaccctgccacaagcagcgctcttctccctatgaagtgtggtgaggaaattggggtgagagggtggtggaactggttgttttgggggtctcttcctggagtgtggagagatcagaaccatctccagaccatggctgtagacagcggcccttgatcattcacagaagatctcgctgggcggatccttcagacctcagcggggtgggaagagtgtccttgggactagagccctgccagaccccaaaggccggtttctacccgatgatctcttgggccccgtcccgagagtgaggcacggcgccaccaggcacccccgatacgcagcgtgttgtgaagtgcccttgtgagcagcgggggatagggaacagaaaaccagctgtcagcgacagcgaggtggtgccccagagagggctgcctcattcgcctggctgcagggtccgaggtcgtcttggtagcatttggcaggaatttatttaggaagcattcagcaaaccgagtgtgtgtggtgctgggagatgacgacgaaatggccctgcccccaaggaagcccctcccctgggggcacaggtggggagggaggtcatgagctttgtgtgtgtgacaactgctgatgggaatgctattggcacgtacgaggggtgcctgtccgtgtcttgggagagcaaggaaggcttcccggaggagttgctgccaagttggcccagaaggatgaggaggagttcttctggtgaagtggggagggcagaggcaggatggtccctacggagcatgtggggacgctcgtgttcttccagaggatggaatgctgggcccgaagcctgaagtattgttagggtagagacaggcgggaggtgcgtggagaaggggtcatggaggtcttgttgggcagatggcggtgggacgtcccaggcagggggagcatcttgggcaagagcccagggtgcgaggtcatgcttatggcacattggaccagctggaggacagccagctcaggagagcagccggctggggtgtctgcccacgtgtggggcagggatgggctgcagcggggagggatttgggagcttctgtcgtagtcctgcagggagtgggagctgtgcaagaaggaagggcggagcggctgtgatccaatgactttgggaaggccactcctgtgatggagtgggggaagacagaccccaggccaggggtcctgagtcaaggcagtggctgaggaggcactggggaaggtgatttggagaggctttgggggtaggtcctgggggtctggaagggctctaggccaggaattttcagactcctgggggcatcagaatcacctggagggcttgttaaagcaaagcttgcccccagcctcaggcagctgggcggcaggaatctgcatgtctaacaggctcccaggggatgctgacttgctggccagggtcccacactttgagaagccccgcctgaagcttacaggacagggcaggttcttgagccattgagttgggcaatgccatgggaagttgcaggtgcacagacgttgccttcctggctgcggttgaacctgggctccatttgtccccttggagctccaggcggccgggccgacttcgaccctgagctctcctgtctgatttcctttccaggtggcacgtctctgagcttcctggtgttggtgacaggctgcacatctgtgggcagaattccagatgctgaaatctacaaaatcactgccactgacttttaccctcttcaggaagaggccaaggaggaggaacgcctcatagctttgaagaaaatcctcagctcgggggtgttctatttctcatggccaaacgatgggtctcgctttgacctgactgtccgcacgcagaagcagggggatgacagctctgaatgggggaactccttcttctggtgaggccctgggtcccctgcagagggtgggccctgggtctcctgcagagggtgggccctggttggcatctgaggccttgacctccacttgcaccacccccgggttatggggcacctctggagagttaggacccaggcctgctctcagcacaatgagaggaaaactaaccctgaactccctgccaccccccacccctggcccctggaatgtgttcagtgtagatttggaaaagaaacctgcgccaggcatggtgcctcatgcctgtaatcccagcactttgggaggctgaggcaggtggatcacttgagttaaggagtttgagacaagcctggccaacatggtgaaagcccatctctactaaaaatacaaaaaaaaaaaaaaaaaaaaattagctgggcgtggtggcaggtgcctgtaatcccagctactcgggaggctgaggcaggagaatcgcttaaacccaggaaacggaggttgctgtgagccaagatggtgctactacactccaccctgggtgacagagcaagactctgtctcaaagaaaaagaaagaaagaaaagaaaccctgttccataagtaaaaaacataagagccgacgtctgctgagtgcttcctcagtcccgggtgccgagctcagtgcttctgcctggattcactctttcagtcttctcaatcatggttacctccagtgtgcagccgtttaccgctgatgtttataaagcactgtgttcgggtcaccgtgctaagatctctctgctggtaataactcatcattattataaaaacctttataataattatgcggaggctctgttaccccattttacaggtagagagactgaggcacgaatagtcgagggaattttgccaaactccacacacttactaagtggcagagccaggatttgaacccaggctttctgggtccaggtcccaagctggtaatcacagtgctaaaccagtcccatcaatggggaagctgagtcaccctgcccaaagggacttgtagcaatgcactaagactagtcccggagcccaggcagaggcggctggatttctgtatgtttaagatctcctggtgctttttcactccacagcaggacagagacaagagtggacaaccctgtaaatacataaattatctattgccctttctggacataatgctgtttctgtcagattcgcactgatgcctagagatgccaggtagaagcaaaagtgaggaaagtcctgccatgggagtcgttccaatgaacctcatctaatgtaatgttttagaatccagtgtctgccttttgaagctatatcagttttcccagctctgagacgggactcgtgaggtttatttctgacctgtttgtgcctctctccctttgccagaggcagccacaggttttcatctggccttggtgctttggattccccagaagtgaattcctgatttctgccggaagaaggggaccctccccacatccctgtgtccatcccaacgctccccacccccacatcctctttggttctctggtattgtggatatttgggggcagtaatgtgcccagacttcaaaatgcacgtgaatcaaggctgggcatggtagctcacgcctgcaatcccagcactttgggaggccaaggcaggcggatcacctgaggtcagcagtttgagaccagcctggccaacatggtgaaaccctgtctctactaaagatacaaagaaaattagccaggtgtggtggcgcacacctgtaatcccagctacatgggaggctgaggcagaagaatcgtttgaacccaggaggctgagattgcagtgagccgagatcgcaccattgcactccagcctgggctacagggtgagactctgtctcaaaataaataaataaaataaaataaataaaatcgtgaatctcatgctgatctcattaaaaatgcagattctgggatggcaggtctgggctgggcccaggattctgcatttctaataagctgccagtgctgcttgtctgcagacggcaggttgagtagcagcctctggggatggcatttctgtgaatcgctggttacattttgcagggcccagcatgtgccccgcgagctgttacatgttcccctaaaggcagccaagcttaagcacagaggggctgtgtattatgaggtatctttgtgtggagtccgtgaaactattttaaaccagaactgtcaggggagcagaggtgagagctctcagcggcagtgagggtccttggaacccctaggggatccttggggtatctgaattgcaccagcacctttgcaagttctcttccctatgccagctctgtggctggaggtgtgaggggcactaacaaagcgaggcaaaggggattcacgaggtggaggctgagaggagctttggaaggaggagccccatggtgtccctttctgaagggagaggaggaagtaactctggaggtcgccaggctcctcagctgtaacacgccagggcgtggtgtttaggctcagggtggagcccccagaactgaccacaactgagtcaccacgggcagtgtggttctgggcttgatcgcctgaacccccactgttgtggcgcagcgtgaggtctggagacccacagcaggagtcagatggggtcaacgctcagcgtggctggcacataaggcagagtgagcagcagggtgaagtcatctttctgggctggtaattgatcacactgacaattgcctcccagtacaatcaggtcctgggaggaaactctttgggggtcctggatatgagtcatcctcctgccagagggccaggcagtgtcactagaaacagggctgatttaagggttgtccacttggcaaaaggtttcttctcctgagccctggtgatagtggccatagctgtgtagctggcagactctgaaatattctggaggctttgccttgatgccacatgcagatttcatatatgtgtttcggaagctggcttatcatctgaatttgagagagtgatttggaagagggacatgtgtttttgtacagcaatgcttcagcagcatttttcaagcagaggagcgctgtggctgtgcgacctcagatggggtcagacgcgggctgtgctccctgtgggggtgcatgtgactgtgcgacctcagacggggtcagacgcgggctgtgctccctgtgggggtgcatgtggctttggtcacagtcggggaggctggcctgagagcaggaagcttggagaagccccctgggacccatcagagctcacagcacagatttccagcaatgagaaaatgctgctgctgtctttgaggaaggctcaagggcaggaattgtgttgccttttttaaacaagtagggcactgtgatctagattcactcagtgccctgtaagagggcatctcctgatgatgggtcctcctccctgagagtgagtatgggccctcaggatggtaccactcaggtcccctgggtgctaaagcaagggggccaggccagctcagggatgagagaactacgtggtcgttcgcaggtgcacatggaaacgtagggcctcatgaagaaaggctcggcgtgaagagcgcgggctccaagctccatgacgccactggctggctctgtggcattagacaagcacttcacttctctgtgcctcagctgctttatctgtgaaagggggtcactgatgatacctttcacatagggtcacttcaagggtgaaatgagttaatccaccccaaagtacttagaatggggcttagtgcacaggataaatgttggctgtcaccctgtcgttatcatcatggactctagagcctacagcaatccactaggcatggagagggaatacttgaactttcattacattttattttcctcggatctttttaaaatttattttggattgctttgtagcgctctcgtcataatcatctcatggtgcatgtgtgtgtatatgtggataatttaaataactgttcccatatttaatatgatttttaatcacttattgatcatgattgtttaataataaaagatgattaattttttaccaatggggcctgcgatgaaaactgtggggcccacagggctaaccagaggcccctttgcgattccccgaaaagtgcacgctggctcactctccagctttgcttccatttagcgacagtgacgacctggtagtggctttgggaaaggactccctggccatcctcctctacgtgacacagtggtcctgctatttgggatctctttgaagcacatgaacttcccagatctgtacagcccaagtgcagagtccactggggagcagcatgcattcgctgacccgaaatgctgcaccgtgcgccccccagttcctcagccacactcgctgtccaggcagcatgtattggaggatgtcaagtgactggaattggtgtgggactgtgttttgcaggaaccagctgttgcacgtgcccttgaggcagcaccaggtgagctgctgtgactggctgctgaagatcatctgcggggtggtcaccatccgcaccgtgtatgcctcccacaagcaggccaaggcctgcctcgtctctcgcgttagctgtgagcgcacaggcactcgcttccacacccgtggcgtgaacgacgacggccatgtgtccaacttcgtggagacagagcaggtgagtgcccaggcccatctgtggcaccaaatggttccgagtggctgcagctcttgcacacgcgctttccacttggggcagaagaggccctggcatatttgtggtggtctctgatcaggcttcctcctataagtggagaacagcacgtgtaattgggctccacatgaaaatgtgacctctggtttgcatggtgtatcctttctgattcacatctcatgcagggaaaatgctgcttagccgaggtatttttaactaaacggaatcaggaatttttgccttggtcgtgaaaggtgggcagtattccaagggcagctgacagatgaacaaatagggtttgaaaatccttttaggacaaaaataagtagatcaatacaatggggggatgaaagaagaaaccattattttttattctaaatcaactgaagcttctcctggaagccagtattagcaccctagagttgtgaaatctgcgtgttaagcagccgctcccatccgttcccctagaatatagccatctgcttaatttctcctggagttttttctaaattctgttctcatttccagagatgctgtcttacaacttttaaatttttgctctaacttgcaatctgtaagataaggccaccatgtggaatacagtggtgtaagccataagaaaggaaaaccccggaaggcacatgtatggtactcctgccagggcaagctgggtgccctgtgtttactgagtgaaggcgtggctgtgcgtcccccctcgctgccgctgctgggagaggaatgccttatgcggactttggccactttaatccagcagaggtttgagcacctacctttactgtgtgggactttctgcctgctccagtgttcagagggtagatacagagatgaggaggctgctctcagagtccccactcagaggaacatcagagcagggggccctaagatgggcaacagctgcaattacttgcctgtaattctgctcagaatgtctgcactgtggatatcaacgaggctattatgtaaatatctggttaaaaatgagattgcttttggcatcttcgtcatgaagtctttgactgttcctatgtctagaatggtattgcctaggttgtcttccagggtttttatagttttgcgttttacattcaagtctttaacccatcttgagttgatttttgtatatggtgtaaggaaggggtccagtttcagtcttctgcatatggctagccagttatcccagcaccgtttattgaatagagaatccttttcccattgcttgtttttgtcaggttggtcaaagatcacatggttgtaggtgtacggccttatttctgggttgtctattctgtttcattggtctacgtatctgtttttgtaccagtgccatgctgctttggttactatagccctgtagtatagtttgaattcaggtagtgtgatgcctccagctttgttctttttgcttaggattgccttggctattcgggctcttttttggttccatatgaattttaaaatagttttttctagttctatgaagaatgtcaatggtagtttaataggaatagctttgaatccataaattgctttgggcattatgtccattttaatgatattgattcttcttatccatgaggatggaatgtttttccatttgtgtcatctccaatttctttgagcagtgttttgtaattctcattgtagagatctttcacctccctcataaactgtattgctaggtattttattcttctcacagcagttgtgaatgggattgtgttcctgatttggctctctgcttgactgttgttggtgtattgattttgtattctgagactttgccgaagctgtttatcaggttaaggagattttgggctgagactgtggtgttttctagatatagaatcatgttgattgcaaacagggatagtttgattcctctcttcctattgggatgccctttatttctttctcttgcctgattgccctggtcaaaacttctaatactattaatatgttaaataggagtgatgagagagggcatccttgtcctgtgctggttttcagcttttgcccattcagtatggtgttggctgtgggtttgtcataaatggctcttattagtttgaggattgtggatctaaccaaactaaagagcttctgcacagctgaagaaactatcaacagagtgaacagacaacctacagaatgggagaaaatttttgcaaactatgcatctgacaaaggtctaacacccagcatctataaggaacttaaacaaatttccaagaaaaaaaaaaaaaacattaaaaactgggcaaaggacataaacagacacttttcaaaagaaggcatacatgcggccagcaatcatggaaaaaagcttaacatcactgatcattagagaaatgagaatcaaagccacaatgagctaccccctcacacaagtcaaatggctattatttgacttgcgtgaatattatttgacttgtgtgaaatgagatacctcctcacacaataatggctattgttaaaaagtcgaaaaataacagatgctggcaagattgcagagaaaaaggaacgctcatacgctgttggtgggagtgtaaattagttccaccattgtggagaacaatgtggtgattcctcagagacctactcacaatagcaaagacatggaatcaacctgaatgtccatcagtggtagactggataaagaaaatgtggtttgtatacagcatggaatagtatgcagtcatgaaaaggaatgagatcgtgtcctttccagcaacacggatgcagctggaggccattaccctaagcagactaaggcaggagcagaaaaccaaacactgcatgttcttacttacaagtgggagctaaatgatgagaacacatggatacaaagaggggaacaacacacactggggcctatcagagggtggaggatggagggtaggaggagggagaggatcaggaaaaataactagtgggtgctgctaggcttaatactgggtgacaaaataacctgtacaacaaacccacataacatgcgtttacctatgtaacaaacctgcacaagtacccctgaacttaaaataaaagttaaattttgaaaaattttaaaaaggggacagagagagaagctgtggccccagctgggtggttttctcttttctggctgatgtctgcatggggagagtcccttccctgccccacttcattaccacttgccttttattttgaacttttatttaaaatactggttttggatttcaaccagaattttaagacttggggtctcatctattgcatctcatcgagtaagtccctgggaaccactgtcctttagcggcactgtccttcctaaaacaccggacattctaacacggaaaatgaaagcaaaccgcatgcatttcctaggactgcccataataaagtaccccaaactgggtggccgaaaacaacacacttattctctcccagttctggagactggaagtctgcaatccaggtgtcggcaggactgctgtctcttcgaagtccccctggggagaacccttctgagcccacctgaccgccccggctcttggtggcctctggcaagcatctctccatcatctctgcctccgttttcgtgtggccttctctgcctgtgtctctccaggactccagtcgtactggatcagggacccaccctactccagttgtcctcatctttttttttttttttttttttttggagacggagtctcgctctgtcacccaggctggagttcagtggcacaatctcggctcactgcaagctctgcctcccgggttcacaccattctcctgcctcagcctcctgagtagctgggactacaggcgcccgccaccacgcccggctaattttttgtatttttagtagagacagggtttcaccgtgttagccaggatggtctcgatctcctgacctcgtgatctgcccgcctcggcctcccaaagtgctgagattacaggtgtgagccactgagcccggcccagttgtcctcatcttaacccattacttctgcaaagaccctatttccaaacaagttctaaagtactgggagttggtacttcaccatatggtttttggaagggacacagctcaccctgggccgcggatgctggctcctgttagaggactgtgctttacaggcagcgcctgtggccctgtgagaactctcgctgcaatctttgctttctcacttttacagaccaacaagccctaccacagaccaggctgggccttggctctggccacttcgtgtcgcgtgcctgctgactggcgcttgtctcctgtgttgccagcctgcttgttagagctcagaggcagggaccttgcccccacatctcctgaatctcccacctcgggcagcctggcaaggccatagagatatgaacagcctgcccttccagctcctggggtacagcccgatgctgttgacattgcctccacctcccttccttgtctgggctggggagggatttcttggctcccataagcctttgtgggcttcctagtgtgtgtgttttgtcctttttcgtcctctgggctctgggctagacagggctgctctccatgaagtccccacccaaccttactcccaggagcagcagtgattgacagacagctgggcaccaccacctgccgctcacccacagatgcagccgctgcggatgctgcccccgccccacctagagagcataacttaacccatggtgacttcgttaacaagagatgcgtagcggggccccaggaaggtggccctacacccacggtagctcttggttgggtgcctatgtttcaggctgtgctgatgagcctggaggtgcctgggctggcccatccatcggagaccccggacagcctggctacccaggaaggggagctgtcacttcccagcgctgagtccagggctgtccacgtgggccttcagcaaagcctgactgagcctgccaggtcccaggctctgctcccaggtgggtgggcatggggggcagtggtggtgtgatgggggcgcagcaggagtggggcaggtgaagctggtcctgccaggtgctgccgcccttccaggtggtacttccgataggtggtgttcggctggtgacccctgcctggaggtcgaggggaagcacagcagagccagggcagggagaagcgtgtgctgcgcgcagcccaggaaggaggggcatggagcagaaagaaacacaggtgaactggaagagcagagagggttcatgcttcctgcacacatgggaccagggcatgggcctggtggggggtcagcattcctccaagccaaaaaacacaggtgtgacagccctttttctaaaacattacagaggcagcaggagcagagatggctgcagggaagtgactgttccccaaaagcaagaaactcctgttgcctcacttgtataagccaagggaacccctcgctttctgtctctggagtcactgaatatttttgtttatgtcactttatagcagtactgatgcttaggttgatctaagttcgtttttaaaacacaaaacacgtctttaagtggaatgcacagttagtatgctcctgcgaagcggcagccccgctgccctccctggctctgcggccacctgctgaggatggttcttctaggatgagtcaggagagtggagcaaggctcagcctgcaggtccttgctgagctcagggaagcagccccgtgaggatcgggctgcgtggtctgcaggggaacctgcctgggaccctgtgagatttacctgtttcaggtgccagtgatctgctgggattctggagaggtccctcaggggagcctggcacttcctacccccttgagtttgcaaagtcacaactgagggcctgggttgggacggtgtcatgagctctccataagctttgcttatggtacaggagcagactgtctggcgcttctggagacctttaacgtgctcctgtagacagtcgggtaaactcattctggtagcacagcgtggcctccccctccacctgacatctgaggaagtggcaggctctgcatctcggtggcctcgccccagggtgcagggagcaactttgaggaaattagtgctgagcctccagtaggaaggaggactgtgctggggaggcaggtgagccccttgtggtgccgcccgcaggtcacactggcctggggcccctgcagaggaaacaggatccaccagccaggcccgctgaccatttggaagtggagcgtgcacacaggcggctgtgcggtcatcgtctggcaaacaaatgatgggaccggaccaggagcagactggctccctgtggtggggactcttggcaggcggatcggcttcttaggaattaattctcaggaagccagaaaagggggaccctgtggcaccctctgcttttgctttggtttaacatgtttcctaggaggaataattaatcttctttctctgaggcaggctgtgtgtgtgtgtgcatgggttgtatgtgtacagtgtgtgcgtggtatgtgcatttatgtgttgtacatgtgtgtatgtgtcatgtgcattgtgcatttgtgtatacatgtgtgtggtgtgtgccttgtgtttgtttttcatgtgtatgtgtgcagtgtgtgcatttatgtgttgtatacacacatgtgtgggttgtgtatgtgttgtgtgtctgcacgcacagatgttgtgtacatgtgtagatagcatctcagcctccttgggaggaagccttgagtctttttggctctgctgagtcatagctggtgggcttgctctgcagtgctgactcaccacacagaaaaacaagaccaaaaagtcccctcagtctattaaaaaaaaaaaaggatgtaagataaatatttggctattcaagataaggccactgactcattcagggaggttaggatgactgcgtgtcctcccaggaatgcagacttggagataattggtttgcagacactgtatctggaagcagaaggtcagcagaaagcctttcagatagaaggtatatgtacccctgtgagttttcctgcctcgtcgctctctttttatggccattaggtttctgttcccactgctctggaagcgtcactcagggtcaccctctggctgctcagtctggggtctaggcactggcctggcctcatcacagcactggcacgggcctccgacttttcttcccgtggccccactgctcttcccggtctccctcccacctcttgtctgttccttcttgaatccctccttcttcccacgacccaagctctctccgacgccagcaggtgcccgcatgcatagtcatagcgtcagggcctctggggaagagaaaacagcttcgttttttgagtggctactctgtgctgggactatgcccccctcatttacccctcacagctcatcccttctccgtgcacaaggtgacatgaacttcatgtagagagagggaaactgaggctgaagatggctaagtaatgtgcccagggccaccctgctgggcaaatgggggtttgcaaagtggcagtcggacccagcttgtgctaataccagagcccactttctctcctgcttccactctctgtcctgcctccccaccccaagagccctctgtcaaaatgacatctgtgaggtgagacatcacttcttccactggtattaaaagttgttcgcccagaatggaaatgtatcacttgcatttgatggtcaagttatgcctactgccttgggaacaaagaagacagtcttgatgataggacggggtgcagatgtcacctacttcccctgtggaggacggggtggagaactttggagctcctttcttcttgctccagtgtgggcagggaggggcatacagagcactgacagccctcagtgttttcagaagctggttctgggcaagtctcagcttgggaggagcctgatgtgatgctggaagtggcattgttagcacttggggcagtcagagtgaagggagacattcctcagcctaaatagatcgtgggcattggtttttgttgttgtttggtgttttttggatttcactctgttgccccagctggagtgtcgtggtgcaatcatagctcactgcagcctcatcctcctgggctcaggtgatcttcttgcctcagcctcccgaatagctgggactacaggcatacgccaccatacccggctaactttttaaaaattgttttggtagagatgggggtctcactttattacccaggctggtctcgaacttttgggctcaagcccgcctcccaccttggcctcccaaagtggtgggaccgtaggcgtgagtcactgcgcccagcctggatattgttaaacattgtctttatatacaaatgttggtttcttttccaggaacctgggcctatgcagggcacacacgccggtcagttgtatgtacctaatttcacggtagccaactatgtctgtagccgttcaagcaacctgctattttattctgttttgtcagtagaagaatggagttcaacagctttgctggtactcaatacctggaaacagacagcatgttcttaacacatgcttttttcctttggagattaagggatagtattccagtttgacaatgtagataccaggctcctgtaattcctgtggcccagggaaacagtggctctaattttcaggtcctccactgcagaatgactcattcctgtgtgatctgagcgtgatctcgcctgcatgggaagctgccctgtaagggagcaggccggtgaggaacggaaaggaccacagcagcgcccaggccgccctgccaggccaggctagagttgcgcagataaaggccccgcatctgataagtgtcgccgcctgcccctgctggcgctcaggatcgtacttcttgtccttttaaaactcccttgcactccagcgtcattggaggcctgcaggcacactctgaaatagctgtacgtgtgggtggggaggagatagatgtcttaaagtgtacggatcatttgtttctctgcaggtgctgtcacactggaagcttgtggaaaccgtgttgtgtgtgttaactgagtggtgtgtttaagaacacagtggggcagggccaggaccaagtacaagatcaggttgagtcttgcattgtcaagtacgagactggctagcacagtcagtgaggtcttttggctatcactggtgcattttatttcattcagtccttttctcatagctctcttctgcttagctatttgccaaggcaaaaatagagggctctaaggaaggttacattccagagcacactgacttctattcatacagggggtggcggaaggctgttcctgggattttcagggtgacgataaggttgtgccctagaagtgtgaattcccggagaccctgggaggccccaacccccagcagaccccctcctcagaggctggtcgacagccagcatgcccgcccagtacctggcgagaggtcagggcgcattgccggatgggggagcagaggacgccggagtccaccgtccgcccttcattctggctggtgtcgggtcacaggtggccggatcccgttacccagcccaggacgttcggtttcattgaagaatacctttccctttctgtttccttgtgccgcagatgatttacatggacgatggagtgtcatcttttgtccagatcagaggctccgttccgctgttctgggaacagccagggcttcaggtaggtcatgaaaaaacttaaatgtccccttgtgatgttgtccgccctgcccttcccttcaatagctggggaagatttcttttaacacgttcgtttcatggcatagtttccagtctttttcctcagccctgttgtgttgagctgagctatcaaagtgtgcacacgtgtgtgcatatgcatgcgtgcgtgtgtgtagaaaacacagacaccactttgttgtttctggtcgtcaaggatgctgtgtgaaaccgctgactcgggaacggtgctgcggtgcctgctgagtgggtgccgcgaagtgagcttgggtagcactgcctgaggttagaccctgagttcggtgtactgaggacgtttctgagagccgtgactctcatggagggcttcaggaaggctctgtggctgcgtaggtctggcacccggtgctgcctgttgtggggccacgtgagacttccacagctttcccgtgatttctaaaaataccccttgccgtccaaagcagggctctggtcagtgccagagagatttggcattctttctcctgggaagagcacagggtggggacacattccaagaacacatttgtcatcaatggaatgacacgctgcctccttcaccagggtctctaacaaggtgggttatgggccgagtggactggaggggcctccccactaatccccagtcttcctccctgtcccgaggggacgtgggtgccttcagaaagcctctcggccagggcctttgtcgcctctcggctcttcttaccgacagctctcgtgtgactgcatttgggttgccagccagtggctactggggcccagagtgccatctgccaggttccagggggtgtttgacaacgctggactcagggtccccagtcctgggttcagcttcttagcctgctctttgacttgaccctgtgccaggagcaggtgagtcacttgtccccatggctgtcagcacgctgcagtgacagcattggtgaagtactgggtcagcctgggcagtgagatggatgaatggaggtctcgtttaggctccacgctctggtagggagaaaagtcttgattaacattcagtctttccactagaaagagcgcaccacactgcacgagataactgacggcctccggagaaacgctcctgaggacagctgtgacacagaaactcctccggagggctgcccaaaggaggtttttggaaaaatagctttattgcaatataacttacacacccatttaaagcctacaacttggtgcttttactgcatttatggtgttgtgtaaccaccactgtaatctaatcttagaacactttgatcaccactaacaaactttgtccccgttagtggtctctcccatcccctccaagtctccctcatgccaactcgactgttcatctactgtctttatctatagatttcccattccagacgttccaaaagagtttttgaaacctgattttctttaaatatggagttttcctttggaaacttctcgagctctgtattcaggagaatgaaagaattgatcgaatgagtgtggcacaaaaaggagacagggagaccatgttgtgtttcatgtaaagtttgtaagaaatccaaaaattaggggaatggtcatgatggattcttagaatttgggaaggaccctttggaattcatccattccaccctctgactctcagttcaggggtcctccttttttttttttttttttttttttttgagatggagtctcactctgttgcccaggctggagtgcagtggtgcaatctcggctcactgcaacatctgccccccgagttcaagccgttcccctgcctcagcctccagagtagctgggactacaggtgcccactaccacacccagctaattttgttgtatttttagtagagatggagtttcaccatgttagccaggctggtcttgaactcctgacttcaggtgatccacccgcctcagcctcccaaagtgctgggattacaggcgtgagccaccgcacctagccaggccagttcagggatcctcttccaggacctccaaagggctgtcctccaggccacaactggggatggttccgactcttggtgaattcctcctgtattgcactgctgcgtctgtctgactctagagtgttttggggtgcgcgggaatatgtctgattcttctccgtgtgactcaccctcagtccttggagggagtcttctggttccctcttcttcttcttgtcttctctaaggcctcccaactcctttggccaccttccctcctgtttctaagactctcaatgttctcatctccctcatctaaaaaatgacactcctttttgtcgttcccctcttggatttcattttggtcttaccttgaccttcgtgctgcctcagatgtagcctgacccgccatgggatgactgtgccttggtctgtcaggggccaggagcagtggaccacgaggtctcagctttttggcagctgtttcaccctcttaaattcctaacatttgtgctgcaccaaagcctccatggtttcttctttttgtttcttgttttgttttgtttttgagacgaagtcttgctctgtcacccaggctggagtgcaatggcacgacctcggctcactgcaacctccacttcctgggttcaagagattctcctgcctcagcctcacaagtagctggggttacaggcacccaccaccatgcctggctaattttttttgtatttttagtagagacagggtttcatcacgttgaccaggctggttttgaacttctgacctcaagtgatctgcccgcttcggcctcccaaagtgctaggattacaggcgtgagccatcgcgcccggcctccatggtttcttcaaaacaagcttcagaaggctttagtgttccttaatcttattaaggatttgctaacctttgggcctaatacctgtgtttagcctctaaacaccactcatcatcaaagagagatgaagtcatcttcacagggggccgggagggcagcgggaagtggtggtctaccgtcaccggcttcaactgtcactatcaagcctaaggctgcttctagttatttttctccactttgaactttttctcttccttcttcacttaggttagatgaaaagtgcaaagattttggggtgagtagcttgcgtattaagctgcaatgctgtccctccttgacagctgccgttggaaacccaggagcccagcaggatggggcagggttgagcagagggtggtggatgaggatttgtctgcatgttttcctgggtaatggtaccttcagtacttcctgactccatttctagcagccgtgtacctttaataaatttcatttttacgtgtaaatgggctgtgcagtttataaatagccacattgaaattttacccttaaagcaaattgctccctggtctagctagttcgagaatctatttatgatctgtgtctgtggttgacaacgttgctcccctggtcattgtagaagcttccccccaccatatgctgtatagacacgtgccttgccaaggtgagttcagtctgtcttttgaagtttcctgcaactgaaccaaacggaggaggatgccgagtagagcagacccctcttgccctgccttcacctctttcctgccagaaaccattcgccaagtttgtggagtcgtggcgctggatgggcttgtgtgtttgtaccttccttttttccaaaaaggacatgagatggcttgtagtataacagtttcaaaaataagtgaagaggtctggatgaagggcaagagtcgaattggtgcccacgatgcatgccgtgggtcttgtgtgcgtgggaaggaacctgacgcttgttccaagcttccccgcagccaccacagaaagaaccacagtcacagccagtttatgacagtgactcagagcacgagctttgaagcgacgcagacctgggctcaaattcaaactctggctcccctgctttgtaaccatgtgtgtttgagaggctcttatctgtgccaagccttagtttacttttctgtaaaatggggctaacaatatctaccttatagggttctagagaggattaaagagcgtaatataagaatttggctgggcatgggggctcatgcctgtaattccagcaatttgggaggccaaggtggacagatcacttgaggtcaggagtttaagacaagcctggccaacatggtgaaatcccatccccactaaaaatgcaaaaattagctaggcatggtgtcaggttcctgtaatcccagttattcaggaggctgaggcaggagaatcacttgaacctgggaggcggagtttgcagtgagccaagattgtgccaccacactctagcctggtcaacagagtgcgactctgtcaaaaaaaaaaaaaaaaaaaaaaaaaaaaaaacacacagtatctagaatctaaaaagtactcaaaatggcagctgctattgatactaatagaaacaaatgataacacccaggagataaaaccaatggtggcatccggagaagcatggctcttggtgccgtgagcactgaatgagagtttcctcctgtctttgtgggaacagggacaccgtgagatgtagtaacatgaagacagcttcctggtcagtcttatctctcatccctcatagactcatcgtaaatcagtaaccccagatgaagccatttattcatcccaaacattcactgagcgtctgccaggtgtagggggcaccagggatcagatacagtccctaccttcagggagcagggggcaggacagggcagtgttgtgtggacagagccgtgttggaggaagggagaggccccgggggcagctctcccaggctgagggtgtggggtgggctgcccaagggtccagactggggaggggtgaggaagaagcactcaggcaaggaaggcagcccttgcagagggaacaatgggtgcaggtgttgtaacccttgggttcacagtgatcagggagcatcactgggtagcttcttgaagtcctgggcatgaagggaatgggaggagagataggagaggtgagcagggctgggtcaagggcctgtggatgctacactgaggagtttgcatcccataccagcagctactcaagcagtactccccaaccttgctgcacagaagactctgctggggagcttgaaaaatcctgatacccaggttgataccatacacattaagtcacaatatctggggccgggagccaggcagctgtcctttttgaagacccatgggtgactccagcatgcagaaaagtatgggaaccactcggtgctgtgctggcaagccagttttattggggtcagactgggtgcagggagctttggtttgtagcatttgtccattgctgtggtgtaaattctcccatcgtggccactttcaacctacggctccacatcactgagctcagagttgggaccagctgggtgcaccgtcggcttgcaagcctgcaggagctggctccagcacacactggacactgctaaagggctgcaagaggtagagacacaattagacagaagtctaggcagtgttagtttggaggggaaagacaccagatgggaggccgttgagctgagatttttgggtaaccttaagtctggtaggagtggtggggtgcaggggagaggtgtggaggtgctgtctgcgatccttgggcctcttgagtgctgatcgagactctgctgtgacttccacagccaggagttctccagaccccgactatcctcatggctgtctacctaacctcagtctctggtctataggattgaactaatgactttaggggccagataagagtagctggccctttgcccagaggggaggaggacggggtggaggagaagggaagctacaaaatgcagtgacagtggtggaccctgccctcagctgcagctcgtgcctgtggcttctgacacccagtgacctcaggactaggtgacaccagagaaggtggatgctggtcagtgttggagcaggacagaggggaggaaggatatgaggcccaaggaacccagacaaaagggatgcacggggtgacggaggaagggtgagctccggagagaacatgaggcccagctcccctccacttttgcccaaggcctcactgtgttgcctttccacctgcctaaaagaagcagcttagggtcatgactcagggagaggcggttagacaagtccaataatacaacttgtttaggggatggagggacccagcctgaggccctgagcccagggaagcagctgtggcaagctgagcctggtcatggtgtccctgaggctctgcaggtatggacatgcctctgctggtatgcatgcagctctgcaggtggggacacggctctgcaggtggggacatggctctgcaggtatgcacgtggctctgcaggtggggacacggctctgcaggtgtcgacatgcctctgctggtatgcacgcagctctgcaggtggggacatggctctgcaggtatgcctgcggctctgcaggtatgcatgtggctctgcaggtatgcatgcagctctgcaggtggggacatgcctctaccagtatgcacgtggctctgcaggtgtgcacccggctctgcaggtatggacacagctctgcaggtgtggacagggctctgcaggtgtgcatgcagctctacaggtgtggatgcacctctgcaggtatgcacatggcccctggagctgtcttccctgctgtaccttctaccccttcatgggcatttgtaacctaagccaaaagggaacataacaagtccagaaataagtcaaaaccagaaccactcaaacttcagcgtgtgtgcataggaatctcctggagggcttgttaaaacacagattcctggccccacccctggagagtctggctcagcagatctggggtaggcccaggacttcgcatttctaacaagcacccagaggaggtccaacgaccacactttgagaatcactggtctagacttaacagatcccttctgcccattccctgctctggtcattcacccgggggtggtgctcccgactgacttcttagttctctgaggtagaaaggtttgttgtcagcagtgatactggactagccactgcaggggatattgaccatgcctgtgacagttgggcccagccctgtccacacggaatgcttgtctaagtccaggataaaagacaagcctgaggcctcagaaaagatgtgctgcagcccctgtccgggctgtgccttctgctgtgggcagctgattccagggcatgccgtctgcttgccacattccctgagtcctcactgatgtggttgaggggaccccatcaaaggcaggtgcctcatttcactctgctttgctgcctgttccctggactcaagggcatagtttctgtcaaattaatttgcgcttgtgcaggtttgttagaaactttgaagtgcttctgggtctttccatgggggttctggttaggtgtcatcacccaggccaggggattcagcgtctcccatccctttcccacctttccatgacacccaatggcatgttgactcggagggcgctcagtaactgaggaatggactgctgactgatagtgcagtttatatgttaacgggggagctatagagcctggggattggagcctgctaggtccagtcatctgtgcaacagtttctacctaattaaaagaagaggctttgggttatgactcagggagagacagttagacatgtccagtaatagaacttgtcacgacggagagccaggctcctcagccctggcctgccaagcttgtattctcttcttactgtgctcccatggggaatgatcctataaacagctgctgctcattgctgaagccaggggagacttcttgtgatgactgacagaccacacagagcaggtagcccctctcttgggttttagccctggtgacctctcatagggtggctgaggggtacacagacccgctgacttccctcagggtgcaggatggagcaggcctctcggtagtgcgaccatgaaagttttcaaattttctgagatttcctcagccaggtgttgatggccatggggataaaggacagaggtaacacaggcagcaaaaaaataaaaaaaaaccccacaggtttggggtgagcctttcttaggagctccattagccaacagccaagatacctcattttgcactcacttcacttgtgaccaaagtgtcttaggaccaaaagggatttgggactttgttgaactgtttatataaaaaaaacctggctgggcacaatggctcaagcctgtaatctcagtactttgagaggccgaggtgggtggatcacttgagcccgggagttcaagaccaacgtgggcagcatggcgaaaccccatctctacaaaaaatacaaaaaaaaaaaaaaatagccaggtgttgtagtgtacacttgtagtcccggcaacttgggaggctgaggtgggaggatcatttgaacctgggaggttgaggctgcagtgagccgtgattgcacctctgcactccagcctgggcaacagagtaagaccctgtctcaaagaaaaaaaaaagaagaagaagaataagaagaaaagaaaaggaaaccttctccaaggaatctctaaatctattgctgagaaaccagttctctagatgggtgcttttcttgagtctgagatggggcagttgtatcacctgcagtgttgagttatacaatgatacatgaagcatgataatagctgcatctcataacatagataaatctgctgacactacttttacaacactcaaacagaagcaaaactaaagagtgcatttttaactacttattcttgaaataatttcagacctacagaaaaaatttaagaacaagagggaactcccatatgtccttcacccagattcactaaattttaaccttttgccacacacgttattattttttgaaccgtttgaaagtaggttgcatatatcacattggtgttagtccatttgccttgctgtaaaggaatacctgaggctgggtaatttataaaggaaagaggtttatttggctcatggtaatgcaggctatacaggaagcatggtgccagcatctgcttctggggagggtctcaggaagcttacagtcatggtggaagaggaaggggagccagtgtgtcatatgacgagggagggagcaaggagagggaggttgcaggttcctttaaacaactagctctcctgtgaaccagcaagaactcattcattaccatggggttgtcaccaagctattaatgagggatctgtccatatgatccaaacacctcccaccaggccccacctccaacactggaggtcacgttttaacgtgagatttggaagggacacacatccaaaccatgtcagtgtctctttacttaagtgcaaaatatactctcctacatatagtataggtacacatttgggaaatttaacattgacaaagtacttcaatctcatctgcaggcaatattccaaattgatcacttgtctcagtgatgtcctttgaagcaccttttcccgccttgagtccagcatcacatactgcattttgtggtcatgtctctagtctttaatctgcatctgttcctcggctttctgtctttcaaaacattgatgtttttggagaatgcaagccttcttttccgttaagtcgagggtccctacatttacattttcctagtgtttcattataatcacattcagtgtatggatccctgaccagaatgctacctacatgatgctgtatccttctcagggtaccagatctggaggcacacggtgtccatctgccactcattagtgatgttaattttggtcacccagtcaaggtgctattcagtttctccacttacggttaatatgttttcccttccaactaatcagcaatctatgggagacactttgagaccatgctggtatcctgccttttactaaactttcccttaagatttatcatcaacagataatttttgctgaacaattatttactatgacagttgtaaaatgatgatttttaaatgatttcctccaaatttattacttggtattctactatagagccctctcttgttccccattcacccacctacacacccacccacctgcacactgattcacccatctgtcacccattaacccatccattcatccactcattcacccacccacctgcttatccactcatcgtccacctatctacccacccatccacctatccacctacttgtctacccaccatccacccatccctctatccagccagtcatccatccatccatccagtcatccacccatccagccatccagccatcaatccacccagccatccacccatccatgcacccacccatccacccacccactcacccacttacctatccatccatctttcatctacccattcacccacccatccatccatcctcacattcacctgtccatccatccacccacctatccatctactgatgcatccactgatccatccatccacccacccattctcttatccacctttctatccatccactgatccatccatccacccacccatccatccatccccattcacccatccatctatccattcagtcgcccatctattcacccatccatccatccccccattcatccatccacccattatccatccattcagccatccacccatccattcacccattcatctatccatccactcacccacccacctacccatccacccatctatccatccactcagctatccatccatccatccatccatccatccactcagctattcatccatccacccacccatccatccactcagctattcattcatccatccatccacccacctacccatccacccagctattcatccatccatccatccatccatctattcacccatctagttatcatcagtatagattcatgaatttctattttattcatcaggttaaaatccattactgtcctcatacagtttgatgttcagattgtcccagatttggccagcaaaagcccctttaagctgactccagcaacaatatgtattttaaatgtattttctaaaactaagttgagtattaaataaatagttctattaataataaggcaaatttgatcattaggatgactcagattttagggggaaattagtgtccctgaaggcataaaggagactgagaagcagtttctgtctccacagttggcttcactgacctctgtgctatcagagagcttaggatctgacatctgcctcatcatcttaccctggatctgctttctgtggaagaattgcagcagacatggtcatgttgcagttaggactgggcagcagcaaagccagactcgaggcacctagacctgagtttggagcactgttagctgaatccagagagctcagccttcctgagccctgaagagaccacagaggtggcctagtgggtgccacatgcagcctggctgggagtaagaaggagaatgggaaaaaccatggcctccttggtttgcagagaaggaagaatcactgttgttacttctctttgctttaggttggctcccatcatctgagactccacagaggcctggaagccaatgcccctgctttcgacaggtagggattgtctgacaccatccaagcctgtcattgtcatccttagacatcgtcctcccatcagacacaagggagagggtgcgacgggaaagggaggaccctgaaccctgaatctaaagctgctttccctttggtcctttatgcaagaagggagatgacaaaatgggatttttactttgttctcaggtttcctgaaggtaaattaatgaatgttcaggtagcactttataattattttatcttaccagtttcttgcaatgaggcttcatctctatgccctggttaataagggatcatctaaattatagggtatttgaagctgtttgttttttgttttaaaatagtatagaataaataagtatagaaaagtataaagtgaaaaataaaagtaccctaactcccagttaccactctcagagattttactattagtagttttttacatgtcattctagaaaacaattttggcattttatgtgtgtgtgtgtgtgtgtgtgtgtgtgtgtgtatttaaatacacaaattggatcataacacatttactgttttgcagcttgcttaagaaaagcagagctatttgtaatatgtatttgaaataataacttcttaaaagatttgcttatttaatctaaatactcaatattttaaaattgtcttagtgaatatagtaaaaattctcgaaagtaatgtgttaagtgtttgagtccttctacctgaagctttattgagactttaagtttgctttcatactcttgttaaacataacacttgtcatatgagcccagatgtgaccccctgattagtgtgtgacatgtaatgcgcttttctttaaagagatatttaatcaagtatagacaagaccattgccttttccaaagcattattagtatgtcctgagcattctacatgcggagttctttcagttgacattcatctatactaaattgtcttaggaaatagtgaacatgaaaccaaaaatgaaattctacctggctgagcttggtggctcagattttagggagtcgcctgggtgacagagcgagactccatctcaaaacaaaacaaacaaaaaacaaaaatattctacccgaagctgacccaaaacaagagggaagggtcatgctgggttcgcttcaggaaccctcctatgtttaggagctttcttaaaaaatacatacatctagttgaagcacatttgcatagactgcagatttttcagaatcctggtaatgcatggtgtgtgagatgcacgtaccacagagaatgagacctctctctcctcacaagcaccccagaggctgccttgccccttggaaagcattcctaaatctaggggtacacttagatctcttctgcaaatcacaggacaagctgctgaaagggtgagtctttctacaggcagctactgtgtccaggaagtctcttctgtaatgcttcttacccacgacactgggctggaggcaggagccctcccgttcccttgcaggtgctgctgctctcatgttcattgctgactatgttcccctcattcgagataacgtttggaaataaggtgacatgtctgcctagtggccgcagtggggcaccatgagggtccccctgaaagcaggctgcccaggtcctcgatggtgtccctggactggcatgtgcattgtcctgggtgcttcccaattctcttctctgggacatcactgcgctctcaagagtcgtgcggttctctgatggatttggttgagagtaaatcctttctttcccccgcaaaaccttcacacagatagtttttcttcccagaggatgcttgttttcctttgcctgagctgcatgggtgcccctgttagccgaggcggtctcttgtcactttgctgtatgtgctccatatctgaggagggctgtttgcagcaggactttggctgcagctgcttgagtggggtcttgtcatctctgtgtggtgatgagtctcggtggaagggctaacctttcacagggcggtgcctcagtctctcctcacaggacagtgaaccccttctccttccccgccccgctctgcgggcggctgctgtgcacatcagggtgtgctgaactcttggtccctccctgaagatgagaaggatgcttccaaatagaaatctgattcctcagtatcccgaaaaactcctgttttccaagtagcttcctatgacagtaacccgtaggcaggggaagtgaaaaaaaggcctcaatgctcagggtgacccaggaagaagcccgtatgatgccgaccttgctgctggtgccagcgtccccttacaccctgggtgccagcgctcccttacgccctgggtgccagcgtccccttacctgggtcggcagggcctctcagctcaccaataacgagcattttacaataaagggaaagaaagaggaaccacgtcccacacaccaagcactgtccttgtcactttcactcgtctttttagtcctcctcgccattctccgcaggaggggaagtagccctgctttatagatgaaggagccagctcagaagggatgaatcatttgatcaggggagtttggggttgggacagcatagagtaatgatgaggaatagtgagtaataatgagtaataacagtttccttctggccctgggctttggaaccagttgagaagaaggggcaggaatgagacaggaagagatcagaaatgggccttgtttccgatgagccacattgtgggatgtggcttggatgtgtggccacggtgggctccctcaccaggggcagagcctgcacgtgtcagagccaggcctgggatgcaccttctctgggcagaccgacccaaaagaaagcccacaagggctgaagccacacacagcccgccccagggctgcctggagctgcacgtggagacgggagcccgggagggtgctcacccttaacttaggccagggagtcagcaggcaagcctaacttcaaactacccacttcaaaatccatagtctttctactactgtcccttaaagttagtaagagaatgttttctcttactgcataagaaaaaaaatgatttttttcatgatcattattagctctttaaaaaattccgctcataaacgtgtcattacagaaatttggaaaagagaaagatgtttaaagaagaaaagaacttgaatcatataaaattctaccacttttgacatcatgtgtttttttccagtgttttttctatatttaggcataaagattgcaccattaaacgataatttgacatctgctttttgcattgtatcatttccctatgttttgtttaaggcactacatttcaacatgtttaaatttgaaatgtaaggttacttttaaaaagctggtgatcaagaataaatattggaatctctccctaatatttcaacatacatatttagaaagtagcttccaatacaaggaatgttttccaaagcctgcaagttttgttgtatctccttgttgtggtttagcataatgcaatatagcacttagattgaaaacaggatgctgagttgagagctctcctgccagttgttctagttttgagaagggtgggtaccaagcaaaataagagattcatttcacacatgtgcacattgcatgtgtaagactctagcccaggcacggtggcttatgcctgtaatcccaacactttgggacgctgaggtgggaagattgcttgaagccaggagttcgagaccagcctggacaacatagcaagaccctgtctctatgaaaaataaataagtaaaaattagccagatgtggtggcatgtacctgtagtccctattacttgagaggctgagttgggaggattgcttgagcccaggagtttgaggcagcagtgagctatgatcgtgccactgcactctagcctggacaacagactgagatcctgtctcaaaaacaaaattctcttgatgaaagttcaggttaggtgttctagatataatgggaggtgctttatagaaagtgcagcatatcctttgtctgattccaaacaaatgtagaagtctacgctagctagtagtaatggcagctgggaggtgcaggttctctccacccaggctcattttccacgatttgggtcatgggggacagctggtcctggactgtggcactaagaaagcatgactcctgccccgtcttcccttgaggggcagaacagggcagagtctgcacctgtgcccgtgcccagcatcacgcccaccccgctgcctttgcaggcacatggtgcttctgaaggagcagtacgggcagcaggtggtcgtgaaccttctgggaagcagaggcggagaggaggtgctcaacagagccttcaaggtaaggccaggctgtcctctccacagctgggctgggcggcaggtggccatggtggagcgttgagcctggaggtggctcctgcagggactggagctgacagcccagccctccttcgtttcctgaggcttccccagcattccgaccagtgaacacggcagtgctcagtgactcgggccctgatacagtgagtgtaatttcttttctttttttttttttttaagacagagtttggctcttgtcgctcaggctggagtgcagtggtgcaatctcagctcactgcaacctctgcctcccaggtacaagcgattctcctccctcagcctcccaagtagctgggattacaggcacttgccaccacgcctggctaatttttgtatttttagtagagacggggtttcaccatgttgttcaggttggtcaagaactcctgacctcaggtgatccacccgcctcggcctcccaaagtgctgggattgcaggcgtgagccaccgcgcccggcctagtgagtgtaatttctgtgagctgatggttgggagaatttgctcaaagtcaaaacagagcatctcctgtccccagccatgtgtcccttaccctccctccccatggggctttgagggcttctgacctctcaaggtacccctctcagtccagcccaggagcaggcaggcctccctttctgccctggctggtcctgggtgagttcccccagccccacagggcacccggcctcagggctcaggagcaggaacttcggtggctttcccctgcttgccggctggccttcaaatttccccctcttcctcgggctttcatggcagctcctggacctgctgctgctgggctcctgtgggctccttcagacttccttggggggcttttcctggcgatcctggacagatcctgggcagggtcacagagccatgggagcaagagactccgcccacctggccaggttccatccctgtgcatggatcccaggcctccagcccccgccccctgctccccaggcgcaagacgttccagaatgagccaagggggctcctggttcctttaccagcctccatgtcccctgcctaatagagaaaaactctctcgttgtttaaagctcaaagatatcccttacagagagagctcgaagtcgcctcactgggggttagggcgatctctgagcctttccctctgcttagaaatgccacatgctcatgctcagagcaggcacttcctggttgccaattttatttggccagacctgcttttcctgtttggtttgttgctattagcaacgagctccagaagtgtctcccttcccacccatcttggcagtgatgctggctgctaatttgaaggaagaagggaaaaagctaaaaaataagaataataataagaaccccaagtccttttcccctatgccttgagttgtggcccctcccatcagtgggtgaagtgcccggcactggtgagggcgggagatggcagccacctcatgcggagaagggtgggctcctggccaggtagggaggggcactctagctgaagacctgggtcatggccctgcctggggtggccctcagccacctcagcttggcccagaccaaggttggtggcccagcagcctgcccagggcccaatggccatcagtcctgctggatgaagcactggctgtggaatgcatggcactgagccaccaggcactgttgggctcctccagcttcttgctcacagcaagacttgcttgatgatggcagcactgcattgatttacactcagacctatcacaggcagtcacgttgagtcagatcagatgacccccaagtccttctagtccttccaagtcactaggacctctggctgggcagaggctggactggcctgacctgaagccacaagggcatgagtgcagggtgagaggcctggaagccgggtggcctgggtaggcggacagtttgtccttcatcacggggctctctggggagaaagccagggagctgccaggccagggaagcctcatatggaagggagggctcttaagggcatcctggtgccatcagcagccccttgacctgcttcccatctctccccaccttcactctggctccctgaccatcctgaagtagcatcgggatgtgggacccacctgggccacttcagctggagacttggtctcttcagagcataaccaccagaggctggtgcgcggcaggatggggccggttactagggcaacggggagctggattatgagctctgcagcctgccacagcactgctatctctgagggcctggggcacctgggccacctgaagaacagagcagtccttcctcacctgtgccctccagagagccctgcaggagtatgatctctccaggaagccacacctgctctggcttcttttgctcaagggggaccttctgccctttcgcaggcaagacgctctttgtgggttttgtccccccagggcctttgtcctgtgcttcccttttggggtcaactgcctggtccactgtgagcttccagctaaagcacgtcctgcggcgagtcaccttggttagccgcacgggtcaagctctgcaaggagcttgccctcctcgtcctcccttccctctgctcccctcaccgccctcccctcctcttttcagaagctgctctgggcttcttgccacgcgggcgacacgcctatgatcaattttgacttccatcagtttgccaaaggtgggaagctagagaaattggagaccctcttgaggccacagttaaagctgcactgggaagacttcgatgtgttcacaaagggggagaacgtcagtccacggtgaggctcgctgcgcactgtgccgcgtcttctgctggggggaagcgtcagtccacggtgaggctcgctgcgtgctgtgccttctgctgggtgaggcggcagaggggccgtgcagtctaggacatgtgccctatgaggggcagcttccttccctccccactcagttacccttgtggtttcctgggtcataagcttggcgacgccgggaatcttgggttccagcttctcatctcccttcccacagtaggagacaggcttttgaatttctcaaggagatgttgagtcatggttttctggcaaaagaaatgaactaataaaggggactgcattaaaacatggagctccacgctgtgacgcaggcctgtgagagtgagggccacagtcgcggtgggatggctggcatagacttagattgctagaggagaccagggtatggacttccctgttcagagcagaggagaaaaacgaagtccagttccctcaggtcacatgcagggggtcctcattatttgcagattccatattggcttatttacctattccttaaaactgatttgtaaccccaaaatcagtatgcaaagcatttttgctggacagagtatttaaatactctggcctcgtatttaaacaagtttcctttttaagatttagtaccatgtttttcacatttgtggggtctttgttaggggcccccctttgttcggggatctcatggtttagaatggccccaagcagtgtgccgaagagctgtctagtacttctgagcacaagaaggtggtgatgtgctttatggagaaaatgcacgttaagataagctttgtccctatatgagctacagtgctgtcggccatggttcagtgttaattaagcaaatatatatattcaataaggtgtctttatatggaaacatacataaaacaaggttgtatattgatcagttgataaaaatgtgaccagaggtttgcaggaacctaaccctatatttcccctaggagcgatggttctgtgttcatgtccaattcagtgttcctacaactttatagaacataattgctataaataacaaggaccagctaaacgtaaaacgacccagctgtgcaggctactgagtgtgtgtcctggggtctgcctgcctttccagaagtgctggggatccactgggatggacactggggtttctggggggctattgatgaggaggtgaggggttccctcttagaacatgtttcctcacacctgtaatcccagcactttggaaggctgaggtgggcggatcacaaggtcaggagttcgagactagcctggccaatgtggtgaaacaccgtctgtactaaaaatacaaaaattagccgggtgtgatggcacgcacctgtagtcccagctacttggaaggctgagacaggagaatcgcttgaacctgggaggcggaggttgcagtgagccgagatcatgccattgcactccagcttgggtgacagaggtgagactctgtctcaaaaaaaaaaaaaaaaaaaaaaaaaaaaccatgtttccttgggagtcaaaagtcagacatgggcctctgtgctatggccactgcttctttgaaaacaacatataaccgtttacatttcttcttgtcctaagttttcagaaaggcactttgcggatgaactgtcttgactgcctggaccgaaccaacactgtgcagagcttcatcgcgctcgaggtgcgtccctgccacagccttttcggccatctgtgccaggtcctgtgacttcagctggacaggctgggctgagcacctttagcggcaagatgagggtggcatcaccaagacaaccttctgactatggggaaggtggacagggagacactgggacatccagagaggggttccccaggaggctgctttctctgtcgtaggcacactttctcacaccctcttgtgaaatgcatcccagacatggtggcccaaaggctcctcgggaacagcggttgtgtgtaatgattatcgtggatgcaccattggccaaaggcagtgtgaggctggccggatgaggctggatttgaagctggggagggagacctctgtctgcatggccccagctgcctggttgacctctcctggctggggggtcgggggtagggtcagcaccccctgctgtccaccactgtttgctcttcagcctctggcattgggtggggcggggcggggtgcaggggcgttcaagtgtcagggggtgagaggagggcttgggtggaccctatagataaagttggggtgagatgtgggaagtcactctctgctgtgggaactcctcatcctctggaggggcacagagtcttccaggcacagcgtaatccacaggctgccgaataaggaacctcctgggacagtggctgcagggcctctgtgggagaagccagtgacagccatcccttattcctccccaggtcctgcatctgcagctcaagaccctggggctgagttcaaaacccatcgttgaccgctttgtggagtccttcaaagccatgtggtctctgaatggccacagcctgagcaaggtgttcacaggcagcagagccctggaagggaaggccaaggtagggccccgccgagggggcagggtgggggccccagggacccccctcacggcctgcggtctgggctctcggcaggtggggaagctgaaggatggagcccggtccatgtctcgaaccatccagtccaacttcttcgacggggtgaagcaggaggccatcaagctgctgctggttggggacgtctacggcgaggaggtggcagacaaagggggcatgctgctggacagcacggcgctcctgggtagggcctgccgcagacagggcgaggcagggaggtagggtgctccccagccccactttcccaccgcctctgtgctatccagagagcgggtggcagaggtgcctgggatctgagcagtggaccatgcaccttgcagctgtcactgcctctcccgggagcctgcgctttcctgctgggcctgggagctcacgcttcctctgtctcggcttggactgtgtttccatcctgagaagcgagagacaccaggcgggctcagggagaggccgtgcactctcctaaacgcatcggtgcctttgaatgctaacctactccagaaacttcctcagctgcctgggctcttgggcccttagcaggtgatgttggctttgggagcttcccatgaagttggcctccagtttctctcttggcccctgaggaccctgtggaaacagagaaggaggatgctgtcatcccctggggatgagggcaccttctggtctcagcggcaagacatcgtgattccatcaatataggaggttcctttgggagcattttaatggcatcttcttacctgagcctgtaaacatattaggtctcatggaaaagtaggggaaacccagcatttttccttataagaatgtacaagtgtcgctttagaaatgtcaggtgtttttgaaaaatgaactagcccatgcttaaaatgggttcacggccctttccactgtcaccgtcactgggggagctctaatttggcttccgataggcacggtgatatttagtttctactctggaaacagtgccagctctgtaaaaggtgaacaaagctccatgttgtacagtgagtcttatttaatagcaaggcagacatgagttagatttggtttacatcacaagtttaaaaggtggaatatattttggctatctagaggatggagatggttctgtgtagtgactttttaaagccttaagtctggggcaaaacaaaacatatcagacatgcaggctggaaggcagaggatgcaaaggtggctgtctgggttggtaagacacttaaagttatagtgtatatggatgcatacacaatgaaatatggtcagttacagcatgcccttgcttaaattcctatgccttgttcttctacggagtggacagtgaggacacggcttttccctgtcgtgtctgagatccctatggtctgatgtcccatggcttctggcttcagttgggggtaggggtatagacggtgagtttccagtcttatgttttcacgcctttattgtagaaatgccataagggaagccccgtggtgaccgtggttttaagccttttgtcgtcttcgtaaggagcataccctggtttatctctagaggctcatgaaccatctgtctctgccaggcagcctcatctgtctttttggaggatgcctgagctttggaactgcaaagaaatgtgcctttttatgcctcctgacagtgactcccaggatcctgaaagctatgactgagcgtcagtccgaattcacaaatttcaagcggatccggattgctatggggacctggaacgtgaacggaggaaagcagttccggagcaacgtgctcaggacggcggagctgacagactggctgctcgactcgccccagctctcgggagctaccgactcccagggtgagggcagtgactttgggggagacaaaatccaattgcacctaacctgacatgtcacgcttgaccctttagtggccatcgtcttgtggaatttcatctttggtgtcttccctcctcacaatgtctaaatagcaccatggcctgactctcaagaatgctgcctcgcaagtaactgacctttttcctttcccagatgtttagaagagttagcagatggtgaatctctcttttctctttgcatacagtgatggtgaagtcttaggctttcatcagtagaatcttttcgtcaccagtcggaaggtgtggcttctagggccatgtaactgtgaggttgggagccaagcctgtcttcggtgttttgtttttgttttttgttttgttttgttgttgtttgtttttttgagacaagtttcactcttgtcacccaggctagagtgtagtgacgcaatctcggctcactgcaacctccatctccaaggttcaagcagttatcctgcctcagcctctcgagtagctgggattacaggcgcccaccaccacgcccagctaatttttgtatttttagtagagatggggttttgccatgttggccaggctggtctcgaactcctgacctcaggggatccctctgccacagcctcccaaagtgctgggattacaggcatgcgccaccgcgcctggccctgccttcagtgttgatattgaccaagaacagctcatccctgcctctccccaaaccaactctattaatctgctttaagtagtcacaaaataattcatgtgctatttaggaataaaataattccaaatgttgacacctcaccttttatcttgtaagatacactattgaatggccccagaacttaggatctgaagaataaatgattcttgtccagtcatcgttgactcgggccttggtttttttgtttgtttgttttttgttttgcttccttggactcaggaacttgtggttcaggtttttgcctgttggtgagtgacctgtggtctagctgacatgcagtggcccatgtgtacattcatgccccacagctgcctgggtagtacccagagccccatcccttcctgtgcacacgccatctgtgccctcctttctgcctccaagggcaggtggcagagtccaccattcagagccactggggctctctgtgtcggtggtagcctgggttgctgcttgtggtgcctccagaagccattcaggatgccctccggagcaggcccatcaacgcggagagtgcttagcacagccgtggctcaagagccgtccctccagtccccacgaaagtgactcctcttcttttccctgcaggaaggtgtgcatgtttttagcaagctggctggtattttgcaggggatttttttggggtagacactagcaggctccccagcagtcccactagagatacaccaggttccagagaaggaaaggagtgctgtggttactattgccaagcagatcagacagagggacggggattgttttatttaaaaaaaaaaaaaaaaaaagctttaagtcagggaaactagaggttccaggttgcccattgtggtcaacagagaaggaagtggacagcctgcctggcctctcgctgacagaggccatgtcctcctagctggaccctggggaggtgggcctctcactttctgcagcagctggagccatgactgggcttggtggctcaggagcctgggtgtcagaggtcgtgactggacagattcagtcaatggctacaaggttatattaaattctgacctcccctgttcaaagggaacagaatggacggagggcccctctgggctcactgctgcatttaagccaggcatttctgaagcagattccactggggcagttcccagcagcaatggtagccacctggagttggactcaggcagtggacagcatgactcgggagagggcactggggagccccatgaactcgtaatgcgggacttggcggttctgacttctgtcatctcttgccttgctccccagatgacagcagcccagctgacatatttgctgtggggtttgaagagatggtggaattgagcgcagggaatattgtcaatgccaggtaaggggccaggtgtgcggggccaggcagggacttcctgagtcaggtgcctggctgggagcagagcctctgaggctctccgggagccagcctgcttctgagccagctaagctgtggccctggctgtgtggggatctctcacctggctccttctctatgctcacacatgcaccaccccgttctttccctgccacttaggaagtaaaaggaagggctgatgattgctgtgttttctttgcagtgctctggcctcggccacttgttgaggctaatttatgctgccagagggagctggcatgtgtggacctggggtgcaggggaagggcggggctgggactgggagagtagttgactcatgtttcctggggagaggtgagaaagtgtgagtgccgggaagaggtactttcttcctgcacaccagggcaaaggaaaaaatcaaaaccactggatttttatttgatatgaagtcaactgggcgctccccccaccccctgctgaactggcctggctttattttaaggaactttctgaacaaataaataagactgactctgtggggctgctatgagaaggtcctgggttgggtttcaggggtcaagggagggctgctgtgatgtgtgaggcatagccaaaaacacgcagatcctccagtagaagaaggaaagcatgacactaatattggggtgcgggcagcgtgaaatcagttctgcaaacagaataggcttgggctggagcatttggtaggtgggagatagatgtacttccagctacctgtaaacagcatcctttccttttctcttccagtactaccaacaagaagatgtggggtgaacagcttcagaaagccatctcacgctctcatagatacattctgttgacttcggcacagctggtgggcgtctgtctttatatctttgtacgtccataccatgtcccgttcatcaggtaagaacattctgtttacacacatctggggaacaaggggttgttagtctttgtgttttgttctttgacttccccctcctcccccatccccttctgtaacaggaatcgggacttaccattattttagataaatgtagcaaaaccccctaggaaaaactgggctgaatagaatattgtctagcgattaaaaagccaccatgggaaatgtctaactcaggaagctgaactcttagaaagggtgttacatgattgtcatcgcccaagctcaattccgtgcaaggaaaagggttccttgttggaatcttatagacaggaaacctctgaccaagagctgagtaactcactgggaaatgccaactcttttgtccctttttaaaagaattctaagtagaacgtgtgggcctctacaactgtgacctcattgtcatttctccaaggtgcatgctttgtgagcatcagaaagggggcgagcttaggggcggcattcctcttggggtgtgggtgtgggtgtttggatgctggaggaactcatcttttccccagcttgtggttggcctcatcttaccacctgggcctacccatggcttttgaatttccaccagcctttcggcgagctggcagcaggcgttgaactgacctccccactgagcccctgggtcccgggaagggcctgtgcctgccaagagcaccacgggtacacccctgcagcacctggagactaagactatgctgcccataatcctcttctctgactttcagaagatgtttaggtccctgtccctctgcttgtgttatttgggcagcttggcagtgtcctaggttagcaggtgaaggttagtaaaggttaaaggcaagggcggggtgagggtgagaggtaaagcatttgagaaagggctcagagctgaggagagccaggtttcccaggctcggtgtcctcggcttcacgtgcctttagccctgagctgcttccgcctacaccccttccatcagtcatccccccaaccttgtctgccagcgagcagatgcaccagcaggcctcagtctgtggcatggctgtggaaatgttaacaaatgtgcttgcagcccatgtttctatggactcgtatgcgtcataagtgggcatttgaatgcaagcaggctctggcattgcataaaagtccttttgagaccatctacccagcccagcataaacagctgcccgtttcctagctcttaaagtgcattgattgctgggcacggtgtctcacgcctgtaatcccagcactttgggaggccaaggcaggcagatcacttgaggtgaggagtttgagaccagcctggccaacatggtgaaaccctgcctctactaaaaatacaaaaattagccgggcgtgatggtgggtacctgtaatcccagctactcaggaggctgaggcaggagaattgcttgaacctgggaggccacagttgcagtgagctgagatcacgctgctgcactccagccagggtgacagagcgagactctgtctcaaaataacaataataatttaaaaatgtgttgattgcccagatgacacctcccatgcatggcgtgatggctgcacaggagtggggtgggctggtgggtggtgatgtttgcgccgctcctggtggcagtgagaacctgggcggatgcaggcattgccctgtcttcggcttcatggggtgctcaagtgagcacttcccagttggggtgtgggggagatgtccaggcagcggtgggcagcaggagggaggcggcctcctgaccaggagtcgatgacggccacggtggccactgtgttgagctgatgattttggagcactcagagcagcaggtcccgagctgctgctgggcccttctctgtggcaaagcagggtcacacttctccttcaggagccgacggcatgcgcgtatccttctgttccagggacgtagccatcgacacagtgaagacgggcatggggggcaaggcggggaacaagggcgccgtcggcatccgcttccagttccacagcaccagcttctgcttcatatgtagtcacctgacggccgggcagtcccaggtgaaggagcggaatgaagactacaaggagatcacccagaaactctgcttcccaatggtgagcggcgccgtggggacagccagcacctccctgctcagctcagtcccaaatgtgactgttgataggagccaggcactggggacacaaccacagggagggccccttcctggagggctcagcgctgggggagggggagagggctatgtccctccatggaattgacctggggcagggttagccacgtgcctggagggggccagctttgcagcatttcccgttgctgtacaattcctgagtgtctgcatggccactggatttgtatgtgtgcattttctgattttctaattcaagtgatggtttagggaagaaaaccatgtccgtggtctgtcctgtccaagtggtgaagagcatttgaatccacacagcctaagactccaccttcctgagattcacagtcttcacatgtactttctgtggtggctcagataagcacacccttttgaccaatggaccctttttgactgggaacacggttcttgaccaaggagcccagatcctgcctgtcctcgaagctgcaatagcgaaccgcacactgccctctcgtggcggtccggagggtttcattctgaaactggaggattttcttttcaaatctagacgttaatgttctccttcctgtgcaaagatgctacccgggcacagcttcagcgtgtggtgcacacgaggccacctctttcccgaagtgaggatagacttcagctgttcttgctgcaaaatcttccactgtctgagaggtggtgggttgggtcacagagctcttccctgtgagaacagatccttaaaactgacgtcccattttactgggctgcacgagcactcaaggcaaaatttccttagttttcattaagaagtgccataattcctgttggtgttgtttatttcttatgttaaaaaagaaacaaacgagttgggaaattttcaattgtgtgtaatgcagtttaaaaaaaaaaaaaaagtctaacccttctcacttaaaaatagctactttggggccaggcacagtggctcacacctgtaatcccagcactttgggaggccgaggcgggcagatcacctgaggtcaggagttcgagaccagcctggccaacgtggtgaaaccccacctctactgaaaatacaaaaaaaattagccaggcgtggtggcgtgcacctgtaatcccagctactcaggaggctgagacaggagaatcgcaacccaggaggcagaggttgcagtgagctgagatcgcaccactacactccagcctcggcaacagagcgagactctgtctaaaaaaaaaaaaaaaaaagtgctactttgacatagtaaacttgggatacataataagtaattaaaggatttataatgtagttcttttctaccataaaaatattgagggacctattaacattctacacttcttttttgtttttgttttttgagacagtctcactctgccacccaggctggagtgcagtgacatgatcttggctcactgcaaactccacctcccaggttcaagcaattctcctggctcagcctcctgagtaattgggattacaggcgtgcaccaccaggcccaactagtttttgtatttttagtagagatggggtttcgccatgttggcccagctggtctcgaactcctgacatcaagtgatccgcctgcctcagcctcccaaagtgctgggattacaggtgtgagccatggtgcctggccaacattctacactggtattgtctgataccgtagtcactggccataagtagctatttaaattcaaattaattaaaattaaataacatttaaaattccttgctttccctggccacagtgagaatgatcagtatccatgtggccagtggctcctgcatcagatggcacagagaacatttcggtgctgcagaaagttctgtctgacagtgttatctagacgctcattttatttggttgggacctgtttaatcttctgtccagattattgtcatggggggagtggaaatgcctcatattataggagaagagaagctgattttggagctaggcagatgggagctgaaatcccatctgtatcatgcactagctgtgtaaccttcagcaagtgcctttgtttctgaactttgtttttttttttttaatctaagagagagctggtggtatctgctttgtgcacctggaacagagcccagcccttgcggacagttgatccacagcagctgctgtcattgtcttccccattcctggggaagagacagggaaggcaaggaccccaggagctctccggggctgagctggggccgtgggctcctaggactgggcaggatgggaaggaggagctagagagagatggagaagggtcacctgaaaaagctcaggaagttacatgaaggtgcacatcctgagcatttctgctgctcttttgaaacctcattctcctaacgctgaatgctgggtgctgcttcctaggagtagacactccaaagtaagggtgcatctgatcttcaggacggggatccatggaggaaatgctggccatgttgctctcctccgtttagggtaggagctttcttcaaaccactcagaaacactattatttaaaattaaaaagtaagccatgtaaaaattcctccatagttttatgggatgagtgaaaaacaagatgctctagtagaaaactttcttttttctaagtagcattttgagaaaaatactcctgcttgccccagtgagcttgtttttctcctctctcccaccttccttgcaagatgggctgaatgattatgattttcttttcaacttaggggagaaatgttttttctcatgattatgtattttggtgtggcgatttcaactaccgcattgatcttacttatgaagaagtcttctattttgttaaacgccaagactggaagaaacttctggaatttgatcaactacagctacagaaatcaagtggaaaagtaagttgtgctttaaaaacattttttagcagctgctccaagatggaatgacatctgtgagatgtagaggctggtgcagcaaattcagttccgtgagtggatttcactgtttccaacattgtagaaaataggtgggcttgtgaggttacagtacaggagtggctgttcatacacacttcctgtccttttttttttttttttttttttcctgaggcagagtcttgttcagtcacccaggttggagtgcagtggcactatcttggctcactgcaacctccaccttcctgggttcaagcaattcttgtgcctcagcctcccgagtagctgcgattacaggcgtgtgccgccacacctggctaatttttgtatttttagtagagacgggttttcaccatgttggccaggctggtctcgaactcctggcctcaggtgatctgtgcgcctcagcctcccaaagtgctgggattacaggcatgagccaccatgcccggtcaaccttctcctccttctaatactgttattttagtgcctgtttgcttcctagcaggatgagctgagatgaggggagtacatttaaattccatttagctgtggagaaagaagctggttaaatgtgtgagggccaggtgcggtggctcttgcctgtaatcccaacactttgggaggccgaggcgtgcggatcacctgaggtcaggagttcaagaccagcctggccaacttggtgaaaccccatctctactaaaaatccaaaaattacctgggtatggtggcaggcgcctgtaatcccagctactcaggagactgaggcaggagaatcgcttgaacctgggaggcggaagttgcagtgagccgagatcgcaccactgcactccagcttgggcaacgagcaaaactccgtctcaaaaaaaaaaaaagtgtgaggacagggcagataaggtctctcctgaagcaagatttggacgttcttcgaggtttactgtgtcttcccacttgagccccttccagtgtgtggagtgctaaagggttgccacatggacgagtgaccataccaacctcctaaagcaggttttcctgtcttcctactaccaacattctcacatcctctcagtgatgcccaagagaatgagggtgtgtttgtcccttggtcttcccatggaagcaaggccaatccaaagttaaacaaagaaaagaaggatgtgcatgggggctcacgactgtaaggcgggaggattgcctaagcccaggagtttgagaccagcctgggaaacatagggagactttgtctctacaaaaactaaaattagccaggcatgatggtgcgtgcctgtagtcccagctacttgggaggctgaggcaggaggatcacatgagccccagaggttgaagctgtagggagccgtgattgcaccactgtattccagcctgagcaaaagagcgagaccccagggggagagagagaggagagctgactttcactctgcgcttctatgtacttagctcatttagtcaacaaacatagatgaaggcctcggggttgtgggccagacatggcaccaggcatgggactgtaaagatgagcacccctgacccgtgcctcggaccctgcactgtctcctggggggcaacaagaagacagtggatagatcagacactggagtgggtggggagatagatacgagggcggtgtgtccctcagtgggatgagctgaggatcacttttttgctaattaaaagacacatatgtccagtttcagatagattttcaaatgtaatggagcttctgttactttttaagaatagggacttgccttttcagttttcgtttttgtatataacattcaggatcgaaaactacggtggcctgatgacttctttttctcccaatagatttttaaggactttcacgaaggagccattaactttggacccacctacaagtatgacgttggctcagccgcctacgatacaagcgacaaatgccgcacccccgcctggacagacagggtgctgtggtggaggaagaaacatccctttgataaaacaggtgagggggccgtgcccgttcgagagtcggcagagggtgaataagaaatgcgacggagggagagtcacgtttacccaaccccaggcgctgctacataaatcagtttcttcataaccccagatgacacaaaagtcatcccagaccttaacccctaagctttggaagttgtgctttcagggagcctctgcttctggcctctttttttcccttttcttttcttttttttttttgagacagagtttcactcttgttgcctaggctggagtgcaatggcgtgatcttggctcaccacaacctccacctcctgggttcaagccattctcctgcctcagcctcctgagtgctgggattacaggcatgcaccaccatgcccagctaattttgtatttttagtagagacggggtttctccatgttggtcaggctggtcttgaactcccaacctcaggtgatctgcccacctcggcctcccaaagtgctgggattacaggcataagccactgcgcctggcctcctctggtctctttctagagacagtgacctgcaaataggtctgctcctggctgcccctgcatcacagctcccccccacacccccacctcttttttctgggtggggaaagcggggagcatgaggttgcctccctccctgccccccatgctccccctcatgttctttatccagcctattttgttcagctacacttttacctgcttaaagccctaattccaaattggacacgagcaagacacagtaaaaataagttagtttttaaaaatcattagttgtcaagtatgttttgaacaactgttgatgcccagctaggaagtgaagtttatttaaagttagaatatctgtaactagtacataaaaaaaaaaaaaaaaaaaaaaaaaaaaacctaattacacattttgggagagcatagccaggaaattgcatctgtgaaaagaaaatacaaattttcctctagatgagtttgtgaacgcctgtgtggccccagcgctctgagaggtggggcctagaatgagtccgagtgttctcagctcctgcagctcttaccataccaattgctgccaaccttctgggattcctgggtcctggaaacccggcagcaacactgtgtctcaagcctacagtgggcatgctggcgaggactgcaggcatggtcatgactgttttgaataattatatgcgaggaatgtttttaaccaaaggccccaaagcatccgaagcctggcttcaaggtggaggagtaaggaggatgagtctgggacgtggggtggttcgtggcgcagacctctattgtggaagtgtcatgatcgcattcttggatattgactcgattctatatgggtctctcgaatggaacccctgcgagtagctggagaactcaaccttctagacagtgatctagatgttgacaccaaagtcagacacacctggtctcctggtgccctgcagtattatggtcgtgcggagctacaagcgtctgatcacaggtgaggtcctgacttccatggcgttttctcctgtgctgggcaaggcagcgtctccctctccgcaggaaaatgcatgctgtccccataaggatgtgtgtgcgcatgggggtgcattttgtgtgcatacaatacaccaaagaacaaagaatgatggaacaaatatctgtggacccaccaccaagaactaattaatcttagcattttgtcattgctccatatcataaatgacatcattgatgaaaatttcaaagatgcaacctacgtattttgcggcttttatattttcttaaatgatgtcgttgtgcaacttgcttttttgttactatttttgagatacagtcgtgttgatgttatagctctggtgcattcatttgtaactgctgtctagtatcccactaaatatatccatggaacttacaacttatccattcacctcttgatgaatattttctccaggattttatgattacaaacaccatagggtttttaaatctgggatgcacaaccttttttttttttttttttttgagagagagtcttgctctattgcccaggctggatggagtacagtggtgtgatctcagctcactgcaacctccgcttcccagattcaagcaattctcctgcctcagcctcccaagtagctgggattacaggtgcacaccaccatgcctggctaatttttgtgtttttagtagagacggggtttcaccatgttggccaggctggtcccaaactcctgacctcaggtgatccacccaccttggcctctcaaagtgttgggattacaggcgtgagccaccgcacctggccctaggatgcagggctttttaaatgctctgtgcatcatgcattgaggatagagtggaggcagcagagggagcaccgtgggcaccagcacctgtgccctgggattgctgcagaggaagactcaccctgcagaatgtctttaaagacagaggagaggatggcatttgagggtgtgaagaaggaagagtttgatcttcccaaggctgctgcctaaactctcatgtcagtttcaacttttacaaggaaagaaattaagaaaaagaaggtaagaacagttggtcaacgaaaaaaccttttttttttttttttgagacagagtcctccaggctggagtgcagtggcacaatcttggctcattgcaacctccacccccagggtataagtgattttcatgtctcagcctcccaagtagctgggattacaggcgtgcatcaccatgcccggctgatttttgtatttttagtagaaacggttttgccatgttagccaggctggtctccaactcctggcctccagtgatgtgcccgcctcagcctcccaaagtactgggattacagccaccatgcccagactctttagataattctaaattctttagatacctgttgttgcaaatacatacctagaagtgaatcttgaggaatcttcagatatgtgacatcaaggtttgctagctcaatgtattttgaaaccttaatttaaccaatatttcttgaggggcccttacatgccaggccctgttgctggcctggagaaaagcagtgaacaaaacagatgagaccatgttatcatggaattttctggacaggacaaacagacaataaacaaacatgtgtgctatgaaagaaaaaaagtagtggcaggagtcaggccagagtcgagctattttcaatcaggctgtgtaattttcgtaatataggattttctggaaatttatagagtaataaccatccctgtgtcagaattactataaggattgcattatttcctgctggactgttttcctgtttacatcattgatttttacattattcctaatgattgcgtagggtattatatgaaggtatcataactgtttccccattaagaaacagagcattttggcctggcgcagtggctcacgcctttatcccagcactttgggaggctgaggcaggcggatcacctaaagtcaggagttcaagaccagcctagccaacacagcaaaaccccatctctaccaaaaatacaaaaattagctggtcatggtggcatgcgcctgtaatcccagctacttgggaagctgaggcaggagaatcacttgagcccgggaggcggaggttgcagtgggctgagatcgcgccactgcactccagcctggacaacagagggagactctgactcaaaataaaaaaaaaaaaaaaaacgagcatttccctttttttttttccctcccatcaacaatgctgtaaatgatcaacctcatgcattaaatctttgtctgaatccctggtcatttccttagaataaagtccgagaagtgagattactaggtgaaaagagatgaacaattttggaactctatgtaaagtgccaagtaaccctctgaaaagcttgcacccctggcagagtgcagatgtctgcttccccacctccttggtggtactgaggattaccatgtcaaaaatctttgctgatggctggttattttccaagtactgggatacatctttaaggtgccacactttattttccccctcaaatcatctttagataaaaatgccaaggtgatactaaggttaaggaaagatgaagactaaaacgccagagcagggcagctagcctgcaaatccacctgctggtggccacattcgcaggttgttggtgttgactgtttacaaagagccctgggggacagcagctggggactgggggctggagatgtggacatctgtcccaggctaactggggactggaggccgggggtgtggacatctgtcccaggctaactgtcatccctcttttgttcctaacgcagacctgtgctggcgatcgtggaggtggaagttcaggaagtcgatgtgggtgctcgggagagggttttccaggaagtgtcctccttccagggccccctggatgccactgttgtagtaaaccttcaatcaccgaccttagaagagaaaaacgagtttccagaggacctgcgtactgagctcatgcagaccttggggagttatgggacaattgttcttgtcaggtaactgctcccctggctgatgtgggttccaggggatgtcgatgaggatccgtgagagctgccaggtcgttcttggcattgacttggagtatcatttattccaggatcaaccaagggcagatgctggtaacttttgcagacagtcactcggctctcagtgtcctggacgtggacggtatgaaggtacgctgtacttggccacactgtggagtggggtctgatcaatccctctttttatgtgggcatgtcttcttcctcctcttgccctgacctgtgccttttttttttttttttttttttttttttttctctgagacaaagtcttgctctgtcattcaggctggagtacagtgatgcaatcacagctcgctgcagccttgaactgccaggcttaagcaatcctcccatctcagcctctcaagtagctgggaccgcaggcacgtgccaccacacccagctaattttttttaaattttgtagagagaggatctcactctgtagccccggctggagtgcattgggacagttatggctcactataacctcagcctcctgggctccagtcatcctcccgcctcgatctcccaatgtgttgagattacaggcatgagctttcatgcctggccaccaatctgtctttatgtatagacgccatatgcgggagggagtttggattcttcactctggttctaaggtgtctcatgtccggctctagctacttgcaaaatagggcggaagggtgggcgcagtggcttatgcttgtaatcccagcactttgtcaggccaaggtgggtagatcacccaaggtcaggagatcgagaccagcctggccaacatggcgaaatcctgtctctagtaaaaatacaaaaattagccaggcgctgggtgtggtggcttacgcctgtaatctcagcactttgggaggctgaggcgggcaaatcatgaggtcaggatttcgagaccagcctggccaacatagtgaaaccccgtctccactaaaaatacaaaaattagccaggcatagtggcaggtgcctgtaatcccagctacttgggaggctgaggcaggagaatcacttgaacccaggaggcagaggttgcagtgagccgagatcgcaccattgcactccagcccaggcaacagtgtgagactctgtctccaaaaaaaaaaaaaaaaaaaaaaaaagtagccagacatggtggcgcgtgcctctagtcccagctactcaggaggctgaggcaggagaatcgcttgaacctgggaggcagaggttacagtgagctgagatcgtgccactgcactccagcctgggtgacagcgagaccctgtctcaaaaaaccaaacaaacagaatggggaagaagaatgtcagtcactgtgtctcacgttggaaggcagctctaccagcagctgcagaagcttagccattttagagtgtagttctcgccgagttacttgatctgtctatgctcgcactgccatgtgggagactattccagtctttctctttagagtatgtattttggaatatgcagctcatagatagtttccgtttttatagtatcttggctttaaatctgtaccaaatgggaagctggagatgagagttcaactttttttttttgagatggagtcttgctctgtcacccaggctagagtgcagtggtgcaatctcggctcaccgcagcttccgcctcccgggttcaagcgattctcctgcctcagcctcccgagtagctgggactacaggcactcaccaccacgcccagctaatttttgtatttttagtacagatcgggtttcaccgtgttggtcaggctggtctcaaactcctgacctcaagggatctacctgcttcggcctctcagagtgctgggattacaggtgtgagccaccgcacccagcccagttcaacttttttttcaaccagatgtatgagagctatgctgagcctgcgtgaggtctggacccttggtttttcagggccaaatgtgaagattggcctcgttgagggtgtgtgggttttggtgagaagcattgtgtgatcaacaggaggggtcatgatttttatttattcctgggtggccgctctgccctcccaggtgaaaggcagagcagtgaagattagaccgaagaccaaggactggctgaaaggtttgcgagaggagatcattcggaaacgagacagcatggcccccgtgtctcccactgccaactcctgtttgctggaggaaaactttgacttcacaagtttggactatgagtcagaaggttagtgaccctgcagggagggacaggcaagccgttcttctagcaacaggcctgagcttttaaggacaccttctaaagcctcccttgcagaagtgacggaggacacccgcagggcaagccctctgtcccatgtgatgagcatgtttgtatgtgtggacgatgcatgccatgctacctgggacccgaggcatctaaacttaggctacaaacagtggctatgaggatatcagggctgtgggtgtaccaatggaactggggtaccgtccctgctggcgcctgggccctgagctgcagggcagggtgcacgtgtcctgacaggagctgaaccagtcccactgatggaagactgagcctttccccctcattgttttcacccgaattgtgattcatttccttctcccaggggatattcttgaagacgatgaagactacttggtggatgaattcaatcagcctggagtctcggacagtgaactcgggggagacgacctctctgatgtccccggccccacagcactggctcctcccagcaagtcacctgctctcaccaaaaagaagcagcatccaacgtacaaaggtagcctgacccttcttttctcaggagcctcagcgatggagtcagctcaggacagactttcctttttctcttggcgattgggcactgtgtgatatcaagtatgcaggtcccaggagagacctcaaccaggcaggccaagcgaggggtagggactgagccctgtggaggtagccagctccaacaccctgatttcctctagttagtttatttttttacaataacttgtacccccataacacaccagattcaagataattcttgtttcctctggatattcaaatggccacggttctgaactggttttatatttgtgattatttcccgcccccaacaaaactcttctgattcagccaggcgcagtggctcacacctgtaatcccagcactttgggaggccgagacaggtggatcgcttgaggtcaggagttcaagaccagcctggccaacatggtgaaaccctgtctctactaaaaatattttttaaaaattagcagggcatggtggtgcacatgcctgtaatcccagctactcaggcagctgaagcaggagaatcgcttgagctggggaggcagaggctgcaatgagccgagatcgccccactgcactccagcttgggtgacaaagtgagattccgtctcaaaacaacaacaacaaaaaaacttctgattcaatcccagtagagacataatccatatctatgtcctgagttgctggcgtatggtcacactcatataatatcatattattatacagtcatgtcatacggtcacatcattgtatcattttagacttcagagggcctgaaaggtcacattgattgaaccacacacccctagattaaataatacaactttttttttttttttgagacagggtctcactgtctcccaggctggagtgcagtgatacaatctcagctcactacaacctccacctcccaggctcaagcgatcctcccacctcagcctcccaagtagctgggactacagggttgcaccagcatgcccagataattttttgcattttttgtagagacggggtctcactatgttgtccaagctggtctcaaactcctgggctcaagtgaccctcctacctgggccttccaaagtgctggaattacaggtgtgagccactgcacctggccagtaactgttctgagtaacttttaaagcccactaatgttacgtggctggcaggtcgggtagttcatatttcagtgtcagctacattgatgctgttccattcatagccaggcatgcctctagctgtcaatcactgagccccgagttggaggacagctctaaccagcaggtgcaggagcttagccacgcattgggcccattgagctggggctgagagcagagaacagggctgaaagtggattaaggtacctctcagggagggtactttgccaggagaggtgcgaagacctccagcccctttgaccgtacgctggtccccacactgaccaataacttgcctataccgaaccatcaggagcttttaaacttatggatttttgagccctaccagagagatctggatttggtaggagtggggtgggaccctggaagcctggcgtttcaccaagctttccaggtggtttggacgcacagctaggtttggggacttctgcccaagactgaagcagcagccttcgccggagcatcgcggtggttctgcacgttgctcctgccaggggcttctgcccgggagttgaagtggctggagggatgtgctcttcccataagaaggacctttctctcgggggtggccgtcatgcaggcagcctctggagccagtgcaggtgtgagcacagatagtcctttgcatgaagaaactaatagcgcaacacgggacacgtgggtggctttgctacctggtgggcattgagagggtcttcccttgatgctgtggggtgttcagccattcccatttgtaggagaaatcctgcctttccccagttccagtctccaggacacatggggtggagctgctggatacagggagtggggtgtccgagtcaaagtgaaatggagaggcccatgctttgggggagccctagggctgctgatttgatctgtaaggaagcaggagctgtgcctcctgaaaacccctcagcctcttggaaggtgtgtgcagggcaggtcaagatggcagacccttgggagtggccagccatgggcccacagggtttgggatttgatgagtaagcaggacccctggtcctaggcactggccactgcatgccaggctgctctgctgccagagcagggagaacaccctcagcttcctcagccggtgtgttctagagtgaggaattgaaaacatctgcctgtggttggttgactcttcaggggttgtggtttgcaactgtctcctccactctgcccaagtcttgttatttcacaagaaaacacactttgaaatagctcagtgtctctcaagtctgagaaatacccattatccatggttcactgaatgttccaagcaggcactgggtgccctccccgcccccgcccctcgccggcagacagaggtgcccgtttctggacagagccttcagctgtcctacagcaggtccccctgccacagtcggcctcctgtgctcagatccgtgtctgacacgctcacgtgtggaacagaccattgtactcatgccccgccatgtcctccagatgacgcggacctggtggagctcaagcgggagctggaagccgtcggggagttccgccaccgttctccgagcaggtctctgtcggtccccaaccggcctcggccacctcaacccccgcagagacccccccctccaagtaagactctgcttgctttcagctccctggatgcctgccaggaataaccgcgcgttccctgctactgaaaacacggctccgaatccacttctccccggccttccggtccccacagggcttcctcctccttgggctccgttttgttgtaaatccaggacacgtttgacgtcagggctggttgtgtttctcatggcaaatgaaacagctcctttccaaagctgctgttcaccctggagctgtgctattgcttcaaactgctctcccttggcagcattagaggatgcagaatgggggccgcagccatgggagggacgtgagcttcgcagtcagaagtctctcctcagctgctgcgcagtcctccctctacttatgaggaatctggtaaacccaggtccccgcctggaggtgacctggtcacccctctgcgctccgaggcctcctgttccccgggctcagaacaagttcccccttatcctgggtctaggagcattttcttctggttgttcgaacaatgctttgcccgtccagccctccctgataacctgaaagcaaagctgtgatgtgcttttgatccacttgcattttcccaccactgtttacttctccctccccaaaaatgtgatgatcagacttagatcttcctaagccattacttcagaattgggctcattgtggctgacgtcacggtagtaaccaatggcaagccacaagcccagatataaaaataacccaaaaataaaatgcataagtcatgtattattgtggaaattttagagataactacaaagaagaacaaaattttaaaattcacttgatgacctacgggtcgtagttgttgaaaaaagtcttctttttccagtttcatgtatctgcagcaacatacttctttttttttttttttttttttaacaaaattaatacccattttctctggtcggttgtcttttatttaatgggttatattttctgtgtcattgaatgttctaaaacatgatttgttaatggctgcaagtatattttaacagtttattcccctgctttggaattttttttttttttttttttttttttttttttttttttttttttgagatgggctcattctgtcccccgggctggagtgcagtggtgcgatctcacagctcactgaagccttgacctccccggctcaagcaatcctcctacctcagcctgccaagtagctaggactgcaggcgcataccatcaggcttggctatttttattcatttatttatttattttgtagagacagtttcaccatgttgcccaggctggggtttttgaaatattttttccccacaaaatattttaaaaatctggtcctagcaatagtatttggaaccatttcaaaatcaattggtttttatatcagatctgaatcccccaagatgttaaagtttgcattctagtaatgcttctccagatcatctacatcaataggcacacactggtagaatcaagtgagaaactccatagagagtcaaggaaggcctggctctgtgggtgccctaagtgccgagtgagtattcggacctcaccgtgtctgtggtctgctgggacatccgcctcgtctagtcgggctcctggcagctggctgggaagttgtgccttcactgagattgagactctgccctcgttggtttttacagccggtttaatggtgaaaaagtcggcttcagatgcgtccatctcctccggcacccatggacagtattcaattttgcagacggcaagacttctaccaggagcacctcagcaacctgtgagttcttctgcatacatttcaatcccaagggttttgcccccgggatagtgtgggatctctcttctcagtgaatatatagatttatgtgtctttaaccctctacctgctcaccatctcatctccaaaccccataacccttcctcgcaggttctccatagggcttttaaatggttgtatggagtgttctagaaaaaatcacttttgatgaaaaatcccaaatatccctggtttccatactcatccatttctctctcttcccattcttgcctctgaccttggtgtatgggcagagcattgcttggtagaagggaaaatgggagaaattcaggtcgttatcctgggaaaatgatgatcattctggagtgaagttggttgagagaagaggctaaaaagagatgtaaataatgaagttggggaacacactaggaagactaacagccatagaggattgtggaggtgcctggttccagagggtaccatgagctgctggggaagagagcaggtgaaggcagggaagtagaggggagagaggggaagctgggtgctagggggaaactgctatgaccgggatgcctctggggtgctgggcctggttaagtgcttgtgcggccccagcaggtggaggggtgactggaggccagtgttttacagtagtgaaaataggtcataaaggcaacccacatgctggatgaagaagtagaaaaagcacttttaaggaaggtattttaacaactcagtgggaccatggaaagagtggcctcttattttgctttctggctttcacctggttattgaaaaaaagatagaagatggtctgtccatatgcaaaaatctgtaatcacccggctttgaagaccagggtcatcaggtctaagtagtatggcactcttggaaagagagtgctccaggaaagagaggattgcagggtgtggtggaggctggagtttgtatggtcagcatcgtctggtggagccctgcacagacccacgggtagcagatacgtcccacgaggctgtcctcctgcctctgctgatactctgctcttcctcattctgtcctcaagcccaaggctcggactggaataagtaaaccttataatgtcaagcagatcaaaaccaccaatgcccaggaggcagaagcagcaatccggtgtctcctggaagccagaggaggtaggtgctttcctgggggcaggggaaaaaccaattctccttttctttttatctccctgctaaaagtggtctagaaacgaaaataactctttttattcttctggaggcaatattaaatgaaaacatcctttagcaacattttatataaatctatactaagattgattgtccatttaaaattgtattttcaaaattctgtgtgtatataaaaatcatcccagggctattaagcggcgtctaaaggagagaccgaaaaaaaccaaaatgagtttttaaaaaaggtgaatgctgccggcatgaagtcattctgccagctttataaaacagagacagttatagtgtttgtcctaatttcaggcacaaaatctaccttttaaatcactggcaagtggaaataaagtttttagtgtcaggcagggacctctttcccaccacattattttttgttgctgttacttaaaccatgttagttaccttgggctctcccccacttcattcataatcactggtaatttacacttttagttttggccttggctttgttccagaatctcctagagaggagagtgtgcccttttcttcgtttttttttttgttttttttttttttttttttgagactgagtttcactctgtcagctggactggagtgcagtggctcaatcccaggtcactgcaacctccgcctcccaggttcgagcaaatatcctgcctcagccacctgagtagctgggactacaggcgcgcagccccatgatgagccaatttttgtattttcagtagaaatgtgatttcaccttgttggccaggctggtcttgaactcccaacctcaggtgattcatccaccttggcctcctaaagtgctgggattacaggtgtgagccaccacacctggccgagtgtgccctttaaaaaggtgtaagcaatcaccattgcttaatttgcttttagtcagcatgtttaacttctttggaattctcaaataatatttaagggggcatgagttaaaaggtcgagaactactgttgtagaatgatactgctacaaatgctttctttttttttattttagaaaaataactaaaactaggccgggcgcggtggctcacgcctgtaatcccagcactttgggaggccgaggcgggtggatcacgaggacaggaaatcgagaccatcctggctaacacggtgaaaccccgtctctactaaaaattcaaaaaattagccgggcgtgatggtgggtgactgtagtcccagctactcaggaggctgaggcaggagaatggctgagcccgggaggtggagctcgcagtgagccaagattgcaccactgcactccagcctgggtgacagagcaagactccgtctcaaaaaaagaaaaaagaaagaaagaaaaataactaaaactatggatataacaacccaagtgtccatcagctgataaatggataaacaaaatgtggtccatcaatacaatggaatattgttcagccattaaaaaaaaaaagaatggggctgggtgctgggtgcagtggctcacgcctgtaatcccagcgctttgggaggccgaggcaggcggatcacgaggttaggagatcgagaccatcctggctaacacagtgaaactccatctctactaaaaatacaaaaaaattagccgggcgtggtggcacgtgcctgttagtcccagttactcgggaggctgaggcagaagaatcatttgaactggggaggcagaggttgcagtgagccaagataacgccactgcactccagcctgggtgacagagctagactctgtctcataaaaaaaaaaaaaaaaaagaatgaagtgctgatacatactacttcatgggtggaccttgaagacattatactatgtgaaagaaagaaaaaaaggccacatagtgtaccatcccctttttatgaaatggccacagcaggcaaattcatggggtcagaaagttcttcttgctttccagggactggaaggaggcctgggtggggagtggctgctgtggggcttcttttttgtgtgatgaaaatgttctggagttagatcgtatgatggttgcacaactttgtggatacactaaaaaccaatgaatggtacacttagaaagggtgaatttcacggtatgtgaattatgtcacaataaagctgttaaaaaaaaaaaaactctagagatgtagatgttagtagaggtgtgaaatctacctacagtcccggcttaacactttcttggtcatggccccattgagattttgatgtctttggatcatctaccctgagaaatgtaagtacacatgagactttgcatatgatctcagggtctcactggtccccatccaaactatccacagaccccagatcaccacccctgctaggaaggtgagcatgaaaacctgggactgctgggtgcggtggctcacgcctgtaatcccagcactttgagaggctggggtgggaggactgcttgaatccaggagttcgagacaagtctgggcaacacaatgagaccctctctctacaaaaattttaaaattagctgggcgtggtggttcacaccagtagtcccagctacttgggaggctgaggtaagaagactgcatgagcccaggagttccagcaacatagtgagacctcatctctactaaaaattttaaaaattggctgggcgtggcagtgctcacccgtaatcccagctactcaggaggctgaaatgggagaattgctcgagcctgggaggttgagactgcagtgagccgtgatcatgccgctgcactccggcctgggtggcagagcgagagcccatcttaaaaaagaaaaaagaaaaaaagctgggactgaatctagctgattactcctgaaatacactgaattagtaaatgacacttaggatgtagactgtctaaggacgaaatcatgcagtgaattgccttgtcctttacacttcagccatgtggttttatgtttcaggtgcctccgaagaagccctaagtgccgtggccccaagggaccttgaagcatcctctgaaccagagcccacaccgggggcagccaaaccagagaccccacaggcgcccccactccttccccgtcggcccccacccagagttcctgccatcaagaagccaaccttgagaaggacaggaaaggtaaaagcctggtaacataaaacctcttactcctaagttgctcacatgtctcgatagataagaattgtggcctgtaatcccagcacattgggaagccgaggcaagcggattacgaggtcaggagttcaagaccagcctgaccaacatggtgtgaaaccccgtctctactaaaaatagaaaaattagccgggcgtggtggcgcacgcctgtaatcccagctactcaggaggctgaggcaggagaatcacttgaacccaggaggcagaggttgcagtgagccgaaatcgtgccactgcattccagcctgagcagcagagtgagactccacctcaaaaaaaaaaaaaacaaaaaaaaaaaaacagatttgcgtctcacagataaaaatctagttccctatggacatcctcacgttcatgagtcccagacacaggtgtgtctttggggaaagttttgacaactgcttcttccctcatatcctactgtgtcttggctctggctgagaagaacgaggagtccactgtctggcacattgtcagtgtgacaagaacagcttggaggtattatgcttcctaagtgttttgagtccccaaagggaaccatagtgggatgcttttccccacatgttctggtaccgcccatttgcgtgtggtctgtgttgtgtgcacatggtttcaaggcattaggaaaacagtaaccgattcccagattcgccatgttcacatgctctcgtgcggcctcagcctacgagaggttccacagcttttcttgccacttttcttgcagattgttttttgctctcgctctcaagcttctcagccttgcttactgcttcaaagacatgagtttgtaaggacagtagcagcccaaagactggcatctgtagacacatctggatcttccgtttgatctcagtgttctagtaacggaccctcggtaatcccttcctggtcatcacagcacgatgctgcttcccccctagagagtgtgaggggggcttcggcttcactcttgacagcgcttgctttgtatttcctgggttgctcttctgtcccacattggctcattgccatctgtcccttgtccatgcttccttacaaagtggacctttttcctccgcctcttccctgttcagatgctcctcgacttaaaatggggttacatcccaataaacccatcgtaagttgaaaaatagcgtgtcaaaactgcatctcatacacctaacctagcaaacgtcatggtctcgctgaccttgaacacactcagaacacatacattagcctacggctgggcaaaaaaaaaaaaaaaaaaaaaaaacacccatccaacacagcctattttataataataaaaataaaagatcaaacttcaaaattcaaagtatgctttctacggaacattagcgcttgtgcactagggtgaagtggaaaatcctcagtggaaccattgtaagtcggggaccacctgctttgtcttttcttgtaaaagccaggagcagaaatagattcattttcccaacctgctgcacaggagttaaagttaaaaggctgttggaaaagagactttcttttttcttagtttgttttctaaagaaccaaagaaacactgaaacgccaatgtttaactagtctactgatcaccttttctgaacaaaagcttcattttgcctgtgcagttgttttctttgtgatagatttgaaccagaaccaaggcagtgtcaaggtttccattctttaccaatatttaagtataaaagattcaaggagctgggcgcggtggctcacgcgtgtaatcccagcactttgggaggctgaggcgggtggatcacctgaggtcaggagttcaagaccagcctgaccaacatggtgaaaccccgtctctactacaaaatacaaaaattagccaggcatggtggcaggcgcctgcaatcccagctactcgggaggctgaagcaggagaatcgcttgaacctgggaggcggaggttacagtgagctgagattgcgccattgcactccagcctgggggacagggcgagactccttctcaaaaaaaaaaaaaaaattcaaggagaaagtatatccattagtccttcagttagcttatgttgtaacacaagttacttcaccctagcatgatacagaccatgaatcagcccaggttgcaacttcaaagagtgttttcagagaggtttgctttcaataaaggaagagcatcaccccatttcctaaaggacaaagaaaagtttgtctgattatttactgtggccctggttttaaattttccactcgttttcattggacctgctggtgtgacctgataaatgtgtgtttctcctgtgctttttctttttcttacctggtcacatttctggcaccccacacattctcaaatctcgaatttgctagaatgtcagcttggtctcatctctgttctctgctggccactctgttctctgatcctcagctgcctagttattggcttcttatttacactctttgtcccaccttttctcagcccctgtcaccggaagaacagtttgagcaacagactgtccattttacaatcgggcccccggagacaagcgttgaggcccctcctgtcgtgacagcccctcgagtccctcctgttcccaaaccaagaacatttcagcctgggaaagctgcagagaggccaagccacaggaagccagcatcagacgaagcccctcctggggcaggagcctctgtgccaccacctctggaggcgccgcctcttgtgcccaaggtacccccgaggaggaagaagtcagcccccgcagccttccacctgcaggtcctgcagagcaacagccagcttctccagggcctcacttacaatagcagtgacagcccctctgggcacccacctgccgcgggcaccgtcttcccacaaggggactttctcagcacttcatctgctacaagccccgacagcgatggcaccaaagcgatgaagccagaggcagccccacttcttggtgattatcaggaccccttctggaaccttcttcaccaccctaaactgttgaataacacttggctttctaagagctcagaccctttggactcaggaaccaggagccccaaaagagatcccatagacccagtgtcagctggcgcttcagctgccaaggcagagctgccaccagatcatgaacacaaaaccttaggtcactgggtgacaatcagtgaccaagaaaagaggacagcactgcaggtgtttgacccactggcaaaaacatgactgagcagctttgaaggctgcagtcctatagaatgcataccttcctccctctagacatccctccaccagaagagacatctatttaaaggcacactggccaaaacgtttgtgcatctgtcactctcgtgtagtttacaaaaatcgtgtctcttattcagtaagatggttactcagccaccaaaatatatttcactcaaggcttgtacatctgaagtttgctcttcaaggaatgggaaccttcctgttaaattcggtgtatggattttaagaaaggaatctagccaatgaggtccaagaagttctcacccattgaatttttaaatggctgttcagttcatgttgtacgtgatggagatttgtcttttgttttatttgcattttacagatttggtataacattttggggagccacctgaaggttgatgtataaagtaaggattagagaaagaggtcgttgtgaccattagtagctgtcctggcccacttaaacaaggttacaaaaaatcagagtcggaagcagccaaataggtcaacctaatgactagactgtacattcccatgagccttcatgtttaagtgtgtacatgtgcgttaaccttgatgatgcgtgaatcccgagggagccggtggcatacaccgttagcttaaccttagcttaaactagctgaaggctcctgtgccatgtcttagacattgcatgccctatcaattactataatcctgagccatggtgtgctactgaaaccaatttttatccaccatctagtccttattaaatgaaacctcacggatcctttgttccgcttatattccatgcataccacataaaagcacacagtgcgaaaactcttgctgatacgcgatattgattctcattgttagaatatggagagtgtttcagcctcgtctgtccggctggagcttcgggatggaaagtgctatgtgtccctgcatataagaatcaccaggccagtgtttctgggtttgcttgtctatatgtttgtctatattttttgcctatacatttttcccacgtttccaacagcacttctcacctattcaataactgaaaaagacattaccatagtgctttacatttttaaagtaatgttacaaggtctggaatccatttggagcagataccgtgttttcgctatttaataagaagttcagtagtgaaatcttactgtaccgcctgttgtatctgggagcctcgtacagaggctcgcacagcagtgatcaagtgtcatcccttacgtgactgggggatgtctgtcctaaaagctgactgctaggatagtaaggatcatcttgcctgggctatgccactgtcttgttaccaattagacatctggaatttcataattagttttcattgtcactgtcaagatatattgcagattacttaaatatggccatcaaaacaaaagttacaacacgtatctcttttcatctgaaaactaatacctggaaaaggataaaaaaaaaaaggaatccgtgacccacagagctagacagataagatgcatagttgaccagtcataaaaggcggtgtttaggtgatcaggatgccgttggtggcatttacgtgctttatatgatttttacctctgtaacaaacacaagaaataaacagaatggtccttaacagagtttgggggagagagcaagatgggttccttggagaagctgatttgccaagatgcacatcgctattaacagccagagtcataaatgaaatgaaattgaagaattcattcaaatgctcttttccctataacctcttttctcaccaaaaaggagataaatttgaaaacagataaatgtaacaaccagtcaaagaagcaggggaaaagtaagctcctccaaagttgcttgcagtgctggaaatagatctcatttttaggttttctcttcgttccagataccaaataaatgggacagagaataaaatttttgttaaaatatgtgctcatctcctaagtagctcttcagagtctgaccgtaagtaaaaacacacagaattgtgttgactgggggaggtgaatcacaaaaaagttacgaggagtttaagagttaaatattatttgatcgtggctgtcaaatttagtgaacaacatagattggatttggagttggtagtaggtatggttctcataccagaattctcttaaaaaaaaaaaaaaggacaattggaattgccttatttatttttaaaatcaatgcttactagttggtaggattcccaggtcagcagcagggttgattaaataatcttgacaatgagcagctgccatcttgggggatttcattctgtggttttttaaatgtttcgtctttgatgctaccatccagggcttcttattgtgaccttgtagcctattttgttcctgctgttctctaacatggtgcagttcacgcagactggtttaggtacttcacaactcaccattgtctctctgaccccaagcctagtcccttttacatcaccatcttctcagacttcttgcctattcttaaaatatgttttggttaatgattgaattaggacatcagcttaagcaattcctgtaacggtttaacgttgttgaagttcaaggcacataataaaattctccctgatgtgtgtgtaagtataaacaaagtaatgtatcaaagcgttcactttataatgaagtcatttcattgggaaggaaagctgcaaagattattgggggactagtgattaataaaatcctgtaatatttttgaagtgaaaatttgtactgaaattgtacatgatacctattaaatgtttttgtctttttttaaa

SEQ ID NO: 1276 - DNA, 10203 bp, Homo sapiens
caccggcgcaggttcgctttccggcggttgcaccgggccggggtgccagcgcccgccttcccgtttcctcccgttccgcagcgcgcccacggcctgtgaccccggcgaccgctccccagtgacgagagagcggggccgggcgctgctccggcctgacctgcgaagggacctcggtccagtcccctgttgcgccgcgcccccgtccgtccgtgcgcgggccagtcaggggccagtgtctcgagcggtcgaggtcgcagacctagaggcgccccacaggccggcccggggcgctgggagcgccggccgcgggccgggtggggatgcctctgcacgtgaagtggccgttccccgcggtgccgccgctcacctggaccctggccagcagcgtcgtcatgggcttggtgggcacctacagctgcttctggaccagtgagtgggcccaggccgaggcaggcccgcccgggtacccatgcccggccggaggtgggacttagggtgggggacgccgcggccccgacctagcgggcgagcccggagcgcctgacttctccttccccgccagagtacatgaaccacctgaccgtgcacaacagggaggtgctgtacgagctcatcgagaagcgaggcccggccacgcccctcatcaccgtgtccaatcaccagtcctgcatggacgaccctcatctctggggtacccgggccagtgtgctgggcagggggaggaaaggcgaggattcgggacgggcccagcctcgtcagaacaaaccccttctcgctgccttttcatggagccctggcactccggtttccgggcgttctgccccagggctgagacttggatttgtggctcctgcagcatccctgagggagcatgatttggagagggccttgggcatggagcaggaccaaggaacggccacagggcatatcttacagctcctttaacgtcaggcctccagaaccctctgttctctaaaccatccagggccccacagtcttgggaaaaatttgggggttggacataggatatcctgtgaggaagttctgggccagggactggaagcccagtgtcctggcttcaggtttgcccctggctgggcgtgtaccgttcagccctatttgggagcctggttgccacacctagaggttcctgctctgctgacttcacaggaagttgcttggctctggtaaccagatggccgggtggaggggtgcctggggcttccactcctgaacagagagcttaactgtcctagagttcatggggagccacctagccacactggagcccttcagagctcaccctggctgctgggtggagaaaggcctatagatgtcacaggtggatcctgggaggccaggaaggaggacttggagccatccactagcctagactgggctggttgcagtgacagtacagggagaagtatagaagaatgggcattgtccaagtatgttggggaggtaggcagtccaggtgcagtgattagtaagatgtggagggtgggggagagggaggagccagggagaactgaatgatctggcctaagggtctgaaagatgccactttgggctgtagggaaatggtagtgctgctgtccctcattccctgagatggggtgaaggaagggcactccctggggatatgggaagttggggcatgaagcctttcctgtcctctagggatcctgaaactccgccacatctggaacctgaagttgatgcgttggtgaggaggaatgggcccctcgaagtgggccgggccggccccacctgcctctgcccagatttgccctcctcctgctctgcccaggaggtggcgtccagcagtccaggcagggcatggggtggggccccgcaggccctcccctgtgcctcccttctgcatgctgatgctgggggcagggtggtggagcggggtgcagggggcaggactaattgcatctgtccctgcttaggacccctgcagctgcagacatctgcttcaccaaggagctacactcccacttcttcagcttgggcaagtgtgtgcctgtgtgccgaggtgagctgctcctccagcgagtgcagggaggcacttctggggcaggaaagctggtggccagtgtctctgttttggagggacctatgggggtaggcatcccgggagccaacatgaggcccagctccatcacatgccagcagaggggacagaggctgtgggaggagggatgggtccttggaaagtcctcaactctctgcaactgcccagggatcctgtggacctggagccttggcattagaattcaaggaggcattatccataaccccttctctcagggatgtcactaagagactcattgagaacagtgcgttgtcattggtccatggtggcagtagcatgtacctgcaggccagagggttttgcttctaggagaacaaacaggcttgtggggtgagaaccccaggggataggggccattttgatccctattctccagacagggaggatcacagagattaagctgctggcccaaggtcatggggtaggaggtggcaaagccaggatttgaatccagattgctccttcctctgcaggagcagaatttttccaagcagagaatgaggggaaaggtgttctagacacaggcaggcacatgccaggtgctggaaaaagaagagagaaaggtaagccaggcatagcggttcacacttgtcatcccagcactttgtgaggtcgaggtgagaggatcactcaagcccaggagtttgagaccagcctgggcaacatagtaagaccctgtctctttaaaaataaaaatattttaaacaaaagaaaggtagaaaatatgagttgtatgtagaatatgaaggttctagaataatcctattaagaattttggattctggctgggcgcggtggctcacgcctgtaatcccagcactttgggaggctgaggccagcggatcacgaggtcaggagatcgagaccatcctggctaacacggtgaaaccccgtctctactaaaaatacaaaaaattagctgggcatggtagtgggcgcctgtagtcccagctactcgggaggctgaggcaggagaatggcgtgaacccggaaggtggagcttgcagtgagccaagatcacgccactgcactccagcctgggtgacagagtgagactccgtctcaaaaaaaaaaaaaaaagtgccggccacggtggctcatgcctgtaatcccagcactctgggaggccgaggcgggcggatcacgaggtcaggaattcgagaccagcctaaccaacatggtgaaaccccgtctctactaaaaatacaaaaattagccgggcgtggtggtgtgtgcctgtaatctcagctacttgggagactgagacgggagcattgcttgaacccgggaggtggaggttgtggtgagctgagatcctgccattgcactccagcctgggcaataagagcgaaactccgtctggaaaaaaaaaaaaaaaaaaagaattttgaattagctggctgcattggtgcatgcctacagtcccagctcctcaggaggctgaggtgggaggatcacttgagccctcgattttctttttccttgagacaatgtctgtttctgttgtccaggctggagtgccgtggcgtgatgatggctcactgcagcttctgtttcctgggttcaagggatcctgtcacctcagcctcctgagcagctgggactaaggagtgtgcccagctaattcttttttttttttggtagagttggggtcttactacattgccagggctggtcttgaactcctagactcaagcgatcctcccgcctcagcctctcaaagtgctgggatcacaggcatgagccattgtgcccaacccagcccaggaatttgaggccagcctgagcaatatagtgagaccccaggtatagatagataggtagatagataggtaggtaggtaggtagatagatagataggtaggtgggtaggtaggtgggtagataggtaggtaggtacgtaggtagatagatagatagatacatacatacatagatagataagatagatagattgattagatagattagatagccaggtggggtggctcacgcctgtaatcccagtgctttgggaggctgaggtgggtggatcacctgaggtcaggagtttgagaccagcctggctaatgtggcgaaaccctgtctactaaaaatacaaaaattagctggatgtggtggcgcacgcctgtaatctcagctactcgggaggctggggtgggagaatcgcttgaacccaggaggtggaggttgcagtgagctgagatcatgccactgcactccagcctgggccacagagggagacctggtctcaaaaaaaaaaaaaaaaaaaaaaaagatttttgtatttgactgtgctctctcatccaggtggtgacatgcttgtatctgtggttaagaggtagcatctgccaggcgcggtggctcatgcctgtaatcccagtactttgcgaggccgaggcgggtggttcacctgaggtcaggagtttgagaccagcctgaccaacatggcgaaaccccgtctctactaaaaatataaaaattagccgaggctgggcgcggtggctcacgcctgtaatcccagcactttgggaggccgaggcgggtggatcacgaggtcaggagatcgagaccatcctggctaacaggatgaaaccccgtctctactaaaaacacaaaattagctgggcatggtggcaggtgcctgtagtcccagctactcgggaggctgaggcaggagaatggcacaaacccgggaggcggagcttgaggcaggagaatggcgtgaacccgggaggcagagcttgctatgagcagagatcgcgccactgcactccagcctgggtgacagagcgagactccgtctcaaaaaaaaaaaaaagagagagataccattccagttgcaatgtggctgcagcagggctaggtggacatgaggagcccagttcagggctgtcacagtagctccagcagcagatgattgtggctgggcctcccaagtgtcacgttggagaaccggagaaggggacttctttgggatgtactctggacttgttgatagattaagtgtaggtggggtgaggaagagaactcaaagatgacaccaggtgttggagctgagccacggggagaagggtgcaaagggaaagcagtgcgggggctgggaggggagagggtcagtcctgttttgcttgtgctgcatctgaggagcccctcacctgtggaaggagagcagtcccagaggcagtggggtgtgcagttctggaacttagaagaatgatcagggggctgggtgcagtggctcacgcctgtaatcccagcactttgggaggccgaggcgggcggatcaagaggtcaggagattgagaccatcctggctaacatggtgaaaccccgtctctactaaaaatataaaaaattagcagcgcatggtggcaggcacctgtagtcccagctattcaggaggctgaggcaggagagtggcgtgaacccgggagacggagcttgcagtgagctgagattgcgccactgcactccagcctgggcgacagagcgagactccgtctcaaaaaaaaaaaaaacaaaaaattatcaggaataaagatactgggaattcaaccacaaaaaccacaaagtcacgaatgcagagtgagagtcttcagagagagggcagaggcccaggatggcacagagggagagagaagccaccaagatggcagggagccatggccagagagaaaagcaaaccaggcgcctgtggcaccatggaagcagcaggtgatgctggagaagcgtttccatgcagtgacagctgccagagccagattattatggcctgagggctggtggtgctgcagttgggggggaatggagaccgcagcgggggaatggagaccgcaggggcggcaactcctcccagaggttcagtttggaggaaaaagagacagaaggaagggtaaccaaaggatattagaggtcaaggaggggtttattatttctagctggtcaaagtagaatgtggtaaaacccaataaagtaacagcaaataacaaagaggggcttttaatggaaagctgcagtgcctgcccctcacctccctagccccactcctcagaagcagccccctggagcggtttctctttctgctgcttttggaggctacttctgtctctgtaaaggaacttctgtctctgtaaaggaacaagcagaggccacagtgtcttggcaaatgaccgtggcattgtttatcccaacctgctctgagagatggggactctgctgattcacccctcgtccctgcctctttagttccttcagcaaagaactaataatatgtcattaaggcaaaggcagtatttggcacacttggcttctgtgttccaaaaaattccctttttctccaagcgtagattttaatatggtatttaagtatcaaagtgatttgacacaagtgacacaagtgagcagtagtagcatttgcaaaagctacaaatgatgaagtcttgctccaaaagcatattattattattttttaaattccagtttcaagctcaatggataggttgcgtcagtgggttttagtagagaaggggccagtacctatgaagactcccctgtactattacacatgctgcgtcccaagtagggaaactccagtgggtcatcaccccctccctctagcccaagtgggctgctgggtcagggcactgtttgggttgggttgagattcctggatccctaactagcaccttccaaagaatcggccttgcagagaacaaagttcattgccaaaggtattcccaatgtctgtctctcgctctgtgatagggcttctttactccccactttataagatgaggatatctgctataccccattccttcaacctctccacctctttcctcttttgtctgccatgtgattacttttccatcaccaaggttgatgagatccttactgtgtacttactgtctccaagcatccccaggcttccagccagcacgcagcagccaacattggcttcagaaggaaggaggtttgcatttccttctcttgggtccagtgccatggtctcagggttatctccaatgtggaaagttgctagaccaggagcagtttgactccactgtttttcagtctagcaagtttgagtttttcccaagctcttgatgtgtgttcaaatgaatgttctccctttcccaagagacctccctataagggagggtctagtttcccggggtgccctgagaagaaggggtcagcaggggggaggaatggtggaggctgaggcctcaggcaggtgccctgtgaggagtggctgtgacaagcggctgagatcccagcaaagggttgttgcccagaatctggggcctaagcgaggttggaaatcacaaatgcacttggtttctctagcagctggcacatagtaggatcagcccaggagtggcaccttcaaagagaaaggaacgcatgaggctccgagagcggtcggctggcagccagggcctggctggggagggagggcaggtggtgcgctgacctggggatctttgagagtgtgcaggagtatgtggctgaagcggcccagctggtgagccactgaagatgggggtcataggtagatggaggaattgccaggtcagaatctcggtaggagatgacttgagctgatgctgcctggcacataggggtttagaagatattaggaaggaagccccacagcgtgcccaagtgccatgcaggccctggagacggtcattggagggcgtctgtggatggcgcagtgggggatgggaagtccctaatctgctggggctttcccagcaagcagggactgagggggatagtccccaacacatgggccccagggagaagggcctgtttcattgaggtttggagagtgttgagggtaagctaacctgtcaccccacgcccccgagaatggttactgatagggagaggccttttccttgcaggagatggcgtctaccagaaggggatggacttcattttggagaagctcaaccatggggactgggtgcatatcttcccagaaggtcagcagggctgactgggtcgagcccccccagtatgagcgggatgggctcccaagcctcgcctctgtgctctctcaccagggaaagtgaacatgagttccgaattcctgcgtttcaagtggggtaagggctgctggtctctggccacagccatcctcccggcccagagatggccctgtgggcccctggctcccgccccctcgggctggcttgtatgggggtagatgggcgtgtttgtagcgccaggaaggggacaggtgctgagactaggcctgcctctcgcaggggcttgcccaagggagctgaattgaactggaggatgtcgggggtggcagtggccagaggctggcacagaagcttggctcagggcccagcttatgctaacatttctacctcccccctgggcaggaatcgggcgcctgattgctgagtgtcatctcaaccccatcatcctgcccctgtggcatgtcggtgagcctggggacggggacagagagatggcatctggggtggggggcctgggactccctctggtcccaggctgccctgctccaccccacgtctggccttctgtccactgtgctgcaggaatgaatgacgtccttcctaacagtccgccctacttcccccgctttggacaggtgggtggggactgctgaccttcggctgtctgcctgtctgctgtctgctccgtgtctcccactcagcactatggaggccagctgcaggaggagctgagcatgaggctacagcaggggacagagtggaacatagacagggacttcctggcaccgagacattaaaatgagagcagaggaagtcaggctggggcagaggtgggctgtggggtcaggacaggacaggtcatctacagcacaggacccaggaccaggaccttgttttagaggaagagtggcccctggggagtgtgtggcacagcagggccggggcttagcttctggctcccgggttgcttgggctggggctgtgggcactcctactgctcctcatcactcttggcggccaccccacagaaaatcactgtgctgatcgggaagcccttcagtgccctgcctgtactcgagcggctccgggcggagaacaagtcggctgtgagtttcctcctgggtcccccgtagctgtccccggaccccctgctgctggcttccagcagggtgcctccaccctctccatcccgtcaccctcccagggcaccctcccagggcaccttggccaagcttcccgaggggtgcaggccatccctggtcctttccctcaggtggagatgcggaaagccctgacggacttcattcaagaggaattccagcatctgaagactcaggcagagcagctccacaaccacctccagcctgggagataggccttgcttgctgccttctggattcttggcccgcacagagctggggctgagggatggactgatgcttttagctcaaacgtggcttttagacagatttgttcatagaccctctcaagtgccctctccgagctggtaggcattccagctcctccgtgcttcctcagttacacaaaggacctcagctgcttctcccacttggccaagcagggaggaagaagcttaggcagggctctctttccttcttgccttcagatgttctctcccaggggctggcttcaggagggagcatagaaggcaggtgagcaaccagttggctaggggagcagggggcccaccagagctgtggagaggggaccctaagactcctcggcctggctcctacccaccgcccttgccgaaccaggagctgctcactacctcctcagggatggccgttggccacgtcttccttctgcctgagcttcccccccaccacaggccctttcctcaggcaaggtctggcctcaggtgggccgcaggcgggaaaagcagcccttggccagaagtcaagcccagccacgtggagcctagagtgagggcctgaggtctggctgcttgcccccatgctggcgccaacaacttctccatcctttctgcctctcaacatcacttgaatcctagggcctgggttttcatgtttttgaaacagaaccataaagcatatgtgttggcttgttgtaaaa

SEQ ID NO: 1277 - DNA, 11255 bp, Homo sapiens
ccaggccccgcccctcgagcgccacaacagccgggccccaccccttgaggtgctttaacggccaggccccgccctgaaggcgttgtaacaaccaggctccgcccccaggcgctctaacggccaggcccagccgcttgaggctccccaacggccaggccgcgcccccgcgtgcgtgcgcggcccggcagagccgtgcgggcgcccgcgtactcactagctgaggtggcagtggttccaccaacatggagctctcgcagatgtcggagctcatggggctgtcggtgttgcttgggctgctggccctgatggcgacggcggcggtagcgcgggggtggctgcgcgcgggggaggagaggagcggccggcccgcctgtaagtggggccgggtcgggtgggggcggcccgcggtgtcccggctcccggcctcctcgtggtccgacctgcggtttgggcccgcggctggtggggcccggcgactccatgggcctcagtttctcctctggtaacgtgagcttcgcttccagagacggggacccgccttgccgggttaggcgcacctcctggggcgggactggctccaacctgggccccttactgcggctttctctgtggccgaggccaggccgtccccggggtggccaggagagcaccgtaaactcttcagcctgctccgtggccgcgatctcggaaaaagcaccaattctgtgatgtgcagcagcatttactgggcatctatgaccctgtgataggctttggggtctttttctgtaaggagtccagtaaaggagaagtacatctgtattatgaacacctaaatatgtaagtgaaaaacacggtgaaataagtttcactgaggccaggcgaagtggctcacgcctgtattcccagcactttgggaggccgaggcagggagatcgcttgagcccaggagtttgggaccagcctgagcaacatagcaagaccccatctctacgcaaaattagctgggtgtggttgtgcacgcccctgtagtcccagctccatgggaggccgaggcaggagggtgtcgtgagtccaggaattcaaggctgcagtgagttgtgatagatcgcgccactgtacttcagcctgggtgacggcaagagcctgtctctgaaaagtttcatagaagaggttagtactagaaatgggaaacaccagagagtcagtgggcagccctgctctttttatttatttttcagacagagtttcgctcttcttgcccaggctggagtgcagtggcacaatcttggctcgttgcaacttccgcctgccaggttcaagcgattcttctgcctctgcctcccgagtagctgggactacaggcacacaccaccacgcctggctaatttttgtatatttagtagacggggtttcgccacgttggtcaggctggtctcgaacgcctgatctcaggtgatccactcgtcctggcctccaaaagtgctgagattacaggcgtgaaccactgtgcccggccagccctgcattttttttttttttttttttgcagggggacggagttttgctctgtcgcccaatctggagtctagtggcgggatctcggctcactgcaagctccgcctctgggttcacgccattctcctgcctcagcctcctgagtagctgggactacaggcgtccgacaccacacccggctaattttttgtattttttgagtagagacggggtttcactgtgttagccaggatggtctcaatctcctaacctcttgtgatccacctgcctcggcctcccaaagtgctgggattacaggcgtgagccaccctgcctggccgagtcctgttcttttatgggggaggtggttgttagggaaatcattactgagaatagggggcacatgaggtagtgtggggtctcaaaggatggttctagaagaagagtttgccagaaggccaaggaaaaaagacattcctgccaatggcaatacccgagaaggcaaggagtccccaaacagcatttggtatgacttaagtgtgaggaggggggcttgttagacatgcctggagagaaggaagcagaggacagattgtggctgtgtttgtttgcagggcccaggagcttttttcctgttggaattggggagcatctgcagtcatttaccacatgccagctttgtgactcaattaagtatcttttacaaaagtgactggctccactcccccgcacaggactcaacagatgttgacttctcatccccgagttctttcaggtactggagtgcagtggtgcgatcttggcttactgcaacctctacctcctgggttcaagtgattctcctgcctcagcctcctgagtagctgggattacaggcgcctgccaccacgcccggctaatttttgtatttttagtagagacggggtttcaccatgttggccagactggtggaactcctgggcatcaagatgatccagctgccgggccgggcatggtgactcacgcctgtaatcccagcactttgggaggccgaagcgggcaggtcacaaggtcaggagatcgagactgaggcaacagagcgagactctgtatcaaacaaaaaaaaaaaatgatccagcagctgcctcagcctcccaaagcgctgggattacaggcatgagccaccgcacccggcctccatagagcctttaatgcttgtgttcggtacttttgcttgtcactttgtagatatctcatccaattcaatctcccttatttttatttatttatttatttatttattttgagacagaatctcactctgtcgcctaggctggaatacagtggcacgatcactgcatttgaactcctgggctcaagcaattttccctcctcagcctccgaatagctgggaccacaggcgcacaccaccatgcccagctaattaaagttttctgtagagatggggtgtcactatgttacccaggctggtctcgaactcctgagctcaagcaatcctcccatctcagcctaccaaaatgctgggatcacaggcatgagccaccgcccccagttctcaacctctctttaagaaaaccaaggctgggccggacacagtggctcacgcctataatcccagcactttgggaggccaaggcaggcagatcacttgaggtgaggagttggagacaagcctggcccacatggtgaaaccccatctctactaaaaaaacaaaaaaattggggccaggtgccatggctcacgcctgtaatcctagcactttgggaggccgaggcgggtggatcacaaggtcaggagattgagaccattctggctaatgtggtgaaaccccacatctactaaaaatacaaaaaaaaattagccgggcatggtggcgggcgcctgtagtcccagctacttgggaggctgaggcaggagaatggcgtgaacccgggaggcagagcttgcagtgagctgagatcacgccactgcactccagcctgggtgacagagcgagactccatctgaaaaaaaaaaaaaaaattagctggatatggtggtgcacgcccatgatcccagctacttggaaggctgaggcacaagaattgcttgaacctgggaggcagaggctacagtgagcggagatcacgccactgcactccagcctgggcgacagagcaagactctgtctccaaaaaaaagaaagaaagaaaagaaaaaaaaaaccaaggtccagagcaattcactaacttacccaaagcagggccgctagagatggttgtgcacattactccctacatagggatgtctggccaaggatccacactccactggccgtgctgtgtacccgcccagcagcatcacccaacccagagagtgcgccttttccactctacatgaaggtgctctgtggacttactgtaaacagcctcctcagtagtcagtcagtagtagagacagaatccaaacccaggtctgattccaaagcctctgttttgtttctgttttctgtttgtttttttttgagacagggtcttgctctgtcactcaggatggaatgcagtagtgttgtgatcatagcttactgcagcctcgaactcctgggctcaaatgatccaaagcattgggattacaggcatgagccaccatacccagccagccaaagcctctgtttttgcccatatcacactcattctcctccagaagacaagggccatatctggttaatctcctgctgttccactcaatgcctggctcatcataggtgggcagtaaatgcttatcagtgagtaactggagaacaacatggcccttccttataggccaaaaagcaaatggatttccacctgacaaatcttcgggatccaagaagcagaaacaatatcagcggattcggaaggagaagcctcaacaacacaacttcacccaccgcctcctggctgcagctctgaaggtacgtggggtacctggcacagcgtgcaccctgagactcagccccacaggcttttcctctggagtattccatgcatgttacaggctctcctgcctctgatcagaatcagcgggggtgcttaattctgtcccctctcatcgcagcccaatctcagcttgctgttaatccaggccacagggccccatctccccggctccaggtttggcttccccatctcccccaggagctcctattgacacttcctgccacccttcccctagagccacagcgggaacatatcttgcatggactttagcagcaatggcaaatacctggctacctgtgcagatgatcgcaccatccgcatctggagcaccaaggacttcctgcagcgagagcaccgcagcatgagagccaacgtggagctggaccacgccaccctggtgcgcttcagccctgactgcaggtgggacaagacggagcctcaggtttgcctgcagaggcctagtcccaggctttggccttcccatatctgctttgaggtagtgaggagggacctggacccagggcctcccttggggtgccagaaagagcatccacatagtttgcgcgctgcctggggctccctggagatctgggctgctatacagcaaggaaacagggggaggtctcttcctacctggaaataccttggcctggcttccagatgagccttagtttctaaaccctagagagaaactaaaggagccaaagctatcagaatcttaccttttgaggagttttatgagatttggaaccaggggcttaagttttaaggctagactgtggggcatgaggagagatcttgacttccccgagaacccagcacaggacctggaacacagagcctctttgtccagtgagagcgtgacttgtctgctgcctgtctctagagccttcatcgtctggctggccaacggggacaccctccgtgtcttcaagatgaccaagcgggaggatgggggctacaccttcacagccaccccagaggacttccctaaaaagcacaaggcgcctgtcatcgacattggcattgctaacacaggtaagaggcattcagagggtggcgcctgcccaaagcatgaaggaaagatccagttctatttcctcaatgagttaatgctgcctgaaagttctgctcaacctgagaggaacaaggggtccctggctctgaacagcctggctctgtgctcccctggagtccctgggccacaccaggtccctagggaaggtggggaagggccacagtcttcagcagagtccttatctgtagtgacccttggcctgggaggagacatgtatacttcgggcagcagaggccttgtaagtgtctttggagagtgacagttggtcaggtcactgcccgtgacccacatcactcccttcccgctcagggaagtttatcatgactgcctccagtgacaccactgtcctcatctggagcctgaagggtcaagtgctgtctaccatcaacaccaaccagatgaacaacacacacgctgctgtatctccctgtggcaggtgggcaaggaggggtattggcgtctgggaccacgagaggctggggctggggagcaggcacagaacagagagccagcttcatcgcgtgggaagagcatacggggtggggtcaggaacccgagcttcaagtctcagctctccccacttgcagtagtgggatttcatgcaggtcgccccatgtccttagtcgctatttcttcatcttcagtgtttttgttttttagaaaattagtctcactctgtcacccaggctggagcacagtggtgcgatcatagctcactgcagcctcaaactcctgggttgtagctattctcccagctcagcctcctgagtagtcaggactataggcatgtgccactgtactcagctaatttttgttttttgtttgtttgtttgttgagacggtttcaccctcgcccaggcaggagtgcagtggcgcaatcacagctcactgtagccttgacttcccaggctcagaccatcctcccaccttagcctcccgagtagctgggactacaggcgtgcactaccacacctggctaatttttgtattttttgttgagatggggtcttactatgttgcccaggctggtcctgaactcctggcctcaagtgatcctcttgcctcgacctcccaaagtggtagaattacaggcgtgagccactgtgccaagccacctttgggcggggatgttacatatcttagaacaaggctagaagataaactgaggtcacatacataaaagaacttttttgttgtggttgtttgtttgttttttgagatggagtttcgctcttgttgcttaggttggagtgcaatggcaggatcttggctcaccacaacctccgtctcccgggttcaagcgattctcctgcctcagcctcccccaagtagctgggattacaggcatgcaccaccatgcccagctaattttttatttttagtagaggtgaggtttctccatgttggtcaggctggtctcaaactgtcggaccttaggtgagctgcccgcctgggcctcccaaagtgctgggattacaggtatgagccaccacacccggcctttttttttttttttttctgagacagtctcactctgttgcccaggctggagtgcagtggtgcaatctcaatctcagctcactgcaacctccacctaccaggttcaagtgattctcccacctcagccttcccagtaggtgggactacaggcatgcgccaccacgcctggctaattttgtatttttagtagagatgaggtttcaccatgttggccaggctggtctcgaactcctgacctcaggtgatccacccacctcggcctcccaaagtgctgggatgacaggcgtgagccaccgcgcccggccaaaataactctttaaaggtttatattatccagatatgaggattatcaactttctcaggaaagagattgaggggttttacaggaacaacatgctccgaaaatgaagttttaaaggcttctgggttgtatggcagatttgtagcctcgtgtggcttcaccccagatgtgaaggtttgggaagtctgctttggaaagaagggggagttccaggaggtggtgcgagccttcgaactaaagggccactccgcggctgtgcactcgtttgctttctccaacgactcacggaggtgagtgaatccgctctgatgtctgaccagtggctcttggcccctcttgacaaccagggtccttctgtctgtttgtgccatggctctgaagagggtggggtgcctggccctcggcaggaagctgacttagcttcctagctggagctgctcaagttgggccagtgcttaccctgccagggtgtgttggggcttgagctgtgattttctgtgttgcaggatggcttctgtctccaaggatggtacatggaaactgtgggacacagatgtggaatacaagaagaagcaggacccctacttgctgaagacaggccgctttgaagaggcggcgggtgccgcgccgtgccgcctggccctctcccccaacgcccaggtcttggccttggccagtggcagtagtattcatctctacaatacccggcggggcgagaaggaggagtgctttgagcgggtccatggcgagtgtatcgccaacttgtcctttgacatcactggccgctttctggcctcctgtggggaccgggcggtgcggctgtttcacaacactcctggccaccgagccatggtggaggagatgcagggccacctgaagcgggcctccaacgagagcacccgccagaggctgcagcagcagctgacccaggcccaagagaccctgaagagcctgggtgccctgaagaagtgactctgggagggcccggcgcagaggattgaggaggagggatctggcctcctcatggcactgctgccatctttcctcccaggtggaagcctttcagaaggagtctcctggttttcttactggtggccctgcttcttcccattgaaactactcttgtctacttaggtctctctcttcttgctggctgtgactcctccctgactagtggccaaggtgcttttcttcctcccaggcccagtgggtggaatctgtccccacctggcactgaggagaatggtagagaggagaggagagagagagagaatgtgatttttggccttgtggcagcacatcctcacacccaaagaagtttgtaaatgttccagaacaacctagagaacacctgagtactaagcagcagttttgcaaggatgggagactgggatagcttcccatcacagaactgtgttccatcaaaaagacactaagggatttccttctgggcctcagttctatttgtaagatggagaataatcctctctgtgaactccttgcaaagatgatatgaggctaagagaatatcaagtccccaggtctggaagaaaagtagaaaagagtagtactattgtccaatgtcatgaaagtggtaaaagtgggaaccagtgtgctttgaaaccaaattagaaacacattccttgggaaggcaaagttttctgggacttgatcatacattttatatggttgggacttctctcttcgggagatgatatcttgtttaaggagacctcttttcagttcatcaagttcatcagatatttgagtgcccactctgtgcccaaataaatatgagctggggattaaatacgaataagacatggtttctgccatcaaagatggctggtgggagagagagatacacccttattaagtgctttgtgttagtttattcatagctattgttatatatgtcaaggcaagagaggaccagagcaggacagaggcaatgggtattgaagttgaaggggtacatttgataagagagtcggtattgagaagtttaaatttgtgaatttgaaggctgcgtgggtgtggcaggtaagggaaatgaggtatctgggaaggcttgagtgtaggcaaatttattcatcccaagtcaaactcttgatctctctcacgaaaactatgaccccccctggttgcccctgacctctcaatgttggaacaagccacaaccgtggagttatccttgatgactccccattcattatcccttctgtcccaccaccacagctgtcatctgttcaccagaacgttcttttggttacactccatgtgacatcctgaggctgttgcttctctccagcttttctgttaccatcctggtcctggctactgtcacctagtgggccactataatatggcttcctaatggatcttcctgcttcctctgttgcctcattacttttctatatagcagaatgatcttttgaaaatgtgaaccagatcacattattccctagttaaaaccccccaaggcttcccatcacacttggaataaaatccaaaagaatttttctaaaccaaaaatagtaaaaacaattttttttttctgacaatctcttgtcacccaggctggagtacaatggcgcaatctcggctcactgcaaccgccgcctcctaggttcaagcgattctcctgcctcagcctccagagtagctgggattacaggcatgtgccaccacgcctggctaatttttgtatttttagtagagacagggtttcacgatgttggccaggctgctctcgaactcctgacctcaaatgatccaccaccccccttggcctccccaagtgctgggattacaggtgtgagccatcgtgcctagctaaaaacacttaatccaaaattcttaccatggcctgcaaggtcctgtgtaacctggcttcgtcccccctctaaatgctatgaatgtcagatgggcaccgtaaatgtgtgaagggtcagttacctgggtgtaaggcagtagaaggtggggacagaagtgagctggagggcgggcttgtgtcctgcctgcaggatggggggtggctgctacttattcaggaatccagcagaaattgcttcacagaagctagaagtgagcaacttaaataactaaacactatctggaccaaacaaaacactaaggtcggcccgatgcagtccactactctcttattggcagcttctggctcactgttgaacccactggaatgagagcaccaccgggcagactcctggaccatcccactgtcagctctgtggtccaggcacagtacctgggacagtgtaagcactcaatgtgaaactcaagccaggggcaagccacagacctcccagtatcttctccgcgcatcttcccactcccagtctccattgtggttttgtatgttcctaaccacagacttttggcaatgctgtgcacacaaggcctgaggagtatttccttggcaattgtcagaagaatgagactaaaacacttcctttgcgcacctgttcttagaagcagctctggcattactcccgttgtgtatccaggacaggaagtggcagtagaatgttgagttactgaagtcagatgtcttcagttccagttccagctggagagcagatagtaggtccgttgacctctctgagcttgtttcctcagctgcaaaataagaatgaatcctgtgctacccaccttgccatgttgtgtttcagtgagacgagaaaacactaccaaaaagtcattccacagacttctgaggacagaaagtgccctcactcaagcttctcttgtaaccacagagaaggtgtctggatattaacatagagcagaggccaccaaggtttttcttttttttaatcaaaaatcctgcatgtgaaggcagtaattgtatcttaatattataatttcaacatctgtgggtgtgaaatttttcaaaaaaaaaatttggggaaatattttaaa

SEQ ID NO: 1278 - DNA, 84030 bp, Homo sapiens
gaggtgattcccaagccgcggggcggctccggtggtgcggggaaaccgaaagtgggcggcggccgcggcggggcccctggcggagacggcggcaggagctgggcccagagacgcggggacgggccgtgggcccccggaacgaggtgagtgcaggtcctgcgggctccgggcgcgacaggtgccgggcgacgtcggacgagatttcgggcgggcgcggcgcacctgggtcaccggtgggaccgcggccagggccgggggctccaacaggctcggggccttttccctgcagccgcaggggattgcccccgccccgacgcctgggaaccgggctgggcgccgggggagttggagttccagagcgttgtgttttaaatctctgaagggaccctgctccgggccgggcgttcacgcgggagtcggacggagcctcctgccgcctcggaagctctgcgccgtgggggaaatgcagcagcggggtgtggacgcgggcgggagatgcggaccaggaagtggttcccgctaccggcgcgacaggccgcagccgccgcccccagcgagggatgtccgcgctcccctatttgaacccaagtattttacaccacgaacttctcttgaaggtctctataatctggagacgagccccaggcaggccgcttaagtaatgcaggacacacatccccatttctctcaaacgaggagcacccagtgggtacagagcacccagctgggagggaaacatggatccgtgagtaagttgtctctcaactttcagtagcatcccctcagcagggtcagactctcagcttcagcttgctaggagggagcttggagccggcatatctttctgctcccattcacttgagaggtatatttccattaatagctaaaggtaccattctcaaataatttctaagagcagggaagggaaacaaccacattagaacaagtcctggcccagaagaattctgatcaccgcccatccaaaccaaaccaaaccaaaaaaccacagatctagttcattaaccctcctaccaacacctctctgctctccaatcgtgccggtgaaaaaaatgcagagaaatgttctctctagagagataggcaacagcttaatagcagaagtaaaacttggacccaaatccctgtctcgtcctgggctgccttgatgtgtatgaatgtgttgcatactgcaaataatgtgaactttgcagacctggattgaaatctgggcttctcattttacaaattgtgtgatcttgaacaaattacatgctttctcttagcctggttttctatgtgtcaaatagaggtacctggcttactttgcaaggcttttccaagataaccactgtatatcctttgcctcataataattgccaagcagtattcactctcttcctcccaacaaacggtccatgttttacataattggattttagttttttgagggcagggacacaaagatctttgtgtttactatataatataaatgggcacatggtggatatttttgcatttcctctcagctgacattcattgagcatcagttacgtgcaaagtactgttctgggtatagggaattgcccctggggccagctggattagcactcacatctcctgtgccccaatccagggccctttggtggcacacagcctccgtctttggtagttgcacggtgagactgtgaggcagcagttggcagtgccttcagatttcagtctctgtagattgaaaatgaagtgtaatcccctgctaatgcccttttaagtgtacaggttgaacatggctgaatgaactattgtattgtgcatcaagagattttaaactccttgcagaacccctcttttaagttctctgtgcaatataatctagctggatacttaatgtgaatataaagaaaaaatataatccaaccccgagtgcctaatttgtgtttgtcaagtgctgttttcaagaattgagatttgacatagagtgctttgcatctggacactttcacagaagttccttggtgaaattttatatttacgtgaactgttgtttctttgtgccaaacctgctttttcctccctccactcccacctctgtacttttgaaagcttcattcttgtcattatttccctgtaagccaaatatgtttacagttttgtctttcaaactaaaagtaattaattttgcaatttttagttgaagacatgtatatatgccaatcagaacttgatcagtgcaagctacccagtgtgacttcaaagtaagcttggcattttagcctgtgcagctttgtcatgagtaagcaaactcggttttcattacatatttggaccttatttcagccttcagtgaatccaaggaaagttgagaatcatggctcttgcccacctttcttatcttccttgtgaaaaaaagagacctgaagtgacttgtcacaggtaatcagtagcggaactaggattaagacacaaactccttactaagccactttattatctcagggttttttcgtctagtatgtagacttatggaaatcccttacttacgtacattcgtggtatgcagttaaaatgcacgaataatttggaacttgagatcacaagaataaaaaagataactccctgaaaaaaactcttaaggaagtataccatcatctgagggtattaatcatctttttcctttaaaaaccggttggtgaaggagtaattgaagtggtaacagactatgattagaaagaaaagagcatttaaaagtgtcgcaaggtgagaaatcatttattgggtaaagatcttaggaaaaaattttccctctgaggctcagtttattgatttgtaagataaggagcttgggttagcctagacgatgcctaaaatgtgtcagcacagacattatgggactttaagttcccgctgttgctaaaatagtgtcttcaaggagaagggcagttagttattagaagtatatgccctaaagagatatccagatacttcaaaattgaacatctaactaaaagaagctaagagagattacttggtgttttcagtttaccctaataattcttctgatttgttttaagatttagtgccactcgacaacttaaactgatgacatgaaaaatgtagtaaggaagatgagccaaatcatacagttggaaatagttgagcaagaagaaacttagaaaagagaaggcataggatggaagccagactagctcagctaaaggcctttgacaccagtagttagaggaagcagataacatgcaaatgactgagccagggaggatcaatcaatggtagaaggcgtttatctgggatacaccaaaaccaggttcttcagaataggacttccttgggccattttcaggtatagtaaagagaaaagctgtgaatttacaaaatgcagttttgaagtagagtgagaattattttaggccacttaaattatttaaattttgtttccctaaagattgtcatcactccccaactccccaccccacctcatgtgcattattagtgtcttggataattaagattaactgggtataagcgaagaaaaaaaggaaagcacgaaagcataaaaaagatagtctcagctactcaggaggctgaggcgggagaatcacttgaacccggcaggcggaggttgcagtgagccaagattgcgccactgcactccagttgaaattcctatgatatactttcttttatgcttctaatggatgatgtctaagatattaaactttatttttatagttagaacaaagtattcttatataccttgagagtataattgccatcttccgaaagtttcaaaaaaaagtcatcatgagccacgtaacaaaactcagagcatttccaaagtgatatagtttagaaaataatgacgattttttttaaagcttacactttctttttcgttcactgcctgaagtgatgttgctaatgtgggaattgaaatcagactggcaagtcgtgcatttgaatacaatcacatttagccttccaggttttactgcatttaactgcttctcaccagcttggagacccacagtcttatactccaagggattccccttcccttcaaaaagttgtttgcaaatagagagttatagtcctccatgaaagatagcatactttaaaaaggcaggcagggggagggaacttaatttacagattgcaaccatgtggtcaagcgttgattctcagtctcctcaagtatgaggccattttttgtagctttagaaaaatttcgtgaaacctcatacactagtagttgtgcttgcagtatccattggtcaattaaacatataactaccaaaagctgttgtgaatttaatatcagtttgtgtttatggatcccaataatatctgcacactctgaaaaacaggactataagtacatgtgagacatttactaatattcaagccgtgcctgctgcttgtcaggatgtgtgggctccttgcaatcatgctgcggccctgacagggcctaatctggctcagagtggacatgctcagaaataatctacttgatgattctcaaccacagtttggtgttgcgattggctgtctcattcagtttataagaattgttaacatttgcagataattttttagtaacttaaattggattcagagttatgcctttaatagctcacctatgttatgctgtattttagtgagtaggagagaaaaggagtggtaggtggatggagaatttcttattcattcaacaaatatttattgagctctcggtgggctaggcactagggattcagcaatgaacaaaacagacacaaatccttgctttcatggagcttgcattgaagttggggagaaagataaaaccattaaatggagaagaatattggatggtgataagtgctaaggagaaaatcagggaagctggcatctcagttttgattttgaatagggtggccagagaaggccttactgtggaggtgacagttgagcacgtactttagctgaaggaggtaaggctgtgagccacatgtgcccctggagtcaatatgtcccaggtagagagaatggcaagtacaaaagccctgttgtgaggccatctcaggcatgttcaaggaaaagcatggagcccaggatgggtgaatgaaaataaagagaagagagaacttagggcaaagaagtgggggttgcaggttatgcagggccctttttggctctgtaaggacttggctttttgtctgagttaacacaggaagcattagagggttttgagtgacgtgatataatagtatatattatatgaaaagatcactcaggctgatatgtggagaacagattctaggaggtgaagtggaagcagagagaccagctaagagcccagctgctctgctccaggaaagagatgttgctgacacggactaggacaactgccatggaagtggtgaagagtgaaggaattgtagacatccgccttccatctttatgtatcacattgcttgggggaggattgagaactaatactgacctcactcatcttacagataaagagaatgagatccaggagaaggggcttatcccaggaaaatgagtgagcagtggcattaaacttgcggaacacaagtaaaaggaggctcaggcataatcttctgcaatcccctgcccttcccccaaaaccaaatcaaaatatatcaatggccaggtgttagcaactttactattgaaatattttaaagtagattttaactgtgataatatgtgcattaaaaagggggtgaaaggccaggcacggtggctcacacctgtaatcccagcactttgggaggccaaggcaggtggatcgtgaggtcaggagttcaagaccagcctggccaacatggtgaaaccccgtccctactaaaaatacaaaaagtagccaggcatggtgatgggtgcctggaatcccagctattcaagaggctgaggcaggagaattgcttcaacctaggaggcagaggttgcagtgagcggagatcacgccactgccctccagcctgggtgacagagcaagactctatctgggggaaaaataaagggggagtgaaagtaggaagtatgtgtgtggcataagcttttctcaggtcagattgagaaatataacttagaaaaaacagtctgacaatgccaagaaatcaaggtgggtaaatgtgaggttggatagggtgggaaaagtgaaaaataaggatgagcacttctgtgccgtgcagattcacactggtattttatttaattttcttccaagagtctcggggcaaaggatagaacaattaggatggaggtcacgagacatctgctatataaaggagaagacacatttaaagagggtgggactagagaagcaagcattaggcaaagcttcgtacctcactctgctctggccgttaaacaggtcatgggtggggacaagaggaagactctacctgaatgccgctccttaaaaaaaaaaattgtgaagtgccctttttgggagatccctgcttgcagctgtttcagagcagaaataaggaagatagaagggacatttcaggggcagtggtctaaaatggttctcccaagggtggaaggagtggaaggctttcgcagagggcaacctgtagaacaagcctctgattagactctaagacagggctggacctgtcctttcaaacctgaatcacagtgttctgttaggttttagtaacaggacacccattagtaaaatgcatttatccgacattttttccccataaattaatggttgctgtccactcctaatgtagctgagaaaagtagaccacagaggggaggtggcagtggagcagatgctctttccaaaatgaagggaaggagaataccatggaaactctattcttaaggcaaagggtaaggccttcttactgaaactctggcaggggaatataaagtagtctggccagggaggagtcagatatattgaacagtctaatttgagtcgtttacactggtcacacccagatggatattttccctggatgtgtgctaaccacctgacattatatctatatgtaatgcgtatgtagctgatagccaaggcccacttaggcatacggatatacaaagatgcaaagcccagtttcactcagaagagctctagatgaactgatgggagggattgggttttgaagggaagaagagcacatagatggggaaggtggagatcagaaatggatagtcagggtggattggcactgaggagtaagcaagtgatgctttagtatgtcctcttgcaaattaaaacttggccagtctccactgttgcttttactacttgtggaaataactgtatagtagttcagtgatctttgactcatgagtcatgaaccattgttaaactattttccgtgtcatcagtttactattcaggacccaaaattcatacttcagcattgacatctggcaaccgtgaagtataggtcccaaagctgtcctctttcctgctccctggcattcattcagagtgtggacttcagaggtagtggaggtgtgcagactctgcagttctctgtctctgccatgaatttctattgagtatctccagctgttccattgtcttggaatccacaccagccctgtgactaagtggagtcagctgtggatttcacaccactgtttttttcttttttactctgcttaccctttctttcctgtcttgtctcctgttcttaattcttcagggtttgctgggtgtttttcccagtaccagtagacagggtgatataatgggaaaagtgtggcctttggcatcaaacagacctggattgaaatcctagcttatctacatcccgcgatatcttaagtatttaacttatctgaaccttggttttcacatctataagttgaggataatagcctcccagcattattatagatactagatttttagaaaagccatttctcagaatttacataagagaaataaaaacatgtgcctacctaaatacttgtacatgaatgatcaaggcaactttatttataatatctcaaaattggatgcaacccaaatgtgtatcaacatttgaattgataaacaaattgtagtatacccatacagtggaatactactcatcaataaaaaggaatgaactgagttaaatgcagtaacatagatggaacacaaagcactaggcaaaaataatccatagtgacagaaagcagattggtagttgccaggagccagggcagtgtgtgtatgaaccagagagggctgaccacagagaagcatagcttaaaagaacttttttttggggggggcgggtgggggagggtgtggtggttaaagatatgctgtacatgcagtaaaaatccctctttatagccaatcacctccccttacccccagcccttggcaaccactgatctaatttctgtgtctgtagtttcgccttttccagaatgttcacataaatagaatcatgtatgtagccttttgtgtccagctttttcctttagcataatataagagtcatgcatgttttatgtatcaacagattgttcctttctattactgaatagtattccactgtatggcgctactagtttggtttatctacttaccttttgatagacattttgattgtttccagtttggggggcaattataaataatgctgttatatacacacacacgtttctgtgtggacatatgtcatcatttctcttgggcaataatgtaggagaggactgctgggttatataagtgtatactttactttgtaagaaattgtcaaactggccggggcagtggcttatgtctgtaatcccagcattttggaaggccagggcgggtggatcacctgaggtcaggagttcaaggccagcctgaccaatatggtgaaaccccatatctaccaaaaatacaaaaaaattagctgggcgaggtggtgtgtgcctgtagtcccagcaactcgggaggctgagacaggagaattgcttgaacctgggtggcagaggttgcagtgagccgagatcgggctactgcactccagcctgggccacagagctggactctgtctcaaaaaaaaaaaaaaaaagaaattgtcaaactatttttcaaggtactattttgcatgcccaccagaaatgtatgagagttctaaatgctctgctttctcatcagcacttcgtattgtcagttttttaaaaaattaagctgctctaatagatgtgtagtgatacttcattgtgaatttaatttgcatttccctaatgactaatgctgttgagcatcttttcatgtgtttttttgccatcttcatttttactttagtgacatatgtattcaggtgttttgcacattttaaattgggatctttgttttattattgagttttgagtattgtttatatatgactaccaactttaccacgtctgttatgaaaatatcttctcacaatctgtggcttttcatttttgaacagcttttggaagagcagacattttaaattttgatgagatccaatttgtcaatttcttctttttttctttttgagacaggttctcactctgtcgcaccatgacggctcactgcagcctctcaggtagctgggactacaggcacgtgcgactatgcccagcttttgtgtgtgtgtgtgtgtgtgtgtgtgtgtgtgtgtgtgtgtgtgtgaagacggagtctcactatgttgcccaggcgagtctcgaactcctgagctcaggtgacccatgtgccttggtctcccaaagtgctgaaattacagacgtgaaccaccgtgcccagccaattttttcttctatggttctcaaaagtctttgcctaacccaaggccacaaagatttactcctgtgtattttttagaagttttatactattagccttttcatttaggacctaaattatttattttgagttaattttttgtatatataatatgaagttcattatttgcatatgaatgaccagttttactagcactgttcattgaactttcttcattgaatttccttagcatctttgttaaaaatcagtttactaggccggaggtggctcacacctgtaatcccagcactttgggaggctgaagtgggtggatcacttgaggtcaggagtttgagaccagcctagccaacatggcaaaaccctgtctctactaaaaatacaaaaaaattagccaggcatggtggcacatgcctgtaatcccagccaacttgggaggctgaggcacaagaatcacctgaacccaggaggcagaggttacagtgagccaagattgtgccactgcactccagcctgggcaacagatcaagaccctgtctcaaaaaaaaaaatcagtttaccatatatgggtttatttctggattacatattctgttccattgatctatatgattgttcttttgataatattatactattttgactaatatagctttatagtaaatcttgaaatcagccttattgcactggctaggacctccactgtgataatgaatgggagtgctgagcatgggcattcttgccctgttcccagtcttagggagacagcactcactctttagctgtgagtaatgatgttaactgtgggttttttcacagatggtctttatcaggttaaggacttcccattttattctaatattctgagagttttttatcataaatacattttttattttgtcagctgtctttttttcacctattgatatgattgtgttgtttaatttcctttaatctgttgatgtagtaagttatattgattgacttaatgaatattgaaccatacctgcattcctggaataaactttaactggttattatgtcttatccttttcactaattgttggattttatttgctaatgttttgttaagaatttttgcatttatgttcatgagggatatggtctgtacttttcatgcagtgtctttgtatagtttttgtatcagcataatgcttgcctcataaaatgagttcagaaatgttctcttccctctgttttctgggagaatctgtaagagtagtattgattcttctataaatgtttggtagaatttgccagtaaagcaatccgggcttcaggttttctttgtgtgaagatttttaactgtaaattcaaattctctaatagctatagggatatttgagggttatttatttcttcttgagtaagctttgacatttgtgtctttcaataaatttatctatttcatctaagctacaaacttactggcataactgttttatcatgttctctttttaatgtctgtaggatctgtattgatggcccctctttcaatcacattatggtaatttgtgccttcttttttttttttctatgtttctaggagtttatcaattttattgatggtttgaaaactagttttagtttcatgattcttttctctcctatttttaaacttcattattgatctgtttcatcatttcagaattgatttctgctctcacctttatttcctttcttctgcttacttttgatataaatttctctttttgttctcaaagtaggagaatagatcattgatttgccacttttcttctttctaacagaaacataatgctataaattttcctctaatacttttaccgcatccagcaaaattttacatttgtgtcttcatttatttaaaaatatttttctaattttggaggtagcctttctctttgacccttggttatttagaagtatcttgttaaatttgcatggagattgttcacatatctttgtgttagtgatacctaatgtaattttgttctattcacagaatatactttttataatatgagttattttaagttgtttgaatatcattttaagtccaagaatatattttattttggtgaacatctcatgtgctcttgaaaagaatgtatattctgctgtctttggagtggagtgttctgtcaatatcattaggtcactttggttgatagtgtttagatcttttatattcttttttttttttttttttttttttgagatggagtcactctgttgtttaggctggagttcagtggcatgattttggctcactgcaacctccaccgcctgagttcaagcaattatcctgcctcagcctcctgagtagctgggattacaggcacgaaccaccacgtccgactgagtttttgtattttttagtagaggtagggtttcaccacattggccagactgatcttgaactcccaacctcagatgaaccgcccacctcggcctcccaaagtgctgggattacaggtgtgagccaccacacccggccagctctcttattttcttactgattttatttttttgatctactggttctatctattgacgagaaaggagttttgaagtgtccaacgataattgtgaaattgtgaataagttttttcagctatcagattttgtgtgtttggaagctctgatgtttggtgcacctatgcttaggattgttttatctttctgatgaattagccccttaatcattatgtaatgtctctctttatctctgataagattccttgttctgatatttatacagtcatagtgtttgcatggtacatcttttttctttttacttttaacctatgcattcatatttaaagtgggtttcttgaaggtggtatataagtaagtcttgcttttttatccactctgccaacccctaatgttttatagggctatttcagttatttacagttaatgtaattattgatatgattggctttaaacctgccattttgctggatgttttctattttctctacccttttttttctcctttttcctgtctaattttttttaacttctgcttgcataggtattgtcttattacattttacctttactactggcatattattatacctttttaaaaaattttagtggttgccatatggtttacaatatccctctttatcatagtcagctttcaaatgacactacagcgcctcatgtgtagtgtaagaaccttccattggttctattcttcgtactacctttgtacattttacttttacatatattatgtaccccacatgagggaatttttttggatgatgggaatgtctgtatcttgattgtggtatgattacataggtgtgtatattttttaaaactcaagaagtgctacatataaaatgagttaattttattttgggtaaactttccctaaaggaagattttgatatttagtcttgtgccaataacaatgttttggtcaacaatggactgcataatcatttgtcctgtaagattataatactgtatttttctataccttatctatgctcagatatgtttagacatacagtacttaccattgtgttaaaattgcctacagtattcagtatagtagcatgctgtacaggtgtgtagcctgggagcaataggttataccatatagcctaggtgtgtactaggctataccatctaggtttgcaagtccactcaataatgtttacacaataactaaattgcctaacgacacatttctcagaatgtatccccattgttaagtgacgcatgactatacacacaaacacacacacacacacatctgtgaaaagaataagaatacagacctagtatagggcttttgtaggttatagtattaattaaatgttgttggtcctggtgataataatttgaaaagagttaatgtttagtaatggaaggtacataatgcatgcagtcgtacattgcctaacgacagggatatgttctgagaaatgcattgttaggcagtttcattgctgtgcaaacattatagagtggactcacaaacctagacagtagaacctaccacacaactgagctatgtggtatatagcctgttgttcccaggcttcaaccctgttcagcatgttactgtactgaatgctattaacattcagataaagagggatactgcaaccattaacacaatggtaagtattcgtgtatctaaacgtagaaaagatacagtaaaaatatggtatataaaacaaaaaatggcatacctatataggtcacttgccatgaatggagctggcaggactggaagttactctggatgagtcagtgagtgaatggtgaatgaatgtgaaggcctaggacattactgtacactactgtagacttataaacactgtacacttaggcgacactaaatttattaaaagttttcatttcttttacttttcatttatttttatttttttgacacaagtctcattctgtcacccaggctggagtgcagtggtgctccattgcagctttgacctcctgggctcaatgatcctcccaccacagcctcctgagtagctgggactatagacatatgctgccacatccagctaatttttctattttttgtagagatggggtttcgccatgttgcccaggctggtctcaaactcctgggctcaagtgattctgcccaccttggcctcccaaagcattaggactgcaggtgcgagccactgcatctggcctcttttactttttaaactttttaaattaaaaactaagacaaaaacacacacattagccttggcctatacaaggccaggattatcaagatattactaggctataggaatttttcagctccattatgattttacagaacctcttttatatatgcagtccgttgttgactaaaacactgttaagtggcacatgactatgtagatttttgtttgctattgaaaccttgctgtaacttcaatattatgtttataattaatagcaggacaaacaggctgatattttgttttctttttaagatggacgaatgatggaattgatagaattgtatgtcattcttcttttgtgttttctaagccagagaaagaaaatggctatttgtctagaattctccgctgtccagtatggtagccagtggccacatttaatttaaggtaaaattttagttcctcagtcatcctggccatattttaagtgctcagagccatatgtggacattgtggacattgcaataatataaaacatcacagaaagttctattgaacatcactgttgaaggaaaagtaacaaattgcccatggtttgccttcctctttcctttaataaaagggtaagccattttttccaggctacttattctctgaatgtatctcctagtatgtatctatacattctctgaatgtatctcctgaatttgtctttttttttctctgcaaaactacaactagatgtaatcattagtccaaaggaaatgattctttcctccttttattcatatggcattatgactctgcttctttttcttccatctctctagtccctttttcttagccttttataggttcgtcttcctctatccatttcttgaatggtagccttctgcagaggtccatctgtaaccttgttttttactccctggatgtcaagtaccccatataagtcaaagaccaacaaatctgtgaccagcttagacttctaacctaatttcctagtgaatatatctgcatggctgttctataagcattccaacttctccgtgtccaaaatgaattggcctcttcctctcttgcaaacctgcctttatcccacctcaatgtgggtcattactctctaccttacttctaagctggaaacattggagcccacctcttcatccaaaccaattaatcaattcctgctgattccacctcctaattacctctcaaattgatttttttatttattcctaaggccctgtattgtggtcctccacatttccaagtattctgaaaacttgttaatctttctccttcccatttatcttctccattgctgagtagtgatctttctaaaatacagagctgatcatttttttcccctatttaaaatatccctaaggcccccgttacttttggcaaaaatgcaaacatgagcataatatagtagtctcagggtctgcccctccctggccctctgagccctcagcttggagtctttgttcagtcacgtccagccacctaactgtctggaatttttggaacacaccatgtgcttctctctcacctctgtgcactcgcacatcctgttcccttccttgggctgataccactcccagccccacagcccaccctcttcctccttgttaggtgattccatcttgctcttcaggactccattcaggcttccccgcctgaatctgggaacattccctgatatattccctcttcaggctggtcttgtgccttctgactttcccctgcattcttatggtatttgtgcttttctctaccgtggcagttgtttccccatattgtaattgcacagaaagtatgcagtaataatttataaagtaacaagtttcagctctgaaaatctatttgaattcacaaacgaatgagccatattatagtaaccttctactgtgttcttataggcaaagatgctggaaggagatctggtttcaaagatgctacgagctgttctgcagtctcataagaatggagtagcattaccccggctccaaggagagtacagatccttgactggagactggatccccttcaaacagctaggtttccctacactagaagcctatctgagaagtgtgccagcagtggtcaggatagagactagtagatctggagaggtaagaaggtaattgtgcgtgtcagaagaatcaaaccaattcataattgcctctctggcacttccaatctcctacctgtgatagacgtctaagtgaaagtactagcttagttgtttgggattggtagtgacagagaaaacagcatgtaaagcacagcctacattcttatgtctttttcttattcctcaaattcttttcattgtaaaaataagattttaaccacacaaaattaaaaatatttacccaatgtcaacatctaaacaaaatagttgtactggaggccttaagtgcataaatatcacacctgcctattacagacctgttacaaatgtttttgccaaagtcactaatgaccttgtgatcaccaaatctaatagacagttttaaattctcatcaagtcaattcctgctatctggacctagtcagtccagagctgatccttcatcacttttcataactaccggggcctccttgctgttgtgtcttctcttctgttcttttcctctccttcacaccaatatgatcatatcattataccgttttaaatccttctgcctctctggaagaacacagtttatagatagtataggccatttagtggtagccggttgatctgtcattgctcttccactgcgacctagcagcttcacttcttggtacctacccattgtacagcataatagatatggacagaccaccaaccaaaagagaaacaaaaacacccacaccccctcatacactatggtttcctgggtatgtttctacatgtgtaaatatgtggatcaggtctggagtgtttctcaccaaaacctgacatagtggtttttctatatggggggatgaggaggcagtggtggaggaggacaagggaaccaggagcaggaaagtagtcaaaggggaagttcaccttgtagttaataattttcctaaggagaagatataaattaattaaatgttatatgaataataaaatatgctttggcatccctgatcgttccagacagacttaagccctcctttctgtctacttgcaccttgtaatacatccgttatcacacttgacacaatgttttctgtttaatttcttgcttctctctttttcctccataagtttattaaggatgaagggcttaataaatctgtgttgaatgcatgaatgaatgaatagctgaatgaattaataaattaatgctttatagagttactatactgtaatttactcaactctttgttcccctgttttggacattttaaatgtttccaggttttgactattaaaatacccccgttgctcatacttgggtaggtaacatttgtttttttaaattatgttcttgtaatatagtctcagaaatagaaatactgggccaaagagtaggaacatattttagcttgtgacataaagcctcattgttttcctgtttttgatttcaaattagagtcaaagacttgaaaactacacaggtctgtagagagcatcttgtcccagtagtctctatcttcaaatcttttttcgatatcatatcataccaattttttctttaaagatacagagctgagctacagtgttttgagagatgtggaagctccggagaccctgcttgccctgccttgctctcatgcccctgccagtagcagccccttgaggcctctccatagaactctatggctcccatgaacacagtttgaaaacaccaggtctaaaccacccctgttttacagctgagaatacttagatttgcccagagtcacccagcagatccatcacagaggcaagagaaggatttagtagtcttgtattcaacatagtagttatgagtacatactttggactcaaagagcctcgccatgtgacttggaaggttgcttaactttcccgagcctctgcattcccatgtgtaaagtgtgaatgaaatgtacctcacagattatatgatattatacatcagatcataggttgctttttgttcatttggtaatctcatagtatctagtacactgtagatgcttaatacctatttaaaaataaatggaattttcagtttaggaaagataattcaatgtactagactatgccagattcctcttgcagaaaatataattttcttctagcattatcaaggagcgagacacatgaatatttgcataccacttgacttgggatatgtaggctcactaagatccacttttaagaactggcctctaggcaacacggaatctgagaaatgtttctcctcttaccctgcctctaatgaatagattacctgctatgccatggcctgcacagaaactgcaagaattgctcagcttgtggctcgtcaaaggagttctaaaaggaaaaccgggcgtcaagttaattgtcagatgagagtgaagaaaaccatgccattttttctagaaggtaggagctttttacatgctaaaatttttagggctgtctacgaatacattatcatagggaattatggaaatattgtttgtattatgataaatacttgtatctgttaacatacatatgtcaggggaaagatcctgaagctagcatttccatttgaaattcttaagtgaatgcgctgagcatgacttactaagtgaagtaattacacagtgggaaataactcagaacagattttaattgagcttgttacggtagtgtgtagttttattttttttaagctcatttcagggaatgtcttgtccagaatgttggctgcaccaagaacctatgattttatgtcttatttgacaaattatgtcttctggtagaaaacctctagtttcagaaatatatgaattatgtagtacagagaaatgttatagacaactcagcctttgtttaccgaacacttatctcaaggatcttacaatcagttctaaaactaaattcccatgaagtggttcaatgataatacaaagcagtagatgactaaatgccacagagagcatttaggacaagggagcaatcattttgaatgaaaaaggcaaaggggagacttgaccccagaccgcaaacaatgggtagaatttggatttatggggaagagacgggaggaccaagatatagctgagtgtgctgtatttgcaagaacatgaggtggctgccactgaagtgttcagttggtgagaagcaggagttactggccagtctgatggatgaagaaccttatctgccaaatactcaccaatctattctttccctgttgaccagccctccagtggcaacctcctcgtgttcttacaaactgttctgagaatagacacccacagaaaacatctggtcaggggagtgtcataatgaaagtggggtttggggatgctaattgatttcgttatgtatgcctaacttcataggaaaaccaaaagcaaccctcagacaaccaggatttgcttcaaatttttctgttggcaaaaaacctaatccagcaccgttaagagacaaaggaaactctgttggagttaagcctgatgctgaaatgtctccttatatgctacacacaactcttggaaatgaagcattcaaagacattccagtgcaaaggcatgtgaccatgtccaccaacaacaggtatttggcctctgactcacagaagtttggtgaatctagggtaaaaagtgttacaaatgtatgttcaggttaagaaagaaacactttctattttatctaagttcacatatagtagagacatgcatcattaccagttaagttcacttctagctgcctgaacatcattctctaagtgcatctctattctatattttctctgtattgtcaatctctccttgtaaagttcatttaaaagctctcacaaattgttttgagatactgtttcagtataacttataactttttcagaaaacctttttttaacgattttgtgggtttaagtaaaatctgatggagtttcagacactccactgtgctgcaaatatcatgcccatgattatgtagtagcatcagacatccatgcatcagaataccagactggcaataataagacaacctataagtctttgtttgggtgctgccattcactagtcaggtaaattaagttgtttcatcttttgggtctgtggtttgttcatttgtccaaagaaaatgttaaacgagatgatctcaaagttcctttctggttcaaaactatggttttataaggtagctcagagggtggcaaactacaatcgatggactacatcaagcccacagcctgttttggtaaattaagttttattagaacatggccattttgctttgtttgcatatgcctctgggtgcttttgcaaaatagtggcagaagtgagtagttgtacagagactagatggcctacaaagccaaaaatccactggtggaccctttacagaaaaaggttgctgacccctgatgtagatgcatcaagatcacattcttctgtcctacttgtgccttttcaaaacaaattttgttgtattatattcctttaaatcagtgttcaaaaattctgttttgtgaaagataatttccccccaggaactttcccccagatactagaatatttatgaagaattaattttttaaaaaagttaggtagagttggtactaattttttatattacagaatttttaataaagtaaccctaaatatttttataatggtatacatttaatattatttataattattataatttttataaggtctagaaaatacatagttaaaacacagatcttgacccaaagtgctagttgaatccagtatgtgacagaggtattctctggttgtgtgcctacatttcagcaatacattttgaatgatttttttggatgtgaccctaaaaggacgggcaacaaaagcaaaaatagacaaatgggattacatcaagctaaaaagcttctgcaccaccgaggaaacagtcaacagagtgaaaagacaagctatggaatgggagaaaatattgcaaaccatatacctgataagggcttaatattcaaaatatagagaactcaactcaatagcaagaaaacaacctaattttaaaaacgagcaaaggacctgaacagacatttctcaatagaagacatacaaatgatcaacaagtatatggaaaaatgctcaacatcacaaatcattagggaaatgcaaattaaaaccacaatgagataccacttcccacccagtagtatgtagtatggctactatcaaaacgcagaaaataacaagtgctggtaaggatgtggagaaaaggggaaccccaatacactgctgggggaaatgtaggttagtacagctattatggaaaacggtatggagatttctcaaaaacttaaaaagaactgtcagcaatcccactactaggtatatattcaaaggctatgaaatccgtatatcagttgaagaggtatctgcacgcccatgttcattgcagcagcattcacaatagccaaggcatggaatcaactgaagtgtccattaatgaatgaatggataaagaatatgcgttgtatctactgaatggaatacttactcttcagcctttataaaggaggaaatcctgtcatttgcaacaacatggatgaacctgggagacattatgttaagtgaaataagctgggcatagaaagaaacaccacattatcttatatgtggaatctaaaaaagtcaaactcatagaaacagtaaaatggcagttaccaaaggcagggacgtggggttaggatgggggttgtggacgtacacaatttcagttaggagaaataggttcaatacatctgttgtatttcatggtgactatagttaatgatatattgtgtacttgcaaattgctaagagtagattttaagtgttcttaccacaaaaaataagcatgtgaagtaatgcatgtgttaagcagcttgatttagccattccacagtgtacacgtatcaaaatatcacatcatattgcataccataaatatatacaattttttcttgtcaactaaaagcatgcaactataatagggcccagcagttgcgctcctggacatttatctcagagaaatgaaaacttatgttaacacaaaaacctgtccacttatgttcactataactttatttatattagccaaaaaatagaaacaacccagacatcctttggtaagtgaatggttcaacaaactgtacacagaatatgtctccacagtaaaaaggagtaatgaactattgatacacagagcaactctgatggatctcaagggaatcatgctgagtgaaagaagccaatctcaaaaagcgacatactgtgtgattttatttatataacattcttgaaattataaaattataaagatagataacagattagtggttgccagaggttaaggatttgggtgatttgagggatgggtatggctataaagagagagcaagaggaacccttgtagccatgggacagttctgtatgttgattgtactggtgggcacgtgaatctgtacgtgtggtaaattgcacagaactacacacacacatccatatgcaactggaaatctgaataagctctgaattgtactattgccaatattctggttttgatatgtactatgcaagattttactattaggggaaacagtgaaggacacatgggacctctaagtacactttttgaaatttcccatgaatttataggtatttcagaataaaaagttttcaaattgacagcaggccaggcaccatggctcatgcctgtaattccaacactttaggaggctgacgcaggaggatctcttgagaccaggagtacaagaacagcctgggcaacatggtgagacctcatctctactaaaaaaaaaaaaaaaaaaattacctggacatggtggtgtgcacctgtagtctcagctgcttgagagattgaggtgggaagatcacttgagcctgagagttccagggtacagtgagttataatcacaccactgcactcaagcctgggtgacagggtaagaccctcttaaaaaaaaaaagctacatattttaattaaagactgcttgagatgttgtaaaacattttaatcaagtctttttttaagcacatagtatttgaaagatatcttttaagagaaatctaaatactacccagtggcagatgttatgggtaacatttctagttataaaatcaaaatatcaaaatggaacaatagcagaaacatctatatctacttatgaaatattaatgtagtaaaaagcagttaaacctgttatgaaggacacttaaactttttgaggtcaccaaacctcttgaaaagctgatgaaagctgtaaatgatcttcccagaaaaattcacacatgtacatttacatatgcatacataatctcgtgccagtcagtagattcatgaacccccaaagctcattctcaagagttccggttaagaactcatgcctgcctgttaacaaattgaaaagttctagaaaaatggcatggctagtttcctgtagaataaattagtagagataaaatgtgtggggaagagggtatatgtactaaggctcctattaaattgttctctaaacagattataataatttgttttcttctagaagaatatgagagtgattattttcttgtatgcctgccaatattgggcatctgttttttgctttgctactttgaaaagtgaaaaaaatctatttatgttttaatttttatttccctgattttgattcttaagggagttacatttttgtcatatattttttagcccattataggtcttatgtgaattacatgtctttgtcctttacataatttttctattggctcttttccttctaacatataaaagtggtttataaattaaataagttggccctttgtaatatcttgacagtattccctcagtttgtttaattattgtattttttgtatacaaaaactttaaaatgttgcatgcttatagctatcgatcttttactatgtgacttctgcttttaggtattatgtttagaaaagcatttccactcaatattatgtaatatgtcttctgttttcttttgtaattgttgtggcttcattttttacattttagtctttaattcatccagaatttattttattttatagtgtgagagttggaatccttttttattgttagccagatgtcctgtatcagtcattacacaatcctttctttctctgctggtttgtaattctatctttaccagtactaaagccttataaacatatggttcagttcctgggctttccattcagaataattgattacctccctattctgcagtaccaggctattcacattattataacttcataataagtgctaataacctttactctctacttcctcctctatctcctaatttggtttattagttccattgtgtgcttttattatacctactgcccttatcataacacttagtagactttgttcttagattttgtcaatgcattaattatctattgctgtgttacagattaccccaaagttattagcttacaacaagacacattttcttacctcatagtttctgtgggtcaggaaggaagacacggtcaagctgggtcctctgcttcagggtctctcatgaggctgctgtcaaggtgtcagccatggctgggatcttatctgaaggctcagttaaagataaatctgctttcagtcctactcacatggttattggcacagtgtacttccttctgagttgttcattagtccctaggtggctattggccaaaggccatcttcagtttcttgccacatggttcttcccaacatggccatttgcttcatcaaagcaacaaaggagagattatactagcaaagttgaaattagaatcttctgtaatctagttatttgtgatcccttcagccttgaagtcttctattgattagaagcaggttactcaaggggaagggattacacaaggctgtgaatacctggagggaagaatctttggggttatctcagcagctacttaccacggtccgtttctcaactataccgtgtagtcccagagaatagggcatgtttatcttgctgatcattgacagttactgtctgacataatgtctggcacatagtatgtcttaaatatttatgagctataaatatgtctctaataaacaacatatgtttagatttggaaggtttttttctggaccagtctaactctttgtcttttaagagacaatatattttattcttagtgttataaaactgcttagacctctgtcatcttattttattatgtctgtttttcatgcatcctagcagttttctttgaagagctttcttttgctatatacacttttttctttcctctccagtagacctcttgatgactgaaccataacagtcccttccatagtttctgtgtactcactctttgctcatatccctctaccttctactggagccttcgatgcttgtttaaagcaggggaagcttccagtttacatgttttgggctggtgtgcgggaaggagtactatctccctaccagttctgcaaaataggagttggatatatttttggcatcttctgctattacacagatatattaatatagaaataggatgatcttataattgcatataccaaataagtttttattggtagcctagaacctaatcatttcttttagaattaaaattttataagaaaatgtgcttcatttcaaggaattgatctaatttttagactgttccatactattcaaaaactggcagctatgtgtaccatgtcactatcactcactatagtcccgtacccactgctgggcaggttgtagtcatttattcattcggtcatgattcattcagtcattcttacaatattcatttgccttgcatgtatcaagctctgccccaggcacttgggaacacaaacaattaagacacttagagtctagtgtgggaaacagacatgaatataaatgatgtgtgtggggtttatttatgtgtcttcatatttggaaaaatcttcctacatatatccagtataatttatataaaatttatttttagtgagggtatgaggtagggatctatttctttttttcaaatagttatttgaccagtccctcacctgtctgttttgaaatgccactttcattatgtaccaagatataatgcaaattgcatgtttctaagttctctaccattttacctgtctgtacaactcatttaagtgttgtaacttcataatgcatttcaacatctggtgatgcaagtccttcattttttggttatattccaaaatgttctttgtttccaactgtttatttttgcatggtcttctttattctgttttaccagtttcttataagtgattaattggaattctgacatccaagttttgaaagaggctttcaaagacctagtttaaatttagcttttaacatacttttctctgagtgaatatgaaacatgaaagatgatgccaggttttatttttattttttctgattttaaattattttaatgacttgttttgctgttaaatgccactgagactttaaatgaaaagtgtagtgtttaaaacttggtatagactttgttatttacatttattttactttttttttttttaatatcttaggtttagcccaaaggcgtcccttcaaccacctttgcagatgcatctctcaagaacctctactaaggaaatgagtggtatgttttccaaacatttttgagatacatattggcttccggagtcaagaaacatatctggtggtggcttttgacatttgctctcaccttctcctgtttggaatatatccttcctcccctttttcctaattgctttgcatcatgaatcaaagtgatcttaagagaaaatggtgcctcccaaagatatcattatctaaacactgacttgaggccttcctcaccccagccctactctgtgtcacctctatgtgtggcctgcagagatgcttgtgtcccttactctctcacctcttagggggtgcacccctgagacttcagaggctgaggcctcacataaaggaaacatctgctgtggattaaaagtgcataaatatgggacttaaatttataaaagagtttcagatactccaccacttaaaagctagcaccctaaactgtgtacagttaccactaatcatctaaatatgaatataaataattctttgggtaatagaatccaagtgggctgttaggaaaacaataggagacatagtataagtcaaagaatctgaaggttagaaatgcaaccacttgttatcttttcttctccaaccaatgtgtaaatcccctgctcatagacccacccagggagacagtgttttcgtatcagtgcttatagtgtgtgaaatgtaaatgtgattttacattatttgctgctttaagtgtgattcttacttagttgaaatgcttttttttttataagaacacatctccagtatttcttaatggaaattaattgaacaatatgatttttgtttacatgaattacttttacataggcattttctgaaacatgactacatggcaaagttgaatatccttttagaagcttaaattagtataaactacttctacagaaacaagaggacttatttcaggaggattgcagttcacctggcagagctgataggcacacatgtgtacacaacctctcctacatgatggacacctccattactactttaatttgtttaacaaaaggtgcagggacttagatggccccagtggccccacagagcaagtgcatttgcagacacagctgtcggtcagctgctgacacattctcattatgggaaggtctggccagttatgagaaacttaatcttttcctccttcccagtccttttatatcattatttgggaagaacttaaataaattagctatacccttaataggaaatatatgtggatatcctggagccttctcttctctgtgccaatctaagacttagcaaggccagatcctgccctttgatggaagagcagagtcagcgtccaagtgtcctcaaggaatagctcactctgggcttcctggcattctcagaggcagcatccccaaatcagactgtctctacctgcaaattaaaaattactgaatcccagcagagatactatctgcttaaaatatgcatatattttgcatatagatggtaatatttaatatactcagatctgtatctcagtgaaatttcgtagagatttggaataaatttcatagttcttaaaattccaggactgtcagctatagtaaacactcagatttctttattttctggggatattaactctcacattctaagttttaagtaaaaacgaaatgcaaaatagctataaagccaaaactttataaatacacacttatgaaagataaatgattgatattggggaaataaaagttatctgtgggttccaaaccttttatgtttataaactgaggctaggatgatgatgattatagatggatcaattttttaacttttgtgtgttgctaaattatttgttttccattaataaaggtgaaaattgatcataatattcaaactcaggcaattttttatcttctacaaaactagtataagatcaaaaagttatttgatctgttaaggaattattcctatgttctgtggaatatagctttaaattcagtattgtctgtaaactaatatataaaatgcaatcttcctcagcaggtagaaaacggttggttaaataatttaattattctttatgtagcaagatcatcttgatgtttaaactatgaagcatccttgcaaaataaagggactaggttccctctttgggtgtttcttgacccacaagaaacactgctggttatttcagggttaaaacttagaatgaagttgtcacggtgctgctctgcctaatcctgctcccttctaagtcctttggctaccacaagcccacactatagcaaaacctgaagatgcaaatattaggtaatggggataatctaaaatgttaagcattttggttaattctattatttttttaatttaaagataatttaaatcagactgttgaaaaacccaatgtcaagcctcctgcctcttacacttataaaatggatgaggttcaaaatcgcataaaggaaatactaaacaagcataacaatggcatttggatatctaagcttccacatttttacaaagagttatataaagaagaccttaatcaaggaattttacaacagtttgaacactggcctcatatttgcacggtatgtttttccttattcctcccttctgatacctcctccctgcccaactttgagatcttgagttattagtcatatcaccttttatccccagaagacaaagcactttacatatgttacctcattaatctttatctcttaagattaacatatgtcagttcttatttatagaagtatgtcaaagttgaaggttctcctgtgttgtaattgctatttttatatattttgttttatgtcatttttaaaatgcatttaatatgtgataatatgtaaaccattttataatgattgaactgttaccagtaaacactgatagctttgccattttaataaatctgaacttattgggaagaattgttttattagcctcaaattttatttgctcactcttgagcatttttaaagacttgtagctgagcaaattttagttattttgactaattatatagagttcttaatttttattttgaaattaataatagtgtttatattataatttttacaagctatctttagagagaaaattggaaattagaaaaaaaatttaaaaatgatttatcaatttccatttctattcctacttcagagtctgtgattataagattatggatcagcatagtttattaaagatcttagttcagccagaagtagagacaactggattcttacaccaaagtaactaacttttagatgtttcttagtggttttgcttacataagatatatttaaaacataacttttaaatggtcacattaacagctactcgatgcttctaggcttgtagaattaaatatgcatgaggattatgtatgctttggtagagggcttttatttctttaacatatattttggcccccaagcctgttgggcagtgtagggcattccctctttataagcacctggcctaaagaaagcatgtattttttttttttctttttttgagacggagtttcactttttgtcacccaggctgagtacagtggaacgatcttggctcactgcaaccttcgcctccagggttcaggtggttctcctgcctcagccttccgagtaaatggggctatgggcgttagccactacgcccagctaatatttgtgtatttagtagagacagggtttcaccatgttggccaggctggagtctcgaattcctgacctcaggtgatccgcccacctcggcctcccaaagtgctgggattacaggcatgagccaccatgcctggccgaaaacatgtgtttttgtaaccactttttcctccacttgagtctgtggcctcttagagactggtgtcattcaatcattcatccatcccatttgctcatatactatttactgtgcacttgcatgtgctaatttttgccttaggtgttttaagaacaaagacgatgaagacacttggagtgtagtgagggaaatagggaaaaaaatgattaggacaatgtgacaaatgttagaatatacagtctaaggtgggaaaataaggaatgttaaactctggaaatatggctctgtttccctactaataaactcaagaacaattaatattcgtaagaatgtgacctctgatttatgtggaatatagggttagttctcctaatggaaattcccagggttactttttcagttcagttcagttttttccagtttttttcagttcagttttttccatttatactccattctgggaagaattttcctcactcgatgcaggtttagtgacattgaggtattcccttagaagtctcattaggctgttcagtttgaaggttcagggcctgtggccccttcttgaaatgcatatggctcctttatggtttaaatccatagaactttatgagttcttttatttcagcttttattttaaatataggggatacctgtgcaggtttgttacatgggtatttgcacaccgtagaaagttttctgtaaaacttagagcatttttttaatcatcaggatacatatataactcatttttaagctctgataaagaagtctttagagtaaaaactttaaaaatatacttcactggttcttaatgtaatgtgtttctagtttttttatattccatgataatactaatatttgtgtagctttattatggcctttctgggaaattttaatctttgctactctacatgccttcacaattctagaatttctcttgctaggattgtagatgagagaatatatatctctttgatttaaaaacttttcctaaaatgaatagttttctactaaacctctggtgctaaaacaactgactgtttttttggttgctttttatagcacttgaattcatcttttattgcgttattatattccgtccaagcaatgagagtcagaagcagaaacacaatataactttcctatctatatattgtgtctgttacctttgttcagatataatcagtaccaagtattaggttatagtaatttgcttagtcaagtgggatgccagaaaacaccaatcatattgatgtctactgatacctttcaaaactgtttaacctctgaatatttttcagcagactgttgttaaacagttttagacagttaaaccatggttatttttaaacagctttaaacacttacacaatggttattttcccccttcttataacttcttcttttcaccttgctgcaaagcagaaacactgataccatgcctaggacagatgttactacaagcaaaattagatagtctcaaggcagtgcaaaaagtttaggataagacagaacttggtaatgggtatctctctttatggcttgtctctctatatggcttgtcatgtaactgaaggagaaatctaagtgcagtgtatttctttttttaagggttttttcctccaaccagataaaatattctatattaaaagattgaaaaataaagttataagagaaataaaaatcacccatcattctaccacccagagattactacttacaggaattccatttgaatatcagaatgcacagcatcagctttagggaccaaatagcagctttgaaattttatcttcagggaggctctaattagtatgctgtaagccgcttcacatggatattggaaaacattttgatgcaggcagaaggatgctttgaatctgttgtccttaaccttttgggtctgtccagtagcaaaatgtgtactgagagttttcaaagctagggagaacacagagttattcacaacaatgagccagctccaaggtattcctagacaacttgtgagggaagtggaaattgtgcagaaactgtcttgaaaaggcaaagattccaagacagtaagcctgcagatcaaggacactgcactctaagagttcccattgggtcctaggagtacagcaacacctcttggctgttctagagcagtagtcttgttaatagtgctctcgtttaactgttgtatttgacttgactggtatttataaaatgcttccgtgtgctagccactgacctgggtgttagggataaaacagtaaacaagacagacatggtccttgcccttatggaactttctgtccaatgggaaaataaacattgaacaaataatgataagcctgcaatggttatgaaggagaagtacaggatgctgagggaatgtctaaacaggagactctacatagtctgatgagtcaagtaaagcttccaggggaggtggctgttaaactaaaacctgacagatgggttagtgtgagttaggtaaagagggaggagaaaagcacctcagacaaaagaaacagattgtgccaaagccctgagatagaaaagcatagtattttcaggaagctgaaagaaattcagtaagaagagagttgctcaggaagaagctgaagaggcaagcagaggccaggtcacttcattaaggagtcatcatttggtggaaacacagcgggtctcagccttgaggtcacccaggatccatggcctctggctgactttgatttctagaaaaattacaaatcttggtcaggcacattggcttatgcctgtaatctcagcactttaggaggtcaaggcaggagaattgcttgaggtgaggaatttgagaccagcctgggcaacataacaaggctctgtctctacaaaaaataaatttaaaaaaattagctgggcatggtgatgcatgcttgtagttccatctgctcaggaggctgaggtgggaggattgcttgatcccagaaattcaaggttgcagagctatgatggcaccactgcactccagcctgggtgacagcatgagacctgtcttaaattccaaatcctgcaacaatgactgctgaacaccagagattttattgaaaatttctactctctgaaacgggtaaagaaacctctccattcttacattagccagaatatctgtctcccatgtcttgcctgaagctgttagagagctgaggggctcattggtgggcagaactagatgcactcagctaaggagaatttctgtcagtagccccaagacctactggtaggcaaccagcaggtagctgggaaacattctatgttgggctggaggcacaccaagccttaattataaaacataacattttgtgaatgacaaaattatagaacataaaatgttgtgaatgaggaaaaactgcctaattacactaattattcatagcttctacaaggatgttttactgttaatctggttttattatatatcattttcctattcattagaaatcactgagctttaagttgtttcatatctaatcctgcagactcttaaaaattcttaaaattctgagttgcatcagtatagcagtttctctaatatcaaaggaggcaagagtttctgtcacttacatagagatgtttttatatttggggatgttcaggaatctaacttaattttaattacggtaattaattgtatgagataataaagcacctttttgcccatgtaaaatgaattgcctttttaaaaagcctggaacttctggggtaaaaccaaaacaacttggatttctaaggaaatggaacataaacagcaatcgatatcctcaggcttagtggtattgaatatactctatatattgaatatattctaaataatgccagcagaagcagaagtgaagaggtaaactgaagacttggaagtataatcataatattttttaaatggaatctaacttattttccattttttcaccagtgaaaagaaatatataatgaacacatgattggaacaatttttaaatttaaattcggtgaacgtctgagtagaaaaaagataaaatagcactgttgtgaaatcagaatagcgaagttgaggaataatgagaagttgctgttctggaacttgaaacagaaactacccataaggccccatagtacactagaaggagtttgggctttgaggtagatttttaccttatcatttcttagctgtatacctttcagcatacagaccatcctctcagtgccacaatctactctaaaatgtcactaattctacccatgtcatagggtggttgtgagaattagataaaatatataaagcagctattaatgtggtatcagaaacataataggtgtttagtaaaagacaactgctgttaatttttgagaggcaccccagcctaaagcaggccaaaacccactgctcaaccagggacatgcccagcaagctctacaaggaaactgaatacaaacagaggaaaagctaaagagggaaaaacaaaactttaacttgaaaagaaataaagagcagtggaggaaatgaagtcaaaataaactccaagccaaagagagttcctgacgttttaacaatccatgaatggatcccagtccccctaccctccctgcacctgccccaactcctgcccaaggtaatgagagcaaggaataatgagagcaaggaatgtgtccaatgcacattgaaagccacagctactggccaaaagcaattccaaaaagctctgcacatgttcaactaggagaagactccattatcttccttaaggaacatgagcaagaggcctaacctcaggccatgctaaagggaaatgacttgaagtttatcctaatataaataattgcaatgtgtgtctaaagagcattggtgaaaggtctttcctagttaaaggggtgggagtaagcggaagtgttgaccttgaagtacatggagtctattaaatgactcatctaagatggcagagaagagtttctctaagtagatggtttgtcaacagtcaaggattaccctctacaaggatctttttacttttacctttgattaagtctctgtggaatatgctacaaaaccttaactttctcaaagagaattgactgaaaaactgtaaccatttctgaatatcttgggcttatcatcactagcctcagtaccttctggcagagatggctgtggttgtaggtgatatggaacggtggattggatgggtttagctcctgcatacagggtacaccacaccggctgcccttgcatgtttcacatctgtcctgatcagtgcatctgcattgtgacatagtgatgccattggggaccatttccctatctctttctcagttgtctgacttttccagcactcgtcagctttagcataaaaaggccacctcttaaggaagtcatcagctggtcaacctttctgtgaactggctaatcgtagggtgcaagcttctggtcagtgactttgatgttttagttgttgctaggcactcagggatcttttattcactactgaagtcaagttttaaaatgggattattttttgctttttctttgttgtttttgtttgttttgagctcataaccattattaatgcttgcagtgctagaaagcaggtctctaggtaaatgtgattttgctgtactgtctcaggtttgtattgggtggtgaccatataaaatgaaatttagaacttaatttaaaacttcaacaaaaatgactactaccctgtggaaacaaaactgtgcccatataaatgctttggaaagcttgatttaactggacaataccaattctgttatagaaccctaaagaatattctaatttcagaagaaagagtaagcttacctcagaggcccatgctaaagaattagcaggtaagccttcatagactcaaaggagtttggcttcaagaacttttaagtttacagcacaggtaaaactagaaagaaagaagtaaagacccttagagttaaggagaagcaagtttctaggcgtgtaggatgaagacttctatttgtctgaacaaacagactcctgaagaaattcatattttaagtttttgggcctgttttggaaaaaatactcaaactatgtttttcctctgctgtcacaccacaacaatcaacacagaaggcttctgtgaccaaatgtgggcgttttccccagaaaccaagcagcggacaccagctgggtgccctctaatttaatactaacactgtctacctggagatagcatcagatcccacagggtgaaggctcaatccccaaaattgctggtcctctacatatacactagttgcgcagatccaggcctccagaacttctgactgaccagcttcaaattggggttcccaaaacctcctctttgggtttgattaatttgctggagtggctcgcagaactcaggcaaacagttatatttactgatttattacaaaggatattacagaggatacagatgaagaaatgcataaatgggggaagcagcatggagtctctgtgccctctctgggcctgccaccctccaggcagccctccaaacctgtcatcttggggttttatggaggcttcattacgcaggcatgttgattaaaccattgaccattggtgatcagcttgaccttcagtgcctcttccctcccggcatttgaatggtggggccaaaagtttcaaccctctaatcctgccttggactttctggtaagcagccctaccctgaagctctcagtcagtattagcatagaaaaagataagctctttggagattccagggattttaggaattgtatttaggaaactgggaaggaagaccaaatatatatttcacggtatcacagcctcacatctgccaagcctagtatttctgctccaaacttacagaaatccagaggggtgtgagggaagtgtctcattcaaattgtgattccaactgtggcagaaatcaaactgattatcatgaacttacgggaatagaaagtttaaggcgtattaggtacagcatcttctgatgatcagcaaaggaaagggcttgactccatggtctagggagttcatctttaatgttacctgtctctcctgctggaggtgggggtgggagtgtacacatggtacgtgaagttacaagtcatgctagttcccagtcgttggactgatggattttttgggtggacattcagaaccaaagagaaaattacagagccacaaaacaaagaaaacatgaaggacaaggataggagtattgtcctgagtcttctcccacagtagaggaggccttctgactccctccttaggtatatgcctgaatcaagtgggctaaaggaactagatgccgtaaaagttcccttttgagagatctacctgaagtggttagcagttgattatcacactaaggaaataataaaagccatgtttcaagtagatgttggcttgccttggtcatttgtgaagaccataagatggctgttctgtcttgggaaatgaggcaggagatgaacatgtaaatcttttcagatgcaccagagcccagtaaagaatggacaccacactgtccattatagcaattctttatctttagcaaggttcttgtgggatacatatagtagtaggtctctttcctaaacctatttgccagaaaattaaaaagaggtggcactttttgtagatgacagatggtgatcacagtagaatgcccaggaaaagcaaatttctattcatatgaaaatttagagagtttgagctgggtgatattgtaaaatatatatttggccttctccattctctggcatacaattcctaaaatccaaagtgactctccaaagttaggtctctttttttttttttttaaactaatgagtgatgactggcaacccctagtagctttaggatggggctggtcaccagaaagaccaacgcatgattagagggttgggactttcagccccaaccaacctctggggaaggtagagggcctaaagattaggttgatcgccagtggccaatgacttaaccaatcatgcctgcggaatgatgcctccctaaaaacccaaagcaggaagagcttccagatagccaaacatatggagcttcctgtagggtagcagagagggcatggaagctccacactccttccggcatacgtcacactaagcatctcttcattggtatttttttgtaatatcctttaatttatacatatatctgccatacacacacacacgtgtatttttttagagacaggttttgctctgtcccttaggctggagtgcagtgccaccatcataactcactgcagcctggacatcctgggctcaagcagtcttcccaccccagccttccaaagtgctgggattatagatgcacactatcacatccagctaatttttaaaatttttttgttgagattctcactatgttgccccggctggtcttcaactattagtctgaagtgagttatcctcctgccccaggctcccaaagtgctgggattataggcgtgcgctgctgcacccagccatatccttcatagtaaaccagtaaacatgtttccctgatttctgtgagccactgtagcaaattaaaactaaagagagggtcttgggaaccccagcttgatccaggtggtcagaagttccagagccgcaggcttgtaactggtgtctgaagaggagacagtcttgtgggactgagccctcaacctgtgggatctgatgctgtctccaggtagatagtgtcagaattgagttggtggaattcagctgatatccaatgcagaattaattgattgactgaagtggggagacccccccacccatttggtcacacaagtcttctgtgttgatgattgttgttgaatgagaaaataggaaaaacttgtttgtgttttccatactcataactgaaaaagaattatatttgctttaaattatattttttaactttaaaaggagtttcatgaattgttgcctttgaattgaaaaacccctcagctggcctggcatggcagctcatgcttgtaatcccaactccttagaaggctgaggcaggaggatcacttgagcccaggaggtggaggctgcagtgagtcgagattgcgccactgcactctagcctgggcaacggaacaagtcccagccttaacaaaaagagagagagaaagaaaagaaaccccaaagattggaatgaagtatgtggaccaggtattttttccatatcactaaatttatctgtgaatatttgcctaaagtgttgaaggatatctgaatcaattccaggtagagtcaggttcggtgccttgttaggcctatgtttaatcttagtaaatgcttatttgaatgtatagaagccaaatcattggagaacaagtgaaatgtaggcacataactaactgttttgagataaaagaataaaccattaaagactggaaagtgcttacaattcaaggaactggtcattagagtgggatatggttatctactttaaacaataagaataatataaaactgctgagggaaaaaatctgtcttctaattcagatgattatttggctatggtttgtactttgggtaaattcagacttattggtcaaaaattcactttataggctgactggcaaagtttgacttaaatgctgcagacacagccctggaagcttagtacctccagatgatctttaagtattattctggaataaaagccagaaaaaaatgggaattctgctcttgccctggaccaactcaagtggacataacgtccctaacttcagttaagacagcagttcctatttggaagaacttgtgctggtcatgtcagaggtcattgttagaggtttgataggtatgttattaggtaattggcactaatcacatctaaggcacagatggaatggcagtctggggactgggagaggggagactaagcaatgaagcatcccagattctcagtacactccttggaaagaaaaagataataaagccgaagaaccctcttaccttctttgggttagaagaaggctatatggacagtgggggatggggcttaggaagttattttagataagatgggttatcgtccactgaaagtagtttctaccacccacttcagagaaagtattgagattggtatgtgaaaactgaagaaaagttttaaggtgggctttacaggctcatctgggtttggctgcagagaaccaccacatctaaatctaaaattagtcaagtgctgcataacaacattttggtcaatgatggactgtatgtatacacaatggtggtcccataagattataatggagctgggggcggggggcaagaaagctgactagaagcagcagcttttggaggctcccattgaaaaaaaccataataagtgtgtgaatccttcattggcaacccagggtatccaggttctctcagcaaagtagagtagaaggctggcatgactcacagagagaatgaagaacagtatggtacggcagcccacctgagagccacatggggaaggggaacccttttcccccagccaagggaggcagtgagtgagcaacccatcagtgtgctatgttcaggagacccatcttacatgcaaagacacacacaggctcaaaataaagggatggaggaaaatttaccaagcaaatggaaagcaaaaaaataaaaaagcaggtgttgcaatcctagtctctgacaaaatggactttaaaccaacaaagataaaaaaagacaaagaagggcattacataatagtaaagggaacaattcaacaagaagagctgactattctaaatatatatgcacccaatacaagagcgcgcagattcatgaaacaagttcttagacacctacaaagagacttagactcccacagaatagtagtgggagactttaacaccccgctgtcaatattagaccaacaagacagaaaattaacaatgatattcaggacttgaactcagctctggatcaagtggacctaatagacatttacagaactctctaccccaaatcaacagaatatacattcttcacagcaccacatggcacttattctgaaattgaccgcatatttggaagtaaaatgctcctcagcaaatgcaaaagaactgaaattataaaaaacagtctcggctgggtgtgatggctcacgcctgtaatcccagcactttgggaggctgaggtgggtggatcacgaggtcaggagattgagaccatcctgactaacatggtgaaaccccatctctactaaaaatacaaaaaattagccgggtgtggtggcaggcacctgtagtcccagctactcaggaggctgagggaggaaaaatggcgtgcaccagggaggcagagcttgcagtgagccgagatcgtgccactgcactccagcctgggggacagagcaagactccgtcacaataaaagagagaacgcagtgcagttagattagaattcaggattaagaaactcacttaaaaccacacaatttcatggaaattgaacaacctgctcctgaatgactcctgggtaaataatgaaattaagacagaaatcaagaagttctttgaaacaaataagaacaaacagacaatgtaccagaatctctgagacacagctaatgcagtgttaagagggaaatgtatagtctaaatgcccacatcagaaatctagtaagatctcaaatcgacaccctaacatcacaaaagagctagaaaagcaagagcaaactaattcaaaagcttgcagaagacaagaaataactaagatcagagaagaattgaaggagatggagacaggaaaaaccctccaaaaaatcgacgaatccaagagcagtttttctttttgaagattaacgaaatagacctctagctagactaataagaagagagagaagaatcagatagacacaataaaaaacgataaaggggatatcaccactgaccccacagaaatacagactaccatcagagaatagtataaacacctctacacaaataaactagaaaatctagaagaaatgaataaattcctggatgcatacaccctaccaagactaaaccaggaagaaatcgaatccctgagtagaccaataacaagctctgaaattgaggtagtaattaatagcctaccaaccaaaaaaagcccgggcccaggtggattcacagctgaattctaccagaaatacaagaggaactggtacccttccttctgaaactattccaaacaattgaaaaggagggactttgccctaactcattttatgaagccagcatcatcctgataccaaaactgggaagagatgcacaacaacaaaaaaacttcagccaatatccctgatgaacatcaatgtgaaaatcctcaagaaaatactggcaaactgaatccagcaacacatcaaaaaacttatccaccatgatcaagtcggcttcatccctgggatgcaagcctggttcaacatatgtaaatcagtaaatgtaatccatcacataaacagaaccaaagacaaaaaccacatgattatctcaatagatgcagaaaaggcctttgataaaattcagtatccctccatgttaaaaactctgaataaactacgtattgatggaacatacctcaaaatatgaagagttattcatgacaaatcacagccaatatcatattgaatgtgcaaaagctggaagcattctctttgaaaactggtacaagatgaggatgccctctctcaccactcctattcaacatagtgttggaagttctggccagggcaatcaggcaaaagaaagaaataaagggtattcaaataggaagagagggagccaagttgtctctgtttgcagatgacatgattttatatttagaaaaccccattatctcagcccaaaaacttcttgaactgataagcaacttcagcaaagtcttaggatacaaaaccaacatgcaaaaatcacaagcatttctttacaccaacaataggcaagcagagagccaaatcatgaatgaactcccattggcgatcgctacaaagagaataaaatacctaggaacacagctaacaaaggacatgaaggacctcttcaaagacaactacaaaccactgctcaaggaaataagagaggacacaaacaaatggaaaaatattccatcctcatggataggaagaatcaatatcatgaaaatggccatactgcccaaagtgatttctagattaaatgctattctcatcaaactaccattgacattcttcacagaattagaaaaaactatgttaaatttcatatggaatcaaagaagaccccttatagccaagacaatcctagcaaaaaaagcaaagctggaggcatcacactatctgacttcagactgactatactacaaggctagagaaaccaaaacaagttggtactggtaccaaagcagacaaatagaccaatggagcagaacagagacctcagaaataacaccacacatctacaaccatctgatttcaacaaacctgacaaaagcaatggggaaaggatctcctattcagtaaatgatgctgggaaaactggctagccatattcagaaaactgaaactggaccccttccttacaccttatacaaaaaataactcaggatgaattaaagacttaaatgtaaaaccccaaaccataaaaaccctagaagaaaacctacgcaacaccattcaggacataggcctgggcaaaaacttcatgacaaaaacaccaaaagcaattgcaacaaaagccaaaattcacaaatggtgttaaactaaagtgcttctgcacagcaaaagaagctatcatcagagtgaacaggcaccctacagaatgggagaaaatttttgcaaactacccatctgacaaaggtctaataattatctaaaatttacaaggaacttaaacatatgtacaagaaaaaaacaaccccatcaaaaagtgggcaaagggtatgaacagacacttctcaaaagaagacatttacacagccaacaaacatgaaaaaaagctcaacatcactgatcatcagagaaatgttaatcaaaaccaaccacagtgagatactatctcatgccaggcagaatggcaattattaaaaagtgaggaaacagtgttggtgaggctgtggataaataggaacacttttacactgttggtgggaatgtaaattagttcaactgttgtggaagacagtatggcgacaattcctcaaggatctagaatcagaaatacatttgacccagcaattccattactggctatgtacccaaaggaatataaatcattctactataaagacacacacacacacacaaatatatatatattttttttttgagacagagtctcaaactgtcacctgggctggcgtgcaatggcatgatcttggctcactgcaacctctgcctcccgggttcaagtgattctcttgcatcagcctcccaagtagttgggattacaggcacctgccaccacacccagctaatattttgcatttttagtagagacaggatttcactatgttggccaggctggtctcgaactcctgacctcatgatctgcccgccttggcctcccaaagtgctgggattacaggtgtgagccactgcacccggccacacacgtatgtttattgcagtgctatttacaatagcaaagacatggaaccaaccaaaatgcccatcagtgatagactagataaagaaaatgtggtgcgtacacactatggaataccatgcagccatagaaaggaatgagattatctccttgcggggacatggatgaaaccggaagccattatcctcagcaaactaacacaggaatggaaaaccaaacgccacatgttctcactcctaagtgggagttgaacattgagaatacatggatacagagaggggaacaacacttaccagggcctattagggggttattaggggcctattagggtggttgaggggagggaacttagagggcaggtggataggtgtagcaaaccactatggcacatgtatacctatgtaacaaacctgcacattctgcacatgtatcccattttttttagaaggaaaaaagattataatgaacctatataatggagtaggctataccatctaggtttgtataagtacacactatgatatttgcacaacagatgacacgtttctgagaatgtattcccatcgttaagtgatgcatgactgactacactaattgggattctatatggcaagttaatcattcacttataatgctgttttccttatccattggctccgaaagtgtgcgtttcaaacctctggatacctaatctgtattcttgtatcttattgagtgtcataaagcacagcgaagattggcattttaagatttcagattttaaaacatgggtctctagagaagtagactaaccatcaagagaaagatgaggaatgctccaactatttgtgtccctatggcttaaaatgagggacataaactgcgccaatcatataacatgccatttagagggatcacagagtgccagcaggagaccatgacagattacaggaggtgccattagacctctgctttcagtgatgctttaggctttccaggtgtggaagttttcctcagtcctcaaaacttaagcatacattggtaaaagtatgaagaggaaaacctaatgttttatattaatatcgttcacttcctatgtgatgtagaatatgtagtcagactaaaaggaattttattaccaagttgcctatgtcttttaacttgtcaaaactcttctctgataacaagatagcgccttctttctttgtacataaatgtttatgttcactcttcctaagcattgtatggagagtgaagtaaaaagtcagtgttctttactaataagctacctaaccagcatactttaaaattctgttcttctgggtggaccatggttcatgtaaacttgtaattattaccctaaggggttaaattgcagctaaggggtaggtaaaataggatctgacaaaatagaaatattttggaaggcaaggaattttaacttcagtctaatggtctcgtacagggttcaagaaactgcttttgtaaaggtccatggtaaatgtttaggctctgcaggccaagagctgcaactaacagatgcagtccatcacagttattcaactgtgtcactgtagagcaaaagcagccagagagaatatgtaaataaatgagcatgactgtgttccaataaaactttatgtatattgagtttcatataatttttgcaagttatgaaataattcttttgattttttttctagcatttgaaaatataaaaatcattttttagcccatgagccatgaactgcattgggccatgctctagtagtagagctgacctctgctctagtagtagaaaggcttaaaactcagggagaaaaattatgccatacatcagtttctcttctccttcttctcttacataaaaatatgtcatcaagctgtgcctctcagaaatggcatgcaaatgaaattcaagattggatgacatacaagtgctaggtatttttaatacttgtttgttagagtgacaacacttgcagctaaactttctgctgtggttgttttaaaactgtacttatctctggagcatctttttctaaataatggaaagccaagggttttctcaggctattgcaagaagaagagagatggcactcctattttttctaaatattttctagttttcttcccagtggtttattcctgacagttttaataccttttcacaacttatttttagtcagttttgtaagctattgttttggatttggcagaaacaactaaatgagagtacacgttacagggcagagcacttgtgattttctagggcagctggagtctcgatgccgcacaaatgaatttaatactattttattttcctttttatttctgaaatgtggctcatgttatttgcaggtggagataatgcattaaagtcctagcaattgaaaagagtaaatcgtacacttgattaatttggaaacagcatgactctcaaatttagaatgcattaatgtgtttgtgggttgtttatagtcactgaaatatctgtcatttgctttatttaaaaatttcaggtggagaaaccttgcagtggtggccaagatttacttctttatccagctaagagaaagcagcttttgagaagtgaactggatactgagaaagtacctctatccccactacctggtcccaaacaaacaccaccgttgaaagggtgtccaacagttatggcaggagactttaaagaaaaagtggcagacctgctggtgaaatacacaagtggcctttgggccagtgcacttccgaaagcatttgaggaaatgtacaaagtgaaattccctgaggatgccttaaaaaatcttgcctcactttctgatgtatgcagcatagactacatttctggaaatccccagaaggccattctctatgctaaacttccattgcccactgacaaaatccaaaaggatgcagggcaagcacatggtgataatgatatcaaggctatggttgaacaagagtatttgcaggtagaagaaagcattgctgaaagtgctaatacctttatggaggacataacagttcctcctttaatgattccaactgaagcatcaccatctgtattggtggttgaactgagcaacacaaatgaagtggttatcaggcaagtttcattttctaattctttaggattctgatatacttttgtcacttgtctattcttcacatggatgttgagggttaaaggaagaataatatggccgggtgcggtggctcacacctgtaatcccagcactttgggaggccgaggtgggcggatcacaaggtcaggagatcgagaccatcctggctaacatggcgaaaccccgtctctactaaaaatacaaaaaattagcagggcgtggtggcgggtgcctgtagtcccagctactcgggaggctgaggcaagagaatggtgtcaacttgggaggtggagcttgcagtgagccaagattgtgccactgcactccagcctgggcgaaagagcaagactccatctcaaaaaaaaaaaaaaggataacatattcttagttctatagagttatagtgaggcttaataatgtattaatatttgttaattgttcaaaatatacagctatcctaagactactaatagctttaaacattggaatgataatatgaacttgaaaaaaagattcatgtcaaaagcttgttggtaactatattatgtcaaaagcaatacctagttcgcagaaaaggcaagtgccctacacactgcataatactatttataatctgggactatgtagtatttcctaaaagtaaaaatagctcagagctgctttccttgtataatacatcagattagaccttggacccaaaggtgctctatttatttgagtctttcagtatcgttgcctgagaggaggtgtcattgcctaaggcatcattgcctaggtagctaacaataactagaataacaaaaaacagtacagctccaggcacctgtcttggacttttggagaaaatgcagaatacgtggaaaatatagaaagactataatttgcagtctccatttgggaaaaagaatgggaacctatgtagctgaacccctggaggtaccagtccagggtgtggccatggctgggcagatcagaaaaatgctgaagcaaacagaatctgggctccttcaaccaaatggtcctttggtttgggctgtccctcctccagagacccataactgagatggaaaagcccaaagaagaaccacaaaaaataattagaatccttcaatgaaagaagagctcaaaaatttaaagctcttccatttgaacaaatgaaatctgagtagataatagagtgaacctagtatcttcagatgctcaaactggaagaacctccagaaactttagagaggataaagcttttattctaagatgtggtgtggcctgaagatataaataggttgctgaaggctagaggtcccaatatgtttcactattgtattgaagtaaaggaaagatattgaaggccacattaccaccttttaccatttgactatactataaagaaacttacacggcaggatcctttggtatctgtaactagtaactgttggtgccatagtcagagaccaagcaccgggccagaccaatcacatggtttctgttgttcacaccaaggtttgtcaaggatgattatgtccagggtcgtcagattatttaaataccttatcccagtaggaatttaaatcctggagtcagcattttatgtgttcagcagagtggctggcaaccagcaagcaagatgggtaatgtctgccattaggttgaccttaggttattggcttctgccctccccacaagactttgcaaacctccaccagactgaaccctgttctgtactggcatcttcacccaggcaggcagtaggcactggaagctggatctctggctcattagggcctggagggtactatggcagaaccctcatctcaaatatgggaatcccttgtctcagaaattaactttgtaaaactttgtatttagggcatctctaaattggcctatccatcattctttgccccccttgctcaggtaatttgaggataatatatgacctcattctcgtcattacccactgtcatacaagctgtaatgtcagtcctgcactgtgcctcatccaacaccgtccatcttccccctatctgtgcagccctccttctctcctggctgcttaagagaagagaagctgcctgcagatcccaagccatttctcatcaccttcctcccttctggcaggagcctgtgtttggcagaccaccacatcagggctgcagcccaggcctctgccagttgagcacccagggctacatagcagcactagggggaggcccagtgagactctaggtcccagcaaatgggcagtcgggtgcagttgcagaccttctggaggacttcagagccaagagtgcaactgcattcaaggcagtgccttagtatttgcaaagctcaatacatttaaatgataatacctggctcagtgacacatacacatcctcccaactactcagcaggctgaagtgggaggattgcttgagcccaagagtccaacctaggtaacacagcagtgaaaccctgtctcaaaaaaaaaattaaactataagagtatggcaaagcttctgcagctatttctgaagccaataatatgcacataatatttcattttaaaatagccattgcacatggtttccattttgtgtaggactttctgagttttgtttttttttttttttttctccttgtaatgaatagcttgactatggcatcttctgccctgctgataattaccaagaatacatagaaatagtcctaaaggaaccatttcttagagctgtacaggcctacttggagcctgggtgaaacctggaacaatacaaagaacaaggttcttgtggcatctcccctgtctcctgggccaagtgatgctggtgctgttagagtatagccttccagctaaaaaggcctcgatcctatggctgggacagcttctcttacatgacccaaacttgatatgccaggttttacaccctagaaggagaccctggacgaaatcatctctgaggactaaagcgcaagaaaacagtagcctgttttgataacatgaactggaacaaggtgaccacagttgtcaacagtagaaaagtgtagaaaggaataaggacataatcctgaaaaaaaatatttctcaacaagcatacagttttagagacatttgactagaatatggtacctcttttaagggtatcagaagtcaacattttgttgtaatttgttcaaattctttaataagtttggagggggggtgtcaacgttgtgtttagtgtactcacagctttgttttttctctagtaaaatttcattgcttttcaaagcttgacccagccctagttaggttaaaactatgttctagagtctcttcttagtaatctgtaaagatttccagcagccttagtcaagatccagcatcgaccctcacttctctggcctccaggcctcccttggtgtctccattttccacgtctcctcctctctccccttcctgacttttctcagccttgtccttcctgaggacactatcgctgcttcctgttatgccctctcgttgtctggattgctccacgtttcctttgttgtgggatatgttggaccaaatgtttgctgtgttgtttggtgtgtgttttgtgcagtctccattgtcccttatctgagagggagtctcactctgtcatccaggctggagtgcagtggtgtgatcttggctcactgcaacctgcaacttccacctcctgggttcaagcgattctcctgccttagcctcccaagtagctgggactacaggcgcccacccccacacccagctaatttttgtatttttagtagagataggatttcaccatattggccaggctggtctcaaactcctgaccttgtgatctgcctgcctcggcctcccagagtgctgggattacaggtgtgagccactgtgaccagcccccttatcttctttttcaagagataagtatttcactgaatacacgttctcctccctgttgatataagcaagtctgagactggaaccaaagatggcagcagggaaaaaagaaggacaaaaacgaattcctattgcttttcttcttctaggttacttcatttgcattctcttcttttaactgattcaggtatgtgggcaaagactattctgctgctcaggaattaatggaagatgagatgaaggaatattacagtaagaatcctaagatcacaccagtccaggctgtgaatgttgggcagttgctggccgtaaatgccgaggaggacgcctggttacgggcacaggtcatctcaacagaagagaacaaaataaaggcaagcactgtttactttgtcatagcattatggatacaaataccttattattttccaaatgtaaatattttttacatttttgaaatttaaatgttgtatcctataattaaatgtagttttcaatggaagttgaaaagataatatctgtaaaaggttatccctgtcagcctttaaattcgtggtagttattattatctcagagttttagttaaaaaaataaattccccatgggagtattcataacacattatccaatcagggaaagacacttcctattcctaggggatgtataatgaatactgaccagaactctgtgggcctcttatcaaggccagtacttcggagtgagggaagccatacagaccaaaggagacaattcttcttctccctcttctgtagccaagacacaggtccttctccacagctgctcccagcgtagccctctccaccctcttgaaaaggccagtgggcccgtttgccacttgcttccatcagcagactcttctgggcttggctacattcgtggatatcagcctctgccctttgcctcttcatactgtcaatgcagagaccaagaagcacagtttccctgagagcggtagtgtctcagggccttggaacacccaaataacatgcagagaaattaggtattagctccgtgtgctgtgtggtcagttgtactagtgtatttttaatgtgttacttctttctatcttggtggaagctgtgtgtctatttggaatttatcctttgaataatgggcctgctacttgatagagaatttggagggagagaaagtcttttctttctcgattgttaagatgtctcccttccctaaagggaaatgcgctttaagacttgggttcatttctgtccttcatgatgggaaggacactgtgtagaagggtgaccctagttccccacttctatagtcccttgtatttatacagagcgctcttggactgtgaggggaatgtatctaagatcttttggttttctctagattttgcaagcagggaaatatgtttctatttctgcagcctctgttccataatacaaaaccttattccatgtgccactatcagccgccagccagtaatcctgtatgtgtcactgagtgcaaatgaccagtccctgaacacaggcttaagtccatcagttactggccactgaaccctagctacaagtgggagttaggaggtcagaaagggatactgctgtttcttagcaggttgctcaataggagaggccctgaccctctccagaagtaagctcacccaaccacccagccaccctttcccatttgcagaggcatttaggaaactccccagctgaatctacagaggcacaaattttaagtaatttgactgactttaaaaatctgaaaattggaaaatagtttgccagtttcttacgaacacttaaccatatgacccctaaggcccacaaggtgtcttgtacatacatgtgtgttgcagtattattattaatagccccaaactggacacagcccaaatgttcaccaacaggtggatcataaaaacaaattatagtttattcatgtagtagaacactgttaacaatacaaaggaattaactactgatataaatagtttcatggacaaacctcacagattttgtgctgagcaaaagaagccaggcacaagagagtaatgtataatttcatgtaaatgatgtctaagagcaggtaaaattcatctgcagtgatagaaatcagatcagtggttgcctgggacaggaggtggaggggggctaattgcaaagggcaaaaggagactttttggggtggtgtaaatggtctatatgttgattatggtgatgattatatggatgtatacattgatcaaagcccatcaaactgtattgtaaacaggtatcttttattcagtgtaaattatacttggataaagtttgaaacctggaagaagctaaggaccacaatggtcactggaccaaaggagaacacagggcttgggcactagtcctgagtctgcctgtatttgggtgtgtgcctttggtcaagtccctccattcctctgggtctctagttgataggagataactatccctaaacgttcctagataaacttctgtttcctggccatttcactcccccggcccttaggaagttcaacaaaagctaagctattttgaggcacagagatttcttatgaagagaagaatcatacgtaaatcctaatgacacattaacagtgtaacaatatttacaataaataatgcagctattccacaaggatatctcccagtctgaagtctatagggcagtcactttctttcctccctccctccttctactttgggaattcaggctctcgtgtcagatagaactgagtctcagctttgccatttctagctgtgtggccttaggaaagttatttaacttccctgattgcttatctgtaaattcaaacactcccatcgtgttgtatatacctgatacactttttcactttttactggagccaagaacaaaacatacaagtccttcttctcaagaagcttacattctagtgagaagagagagatgacaagcatacagtaaacacacaaaacaattttagtacaatgaaggaaataaccaataaaggaaataactatgatagaaaataactctgaagcaagagataggcagagtgatgtgatctcatttagatgcttcagaaatcattctgggactgttgtgggggaatggattgtattatagtagggcacagaaggaaagtaatactggttaggtggctgttgtaatagccagctaccttgtaacctggattagtgaagatggaggtagtggaagagattcaggatatatttggaggtagaactgacaggacactgacctgttggaagtggatggtaagcaaaagagaagattcaagataagctactgggtttggggcttgagcaattgactagatattggtgccatttgttgaaattgggaagtcagagagaaaaaccattgtggagaacaattgagaatttcataggacctgctaggtttgagaatagctatcagatgtcacatggatgaatttggagctcagggagcagttaggactggagatgtgtcaggttgggaggcatcagcatataggtgctatgtgaaatcacaggacaagatgagatcccctagagagagaatacacgtagagaggaggaggggcctgggcccaggtcctgaaacccttcagtatttacatggaggcataaggggagcagaaaagcctgtaaagatggccaaagaagaaaaaccaagagagtggtgtcacagaagccagaaaaagaaagcgtctcataaagaagggagtgaccagcctcgtcattgctgctgagaattatgggctggatgtgaagaataaaaaaggtagctcggtattttgtgcagtagcaagctcttgggacagcggtgattgtagcaatccgggcctgaacttgttccccacatccccttgaagctgacagagatgatttctccctttatttggagaaaccccagctacttagcaccagtcttgcttcgcttgaattgaactttgtctggtggtaagtactgattccttccttgctttccctgtcagatccttggtgagtaggagaaacaggagatgtggtcacccgctgaggctggtgccagtttggcctgacccaggcccacatcccaggggagtctgctgggtgataggtagtgctgggagacctttggccacttgatggtgccagagaaccaggaatggactggggccttatgccagattatgtgactactggccctgatcccaggacattagagagagagagactactgagccctcacagagcaaaggacacagagcagagtgtggtgagagtcacactggccaatgcatggacaagtgttttataaactgcagttgccatacaaacatgtatgattaaaaacaagaaaagaagctacaaacagttcagaaacactttcttttgaggctttggagcagttattctttaatctgttcttgtgctaagaatacattctgaatttcccaggagtcatgatttcacatgctatgtcctattgtcagaccacgttacctccattttgggcctgggaagaacagaatctaagttgtaggtggtgatagctattaaaggaaatgaaagctgcctgactcctgaggcctatgagaagcaaaagcaggtgctaatttaggattggagaaatagacttgtgcacttaaatggccagctgcctgacatgcagccctaccagcgatctaggcctaagtcagtgttgagtcagatgtggattctaagagatggtctttctgatacaaggtagacaggccccacaggcccgcttatcacatggccaaggaaaggagttagtggtgtcttctgcttttttcccttagattctctgctgggaagggtttttgtttcgtgtgtttagtaccataatctaggtactaagaagctggcctgtggactttattttcagggaggcagtgaaaggaacctacctcatgttacttggtattaaggccaagactttgccctggtgtttgttgttttgtttgctttgtttctttcaataaccatcatctcctttaattagagatgcatattaggttttcaacatttcccttagattcttagttattctaaaccatagcttaatgtttctagatttttatttttctcaaaaaaaggctttgtgtttatataatccttttaaactgaagattctataaatattcttaaaaataatatccaggctcttaacagtctgtgctaatggtgaggaaaagttgttcaggtttctgcaaacacagacctctgttcagcagacttagggccttttgctgagctgaaagaagacctaacccagcttcacacccttgaaaaaaataggtacgcctgttttttagtttagaattccatgttgttcagcagtgataccattgttgtcattgatgaagcatctcggtccctggaagcacagtagctgagaatagccatcacaaatgctgctttggggatttagaatctgataaataccacaaggatgatgcctgccatagaaacaaatactgctgtccagggaacgggtggaaatgtgtaactcaaaaaagaataagctgatataggcattatgatattaatgaaagcaccaaaggggaggggagcagagttggcagaaccaggtagataggctgctgaaagactggcgacagcaaggtggcagggctgagcagtcttgttcttcccattgaaggggtagggtgaggtagaagactgggacctggaactaggacccctggtttccttggtctcagctccagcctttctcttctgtggtaagtcaggggcacctccccagctttttccaggtgccactctgccactcagcttgctgatcatggaataagattgagccaattaagtgtatcaaatgaattttttaaagagaggataaagaactaaacattctgtgtttttaatcattaggtatgctatgttgactatggttttagtgaaaatgttgaaaaaagcaaagcatacaaattaaacccgaagttttgttcactctcatttcaagctacaaaatgtaagcttgcaggtaagaggaactttttaaaaaactctctccatttcaataggctattaccactgtacatttggatagttgaatcctaaaatggactaagtatctcatgttataatgtgttacttcttgaaaggtttaaattcatgtcgaatgtattctttataagataccattataaaaatgttatgtttttatattttgtgttatatataaaaacgtattataatttcttataaaaatttcagccatcttaaagggatttttcttgttctaactgccctagtaacaattgatagaggccctgtttcatgacatttgatgagtttcaatatgttgttcagcatgttgtgaggtgactctcagcccctttcccactgagatgtactgtggtgatgctgtgagggtgtgactgacacaccttcatgtgcccaagcatgggtttgatcacaggtcacatgcagtttttggcatagtagatgtatcattgttcttttccttcctcctaaaggaaacagaggaatccacctgtatgagagtgccatgtagggataaacttaaaggacagatgacacattggtcatgtccgtgataaggaaaggcattgaaatatgcaccatgccgggggggacttgagccaaatgcagaaaatgatcataattatttcatgaaaattagtactctgaagaaatgcctccttcccagtgggatgaattcttatgtcacaggagctgggtttgactcttatctgtgagattaacctgaagaaattttaaaaacttgttaacaacttttagaagttggtgttggaaagaacgtatcaagggcataggacaggatttagggtgttgaaattaaatgtttgagaaaagttcaaagttatatgtctggagaacagaacaagaagaagaaaaaactcggaggagtctgaattttagcttgtggatttaaagtagaaaaatatggaaataggcattatagtaccattgggggaatatgagctagttttaattcatttaatacattaacttagaattgtcatatatgttatgtggaactataattttctaagaatttaaagagtagttggactacaacaaaattcatctaatacctgtgttaaacactacttaatctgtctttgataaatcagaaggttctttggtatcctaagggtcaataaaaaagaaacaatagtggttgtctcaatttccaataaatgtgtgttcattttataagaaaaataattgtatatatgtaggaagtgcattacaaacatatgactggaagacataattgatggcttctcatatgtgttagttttttggttttaaatatgtgttcatgtataaagtgaagactgtttctcccaaggtagaaattctgattgattatccgtttctctgcttgttttaagattgcctgccttagtgtatcattcaaaagggcgtttacattatatttttttaaaacctaagaggtaagataaagattgtaaaacaaagctttcatataaaatttaataattttgcagtaggcttataattttaataatggtcaaaacagacacaatccatctattcatcttgaaatgatttttctaattaagtagaaattaaaagattcaatatttttcaggcttggaagtcctaagcgatgaccctgatctagtgaaggtggttgaatctttaacttgtggaaagatctttgcagtggaaatacttgacaaagctgacattccacttgttgttctgtacgatacctcaggagaagatgatatcaatatcaatgccacctgcttgaaggctatatgtgacaagtcactagaggttcacctgcaggtaccactgtgatcactgttgttgcttgttacacattttgtatgagagaaaaatcaccagaatattatacattttaggctaacaattgatagagacagattacatttacattgaggggaaaaaaggagggagtggggctagaagggaaaaaagtaccaaaatgttcagagtaattgtttcttaggaactggattttttattttccatttcctgcaatgagcatctattgattttatatgagattattttgtaaagataataaggaaaaataacacaaaagaagggaaaattgggtccatgaagatgttgattattagctttaacttttttttaatgtgaagaacataaatgccccaaaagaaggaagcctttaaataaattatagaatatctacccaagagaataggatgagatgttaaaaatggtcattttaaagatttcatagaaacaatgggaaaacttctgttttaataagtagaaccactgtgaatgtctttattatggtttgactaaaaatgggtaaaattgaatatttactttgattatggttttttaaaattactcaaattcatatgacctctggacacaggttagaaagtagactgatgatggatttgattttgtgagagtttattttcacttctgttaatgttacaaaacatggtttatgtaattctttttctaaataaatggggagaaaataaaccaacattaaagatagtcttggcctttcagacaatggagtatgggaatgtatgcacaatgtctattttgtgcttggcataaatgatattagacatttcttttaaaaagaaaagaatccaaattagttttgtacatttaagctataaattgcatttcatcttacatatactctaacttaaagattttaaaatgcaaagacttgttatgggatgtttaggtagataccctttaggtaggtaagagctgcattctgctctcaagcattcacgaggtatcctttgtctgttataggttgacgccatgtacacaaatgtcaaagtaactaatatttgctctgatgggacactctactgccaggtgccttgtaagggtctgaacaagctcagtgaccttctacgtaagatagaggactacttccattgcaaggtatagcagaacctcttctacctctaaaattagccctaaaattacaagcaagagtaatttactaaattgcataagtatgaacaattttttttgtatgaacgattttttagtagtctgaaatggaatctctagaatagtaggtaaagagctccagacttcagagctttaaaagaaaaacacaacactagtttctgcaatgtaaaacgaagatagcaatagtgtgtaccctataggattgtcctgaggacactgtgcctggcatgtagtcagtgcacagcaatcggtagatgtgttatttataacatgcagttgatgatgccacagtgcagctgcctgtgactgtctgctagagccagctgactcttctgccttaggcaaggagaaaccttggaatttaggaggataataaaactttcctccttagttctgccttcatcttcctccttacccatcactccttgagctctttatggaccctgagaacctgccacctgataaatttggttctgcagttcaaattgtattaataagctccttatcctttaattctactatttttttctgaatcgagctctgtagaggttttattgtgctttaagttcctaaaatggtttccttacctccattaggacattatggtcatatttcagaatatgctgtggtttccaaatcactaaaccctactgccacttctgcccttaccccctcgtccctggaagtgaactcttccctctaacccacaaagcacatcaggcacctcagggcattcatattcaggtttatattttagctatttgggtacttatttgcctttctagaccgtatgcttcttgagggcatagactgtgccttaccaattttctgcatcccttacagtatctaatctagtgtcttatgtagaataggtatgccaaaatatgtgccgaatcagcttaaacccgcattcaaagtacagtctggaattgagacattcctatagctttatcttgttctgtgttacagaggtttaattttaagtctatctttgaaaaatctgaaacccccagcttggctgactctagtgactcatttgtatggatgttgtccttataacctttggtggtgaaaaggactcgatatttcctactgcactcgtaacctaagtgagacattgcctttggggagagtagaaacacacaccctgaacagaaagagaccatggacaggtacccccaacttcaaactacagcagaagaggaagatgaggagacttcatctttacagctgtgatttgttggtatttaactggcactgacatacatatttgtgttgataacatttctttgttttggaattaaaatgttatctttgcatctaaatgtgaagagatgaaaatgaaaagaataggcccacagacagctctcgcaacctcctcactgttcttctttttgtcagattcaacacctctcttcatgtgtaactgatggagccagtgcctaagtgaatcataatgatcttatgctaatgtttttagacatgttaacaatgctgatttatgagccatgtgcatgtagggagagtaaactactgatgtcaacaaatgtatgagtaacaagacaaaagttttataaccctgtgtgtttgctgcatccattgctggaagtctgactacatgtcggttaagtctgccagtgccacagcgatctgtttttctaatggtgtagcaatatgctctttgctaagagtaataagagtatcatgcatttctgttttgcagcacatgacctctgagtgctttgtttcattacccttctgtgggaaaatctgcctcttccattgcaaaggaaaatggttacgagtagaggtaaaaatcagtcacttggctttttaatcttaacttattgtgaaatatttcaaatatacacataggtttttttaaaaaattgaataaatactcacagactcatcatcagtttatgaaataaaacatgaccagtatggttgaaatttcctggttgaagttatggtcgaagaaagtttacatctcctttcttctgcctccaccccagtttcatttgtgtttttctcattcttacttgtttatattcttactgtatttgtacttgtagatacacacttttactatatatttttaatatttaaatagtggaaatatattaatgaatatgtgtatataatataaaggcaaatgaataagtgtaactaaatgaataaatattttcaaactttatgtaagttgtaagaggtattggtcatgctttttcattcattatgtttgtgagattcattcatgttgatgtgtgcagctgtagttcatctatttttactgctgtatgattgaacactattaatatgccaacgttatcactccatcttcctgatgatggatatttagattgttcctaattttttgaaccttcctgtctgtgtcttccagggtacatacataggaatggagtttctaggtattgggaatgcatatcttcaattttactagatcttgcttaattgctctccaaagttgccttccattgagagtatatccctttaagaactgtggcttcatggggcagtgtcagatcctccctgcctcctgcctggatctaaggccatgtctcctgcccaagacaattttggctttaaagttcacatactcttctatttctagtcactaacaattgtcttattttcttgcaagctcagttacgaacttgaagggagttttgttgtggtttatcttgcgtttctatatgtttttaaaaaggcaagttttggatttttgtgattgctttccctccctctcttcatctagtttgaggtggcacacacctataatcccagcactttgggaggccaaggcgggaggatcacttgatgtcaggagtttgagaccagcctggtcacaatagtgacataccatctctacaaaaccaaaaagaaaaaaaaaaaaaactaaacaaaaaaaaattaagaaaaaaacattggcttgattttttttttcttttttttctttgatacagaggttcttaacctagatgcaaggacctcaactttcaggggggtccctcaaccctcctggaattgtatgcaaattgtgtgtgtgcttgtattatatattttgggggaaaagtatgcataattttgtaagattctcaaatcaacccccaaaaggtaagaatcgttgctttactgaattttttaaatgctgcacagcaacattttgataacttaattgaattgatttttttcattatttaaataaaacttggtcatgtctacttgaatgagagtagcagttttgaagtaattattgctattaatgtgactgtatgtcagaaggctgaaatctcgggtcatatgaccaaggggtatgtgcctaggtataaacttcaaaaacatgactcgttgaaaaggtcatggcattcttcagatcttaaagttctgtgtgatttaatttaaaatatataagtgtatgcatactaactttttcaactttttattttgaaataattttccttttttacaagttgcaaaaatagcacaaagaggtctcattggccttttaccttctcaaatgttaacatctatataaccattgcataattatcaaagccaggaaattgacattaatacaaaaccattagttaatccacagaacatacatttcccaaattgtcccacaaagtactttttctgctccagcatacaatctggatcccacattgtctttagttgtcatgtcttcttagtatactccaccctggcagttactcagcctttctttgctattcctgactttttgaagaatagcattatgttgtaaagtatctcacaatttgagtatcttcatgtttaaatttaggttatgcatttttggcagaaagaagccttcttagtgtatgtccaaatattttagataaatatctagtattatttttgttattatcaaattgtatattgtctaccttcaaggtagacaaaaggtttgagtactcattctcttagtgatgtatggaaagtcagagaaggaaaaataattagtgaaaagcagatcctatgtttaatcatgtatttattcttgatagttatacaaataattgcaaaggtaattattgttttgaccccaaaacaatagtttttcccttatattttaatattttggagaacagactgtatcttataatcagcaatatataataatgtatcaaatcattttataataaatcacgtcctagaattggagaaataataaatattactatacttattttactgtttattgtcagtttgctgattattactgattaactagatgttgaaagcaattctactctaaaacaatgtttagtaggctgggcgcggtggctcacacctgtaatcgtagcacttgggaggccaaggtgggtggatcttttgaggtcaggagtttgagaccagcctggccaacatggtgaaaccccatctctactaaaaaatacaaaaaaattagctggttgtggtggtgggcacctgtaatcccagctacttgggaggctgaggcaggagaatcacttgaacctgggaggcggaggttgcagcgagctgagattgcaccactgcactccagcctgggtgacagatcaagactctgtctcaaaataataataataataatatttagtaaataaatacattttaaattaggggaaaattttaacactgatagtctgttccttttaatatgcattcaggattgtacaaaatgtaattgcacagaagcattttggtcttttgaatatgctaataaatgagccaacacttatctcatttcagatcacaaatgttcacagcagccgggctcttgatgttcagttcctggactctggcactgtgacatctgtaaaagtgtcagagctcagggaaattccacctcggtttctacaagaaatgattgcaataccacctcaggtactatgttaccagcctgggagatttgctggaacagatttggatgtgttcataatcttattgtaagatgccttctcagttttgatctcattaatttttaagaaaattggaaattgtccaaatgtggttgtctgctggttttcagaagtaaaacattgctgacttagacaagaagaccagtcatatttacatactgttgtttgagaaatgtttgttttcaagagcatccagtcattaagctgtgttgtccagttacaggttccattttgataattagatgccagtactgacttatgtacagttccagaatattgtgtataaatgtttatttttagagtttttagtttatttaggtaaccattttctttggaaatctgtttagacataatcattttctcggtgacttccccaccatacattttaattaaaagatgaacttcggctgatcctttctttattcatgaatgttcagatgataaggattttgaatattttgaattgtttagaactactcactacctttaggagaaatagaggattttgtgcagaaattaatatcttttaaaaaataaaacaatgcggtattctacaacttcaagatgcccagttactaatattttcaagaagacatcttctgccatcaaactcagtaaataaaacattgtccataattagcatggcttttgacatgtctctccctcccatcaccattgctttttctagccgtgactattacagagaagcttttttcaaaatcatttttactgtccattgttcagccataattctggaaattgatgggcctttaagtgctactctgacttaataatacctcttgttggaacagccatgcagggccaggcttacctagaaaagatcccctgggctggagggcagttgggaatctgtcccaccgctgtgattgtctgaaagtccacaacagtaccacctgtatgctacggcattaacaatcactaaacttttttttttcataatcttgtgtaggtttattatttgacaaatgggaagactgttggttgggagtactttaaaagccagccagcccaagcctctggctcacaacatctctccaagagtctaaatcagagtaccaaactgatggactgtaagccaaagccaacccttaaatactgagttttggctcttggctcttacagtattttaaaaatgtgaactggttgccaggattttaaaattaggaaatttcacacaaaaattcctacttctagcttctctcttgacaaattggaaaatctgactgctgagcactcttcttgtggggaagtgctccttaggagtttggggccttctcctctgctggccccatcgggtctgccccactccctcgttgcctgcccagcccctgcagatattcaagtgtgctgcctgctctaaagtgacctcctctccaacaagaaaggtaccacatccagccagcagagcaaggaaaggcttagagctcctgagggaggaaggcaggaagacaggaaggggctcagagaggaaaaggaatcctggaactgggtttcatccccttcacaaaattgtttccgttgattcgagggtttgcttgaagctgaaggaaatccctgagttcactttttagcctctgttgtagccattctacagatgcttgtatagtggtggtaggagctaaaaagcactggggaaaatgaagcttttagggacctgtggatttcagtttttctcaccctccttagttctcattacagccttgttcaaaaggcaaacaaatgtgcctggtacccacgaggtactcaggaaatgctgaatgaagcaacaggagtcagatttcctccaaatgacaattgatttttttttttttttaagttgagctagagggtagaccttgataaaagtcccaaccctgtctttgcaactttggtatcttatacagtctttctgagtccatttccccatctgtgaaatggggctgcaacacctgtcatgcagaagtattgtacggtgggaagtatatggagtgctgggggtaagccctggctcataaaggagtaaagacaatagtagttatataaatagagttaggaacatagcagatgctcaaaccaggaactgtgattgtcgttattagctgttgttgcttgctgtctatcttggtaccatttgatttgtaggaaaataatattaacattactcataactaggtattttaacatggtgtgttcacttttccatcatattttcttttcaggccattaagtgctgtttagcagatcttccacaatctattggcatgtggacaccagatgcagtgctgtggttaagagattctgttttgaattgctcggactgtagcattaaggttagctatcttgttgggcctgatacatttagaaagggagctggcagctgtcagggctcatttagtttttgtgaaggaattttatctcactgtaaaatggatgcttccacatccaacacattttttatattcagcaaattggctacatgtgtagctgtaagatattttatggtttaattcttatttaagaagttatcctgtctctccagtattatttttaaatccttcttataatttttcccattattaatgtagaagagatggttctccacttctgttttgcttcatgataagggattaagtccccaacagagggaccacagatctcttgataaatgtttctaaagatcatttaaataagtcctctatttcttttttattcacaaagtagaatagattataaacaaatcatttatttataattgtggttctcagcctctttttcctaaagtttatttaatctgccatacttatttcactagctcttgtttctttttctgtacttttgcatctttaaatcaaaaacattgctcatatatccaagaatacaaatttaagaagatagtttttctctgttaactgatggaaattgtatgactgttttatataaacatttaaaatgaaatgtccttgaaaaatatcttcatgaagacctctaaattattctagctagcagtgatttttctgtctttgtattcctctggggtttatagtgtacaattacatgcttaattatatactattccatattcttcagttgtcacatgataatactgttttctcagctactctttaagctcctaaagccagaatattggatggttactcaataaaagtactttttgttaatttttaaaactgtacttctgtattataaatttcaaaatgaatttgcagtcagtatttaattagtacttcagaggatgaatgtaatagaggcatcttgttgggaaaaaaaagaaattttaagtaaatcactgtagatgggttgccttgctgttatctccctctccgcagacctgtgttcctgcctttcatttctagccctatttggtaaaagataaatgtggctggaagtatcttatttttatcattcctaagataaaccagagttgctgatgagaatagccaacagtcacctagctccttgggacacacagcagtacagtcccaattattaatgtatgatatttccatacaaacacccctctggccgaaagagcaaagatggttaggtagtcagaggtctcctggacaaaaagtgtaaaactaattttgacccgttctgtggagcttgcttcctctttttctccccaggtccctctcctcccatgtaattggcgatggggaaaggggtgaggacatatactaggaccagacaaggaatttgaaagaggggtgcttacagatatggtggttgtcagagctttttccttcccttcccagtcttgaggacacaccagccttaagcagaacgctcataaatcattttgccatcattgtgattgttttttattattgatgctgggtgatgagtatatcagggttcatcatacttatcatttctactttaagtgtttcgaaatatcattaatttaaactattttaatcatgatatatagaatcctttctgtcaatgataatgaccttagcaagttataaagttttctcagactttttaaagattagtaaattttttatttccataaggctgcactgttccctagactattttgacttcagagcccattcattgccaagctgtgataatttatttttccttaaataaaatggattttagcaagggttttggcaaaatactgtgttttaatgattaaggttactataactgcctctcaaaatttaatgtgaacttgtatttcttatatcattttttgtgttttccaaaggttacaaaagtggatgaaaccagagggatcgcacatgtttatttatttacccctaagaacttccctgaccctcatcgcagtattaatcgccagattacaaatgcagacttgtggaagcatcagaaggatgtgtttttgagtgccatatccagtggagctgactctcccaacagcaaaaatggcaacatgcccatgtcgggcaacactggagagaatttcagaaagaacctcacagatgtcatcaaaaagtccatggtggaccatacgagcgctttctccacagaggaactgccacctcctgtccacttatcaaagccaggggaacacatggatgtgtatgtgcctgtggcctgtcacccaggctacttcgtcatccagccttggcaggagatacataagttggaagttctgatggaagagatgattctatattacagcgtgtctgaagagcgccacatagcagtggagaaagaccaagtgtatgctgcaaaagtggaaaataagtaggtccttggacaaagcattttattctactcctaagaaaaatgtgtaaaatgatgccagagtcttaatcttggcggggggacttcgaactgtactaatgggaattttgaatgtgaaacaaacacagtaatttttccgattttctagtatttaaaatgatgtcacttatcaaaaaatctattggccatattcctgttaaaacccaattatataactaaaatgaatgtttaaatattttttctatttttctattagaaaaatatttttattcagaaaataaccagattttttcatttaatgactttttattttaaaaataaaaatattatggaaaaattttaaaatataaaaaaagcataagaaattaaaatcaaccacccacacataacacttgttaaactacttatgtatttcctctaattttatatgtgcatatttatatagttggtatattattagtatgtataattttgtacctgcttttttcacctaacattatgtcatgaacatttttccatgtgataaaatttcttcaggaacctttataatggctattttaatcatgatatacagaattcctttttcccaatgaaatcataatttacttaccattctattttgttatgtaaggttttctctcctgtatttttcactattataaataatagtgaatgtaaatctttgcatttctgattatttatttacgggatagattcctagaagaaaagtcacttgttggaagatggcaagactcttgctttatgttgtcagctgcatcctggcatctgtgccatctttcataaggagcaacaatgcttatttcactactctttggccttggggctgtgagaacatactttctcttacatttctttagcgcttcagtgttttttctaatattttcacatttgggtccacaccctcctccccaaagccctgcaggatgtgctggtttcatccaagtgaagcccagacaccccactgtccactttccactcaggccatgaagccctgggaaatggcacaatgcccatcctgttcctttgccagcttgcttaggagaaatgaacaagcttatttatcaatgctgaacacaaagaacagtcacccctccccaacacacacacacacacacacacaccccaaaactcagtttaaaaggtcaaactgcttattttttatatgaaatgttttaattctttaagatagcaaacataggcatgtataaagttttgtcattttcatgggagaaaaaaactaatttttaactctcagtgaagcgtataaaagctctcatttcgaaaaacatacaatttgtatgtcataagcttttcttctctaaaaaaccatttctactgttgtgttatttataaccacaagcataaataggtttaattcagcttgtgtaggtttgcctcaatcagagctctttgtaagataattcaatcacagttaaaaaccaaactaatgttctggggggcagattgatgattaaaggtgaggagatcctccttggagtaaaggggttgggtaggaaggagaacacatcaactggagagctccaatatgagcccttgcactccccactctgccctccatggctttgaaccattctgccccaggactcttggactttagttaatttgtcccagataatcaagggatgttttgtatataaaaacagataatctgatttttttaaaacttcatgaactgaatcagtataaaatgtttagaacttctgtcttccttaagactcaggactatttactaaactttgttcccaactatggtaagttaagacttagaaattttagatacatatttttattacagcggtttccaaatctatcgcagcataagaacaacttggaaaacctattaaaaatgcagattcttcttccttaccccaggcattctgaatcagaatctttgcaggtggagctccagaatctgttgttaacaaattccaggtgatgccagtactgaattttagtaatctagtcaaaactgaagtcttcccttaagctattagttttgaaagttgaaaactaaatagaaatacaacacatcagttttctgggactctctcttcactgccctataccacttatttatggactaaaaacacagaccaccaccaatttgccctgtacaattttaagatgacgctgttggtggaaaccaagtgtttttacctccttttgtgcttacacaaattagcaacctacaccgaaagtgtttccacctgtgaaaatttctcttcagtttgatctgaagttcttatttatagtagcttgtcttcattttaataataatgatgataactatcatttgccaagtgcctattattagccaagtaatgtcccaggcactttccatgtattatttctgtaagtgaatttacattaaatattaaacatgagatgattgaggctcagagcttaaatgaagagcccaggtgggactctaattcaggtctatttggcccccaaaactcatgtacatactatgtatcctttctgtgtcccagttgtctctgggactcatggagtattgcttgctgcactttgagcctgtctgaaagtttctggagttccctcagaagcccccagttacagtgttgaaagctgacctttttgtttcggggtttctctgtagttcatcctatagcagctgcatgggtttcctatactaggtgtatatgggctggagaaacagtccattccagccagccccagtccagcagtgtgttgtggtacagggcttgctgttctggtgggcttctggctggcaaacctgttccagagaatgactgaccatgccacctgaactagaggccaatttccaccatttagcagcagagaccacctccatagacactttctttcagctgttaggaacaatcttcctttccttcatgtagtaatactttttaatcatgtatttgagactataggactttaaagtgatctttcattattaaccttgaagtctgggtttttctcattttaatgatgttgatgtagcttctgtaggggtaagtagattcctgtggatttccttctggtgccttgagctccagatctgaagccatactccacctccctcatactcctctaccttttccaggttctttattttaggtggtgggttgaatcttgtgttttgttctttttttaatgaccttgtcataattaaaattgcaaactttttttgtacaaaactgatttgatctgtccccagcgtgccttcctagtctgacttctcttccattcttccacacattccactctctaactatactggaaggtttgctctgctccaaaacactatgccctctccagtcctctgtgcttttcttctcaagcatttcttcatccccagctggtcctgcttgcctctctctttccatcgtccaagcatgtaccatatccaaacatgtggccatcttctgtccaccctccttcagtgaagggatcccctggctttgtcctggtcatcctccatggtgtttgtttcttctaattaatgatggttgacagtttatatgtctctttccttcactaactccaggggcttataaaagtctcttgaatgagcaaattctatcaaataagacagtggcaaagcagagaatagtaagctttggaaaaaggagcaggaaatgcttttaaaacttttttgaaaatatagttttaaattttgataaacataatttgcattaatttttctttttatcataaaatatttcttgcccttaaagcaggtactgagtttatgtgttttctcttcctttttaatttaatgtacatctaggtggcacagggtgcttttaaaaggaatcctgaccaatggactggtatctgtgtatgagctggattatggcaaacacgaattagtcaacataagaaaagtacagcccctagtggacatgttccgaaagctgcccttccaagcagtcacagctcaacttgcaggtaatttctgtggaatctgaactcatgctacaacaatgcaatattgtcattttatcctgggtacttagcaagtactgaatcattggcctcttgagtttaggtatgttgggtttttgtttttttgtgctaataatattgcaaccataatggaaataattttaatgatgtcttacagtcgtgctctatcattatatctgctgtttctcttttctctactccttctgtctctggtttcaagcatgagtatatttctaaagctgtgatcttagtacagatataatactgcattctgcttttcttcatctagtgttgttttctaatgactttctgggtggttttatggttgtcctacttgtttttaatgggtgcaaaaattctatctaatcaatacttccctattgatgaacatttttattgtaatatcaagaaaaaccctgcatctttacactagctaaaacgaaccaaaaaacaatggaaacaacctattataataaccagtaggaggatcatactttattattatcgcataaattataatacatctacataatagagtattatgcaatcttaaaacattcctgggtcatggaatatatgaccattttcatgaccaagtgagtttccagtttgcagcacaactaacagcatacaagggagcaatttcaccacattcacatcagcctcttgattgtcattaaaatgggaggaaccaatttaacaggcatacaatgacacttccttgtaatgtggtctaatgagacttcccttttatcttttgtgaaagcaatacaactgttggtggctcccctgtgagcaccctaccattatgtagcatgaacagctggatgaagctcaacccagaggccttgtagcgttagcagaggtttttgaggcccaaagagttgaggggtgcctccctgatcactttgctgctgctcacagtcctcagcaccttgccccatatgtggaacacagtgacagaagtgatgtgatgtcagcaatgaaagaaattgtgtatataggttcttcttttacttattgatcagcttttattggaagcctgtgtattgccttattttgaaatattgccagcttctctgtgtcttcctactagaattcaaaggcaaatcctatggtaattggatataaagcaaaaataacactgtcatgtagcatggccaccagttagtgtggtttagattcagaccttcttcttcagatttaatggtttttttttttttttttttgttttcactttctaatgctcaggttttcctaacaacacattttgttaaatgtgacagttatactccccagagaaggcttctctgtgaagaatgagtgcatggtaccatcatccccatcaccagcattgtggctaagagttattggtacttatggtgtgctaggcgctctaccagtcactttagagctttcttcctgtttaatatatgcattcggtgctacaagtttccctctaagtacagctttggctgcatcccacaagttttgatgtgctatattttcattcagctgaaaatactttttcatttctcttgaaatgtatcctttgacccatgtgttatttagaactgtgcttaatctcttaagtatttggggattttccagctatctttctgttactgatttctaatttaattccattgtggtctgagggaaaacattgtattatttttaaattgttaatgtgtgttttatttcccaaaatgtggttcgtcttgatgaatgttccatgtgagcttgagaagaatgtataatctgctgttttgagatgaagtattctatagatgttaattacatccagttgacttatgatgctgttgagttcacttatgtccttacttatttttatgccttctggatctgtccatttctgataaaggggttttaaaatctctacctatcagagtggatttttttcatttctccttgcagatctatccatttttgcctcatgtattttgatgatctgttattagatgcatgtacattaaggattagtatgtcgtcttggagaattgacccctctaccattatgtaatgcccctctttatccctgataactttccttgcactgaagtctgctttgcctgaaatgaatatacctactcctgctttctttcaattagtgttaacgtggtatatctttctccatccctttacttttactctatatgtgtctttatatttaaagtggtcttgtagataatatgtagttgagtcttatttttttttatttactctgacaatctctgtcttttaattggtgtatttagactattgacattgaaagtgattattaatatagttggattaacatctaccatatttgttactgttttctatttgttttccttgttctttgctcttatttttgtcattactctttttctgctttttgttattttaattgagcattttaagtaatgccactttctctcctttcttaggatatcaattatatctctattttttccttttcttagtgggtgctctagagtttgctatatacagttagaactaatccatgtctactttcatgtgacattgcactgtttcatagacagtgcaagtactgtataataacaaaataatgttaattccttcctccaggctcctgtatcattgcagtcatttacttcacttacatataagcagatacatgcacatgtgcacacgtgcacacacacacacacgcatacagaatcaaatacattgttgctattattttgaacaaaccctatctaatagatgaattaagaaaaagaaatataaaagttttactttaccttcacttattcattctctgattttctttatgtcgatattaatttctgacctatattattttccttctctgaagaacttctttaatatttcttccaaggcaggtgtgctggcaacaaattctcccaatttttgtttgtctgagagtctgtatttctcctttacttttgaaggataatttcataaggtacagaactttagctggtgggttttttcctttcaaccctctagtctcttcttgctgcatgatttctgaaaagtcagatgcttctctgagaagtcagaacaaagattcttatctttgttcttctatggataaggtggttttttgcttctggtctctttcaagacttttgttcatctttgattttctaaagtttgaatgtgatatgcctagatatattttggtgggggggggggcatttatcttgcttggtgttctctgagcttcctagatcaatgatttagtgtgtgacattaatttggagaaattctcagtcattattgtttcaaatgtttctgttcctttctctccttctagaattcttattatgcatttgttacacctttgatagatcttggatttttgttctgttttttttttcagtactttttctctttgcttttcagttttgaaagtttctgttgtcatatccttgaactcagagatcttccctcagccaagtctaatctattaagaagcccaagacattcttattttcttttatagtgtttctgacctctgacctctagcatttcttttcttttcttttttttttttttttttttttttgagacagagtcttgctctgtcacccacactggagtgcagtggcacgatctcagctcactgcaacctccgcctcccaggttcaagcaattcttctgcctcagcctcctgagtagctaggactacaggcatgcaccaccacacctggctaatttttgtatttttagtagagacaggctttttcaccatgttggccagactggtctcgaactcctgacttcgtgatccacccactttggtgatcctcccaccttggcctccaaagtgctgggattacaggtgtgagccaccacacccagcccacatttctgttttattgtttcttagaatttctgtgtttctacttccattatccatctgttcttaaattttgtctgcttttccattaacactggtaccgtattaatcatagttgttttaaattcctggtctgattatttccagcattcctgccatatttgactctgattctgatgcttgctcagtctcttcaaactgtgtttttttccttccatatcacttgtagttctttgttgaaaggtggacatgatacattgggtaaaaggaaatctgggtaaataaggcttttgtaatgtagcagcagcaatgtgtgtctggggtgtgagggatgttatgtagtcctatgattaggtctcagtcttttgttgagcctgtgcccctggactgggaacttcaccagtgcttcttggggtctttccccctagcttaggtggagcaggatggctagaggggagtggagttgggtatttcccttcccccaggaaggttaagctctataaaaccctgtgaggtcaggctctagtaaaatagtttcttctgaggacagagcttgttaagaaaaacagaaagctctggtgtatttcaaaatgttccttttctcctcccccaactggaagcatgaggagatttttccctgatattcactgtgagtaccaggtagtgcttctggaggtaaaactctcaaaagtgtgggagacagggccctataactgggttcccctggagtttttaactctcagacttatttacatgtacccctagcaatttgtcagttacagtttaggtttccctcctctggcttccaggcctctgctcattggtttctgctctagtacgctttgactctcagtatcttcctgtctgtctctctggttttggggacagtgaattgccctgtgaccttccttctctgatggacctaggagtagttgttgattttctgtttgttcagctttttgtttcttattaggaggcagtagcaacttctaagctctttacatgccagatcggtaggcagaagttctaccaactgctttacttcattgaactctccccatgctaggaggtttaggtactgttactataactgttatacacatcagggaatagcagcttagtgaagttaaatatcttgtccaagatcccacaccacagccttaaactcagcactctgcctcttcagtgtgtgcctttcttcactgtatacttccttctccatgaaaagtgtggtttttgaagtcaaaaggctgagattcaagtcatttaacttctaaacctaccccatgattatttataaaattaccagtaaattcctatcctgtctatgtgactgaactaatatgtggatcagatgaaaaagtgaatatgaaattgccttttgaactaaaactcatagtccaaatacatgaaagtttctttgtacacttacatctgaaacagcattgctgttgggtcccatccatgtcctgagttccttttctaggctcacctctgccaagccttctttcttccttttgacttgctcctaagtcacaaaatcttcctgggtatcacattatccattttgaagggaggacctccattttataattaattgaaaacatatgaactggaactattaaactatatgtggcggagagtatgtctctcttgggccaacataggcatccactagagagaagcgaggtagactagaagtttcatggaagtcactggttgtgacatggccattggagtcatcactttggtagacttggttcacacctagccaagccctttgacatatttaggaatatctctagatgtaaaggagctctgtggaatctaagtggaacccatgggaatgccctgagtgtttaaactggaatgctttaaggattctccagggaccttgggattaccccttactcgctcacaaatgggatcactggatgcccaccctttcaaggttcccagtgtattgggggaaatttcagccagatatcgggtaaaattcacccccgatatttcatgtaggttcttttctattttccctaagtgtcggccggtctgagaaataaagggacagagtacaaaagagagaaattttaaagctgggtgtccgggggagacatcacatgtccgcaagttccgtgatgccccctaagccgtaaaatcagcaagtttctattagtgattttcaaaaggggagagagtgtacaaatagggtgtgggtcgcagagatcacatgcttcacaaggtaataagatatcacaaggcaaatggaggcagggcgagatcacaggaccacaggaccggggcgaaattaaaagtgctaatgaagtttcgggcacacgttgtcattgataacatcttatcaggagacagggtttgagagcagacaactggtctgaccaaaatttattaggtgggaatttcctcgtcctaataagcctgggagcactacaggagactggggcttatttcatccctacagcagtgaccataaaagacggccgcacccgaagcggccatttcagaggcctaccctcagggacgcattctctttctcagggatgttccttgctgagaaaaagaattcagcgatatttctcccatttgcttttgaaagaagagaaatatggctctgttccgcccggcttactggcagtcagagtttaaggttatctctcttgttccctgaacattgctgttatcctgttcttttttcaaggtgcccagatttcatattgttcaaacacacatgctctacaaacaatttgtgcagttaacgcaatcatcacagggtccctgaggtgacatacatcctcctcatcttacaaagatgatgggattaagagattaaagtaaagacaggcataggaaatcacaagggtattgattggggaagtgataagtgtccatgaaatcttcacaatttatgttcagagattgcagtaaagacaggagtaagaaattataaaagtattaatttggggaactaataaatgtccatgaaattttcacaatttatgttcttctgccatggcttcagccggtccctccatttggggttcctgacttcccacaacaccagtgagttgttgcttcattacatctggccttgacctgggcattctttgcatcagtgcaccatggccatgcacaaaattttctgaatcctagaagaaagggagccatactgtggaatcatcttttaccttaccaatgggttaccttttttcttcttaaataacatggctcaaagattgtcagggctgctgcagataaaatgaaatttctaggcttctcttgtgggaaataaataatcaaagaatttagcccatttgctatatagatagcaagtcttccaaaattatgtctgaaatttccatatcttaattactttggggcataatttacagtttatgtaatccagtatatgtggacttaattgtatttcttgaaatatgtatatatatatgtatatatatatatatatatttttttttttttcgagagggtctcactttgtcacccaggctggatggagtacagtgatgcagtcacggctcactgcagccctgacctcccaggctcaagcgatcctcctcccttagcctcctgagtagctgggactataggcacaggccattacacccggctaatttttgtattttttgtagagacagggctgggctatgttgcccaggctggtctcgaactcctgagctcaagatacctgcccgccttggcctcccaaagtgctgggattacaggtgtgagccactgtgcccggccaatgtgtactttcttgtcccagttttgttttaaaatcgaatttagaattctctaacttgatttctcatgatctgatccaatcaggttcttttatcataggtgagatcagctgatttgcctaagaccacaccacccgatagaggaaaagctgggaatagtaactgagtctgttgactttcaattcagtgcttttcccacgatgctgtgtataattttaaataactatactgtaaatgaatcatacaataattctttttttttatgatatttggtccatcagaaaaaaaatttttaatgaaagaaatgtcatttaatatgatattgatattttattctgttattagtttaaatatgcatatactttatgggggttgtacagtagtcattattacctcattttataatacaatgttaagtctcaaatgaaacttgttttttagttaaagatttccagagtgactccattcagagtagaaaaactataagctggagtgttttaagattgttcagtaaccgtttttcagttcaggcaagtctaacctgggatgcttaagttactttggaattgactaaataattttccatcataatggatcaaagaaaagctcctttgactcctcactgctccctcttcttcctctcttcctcctaggagtgaagtgcaaccagtggtctgaggaggcttctatggtgtttcgaaatcatgtggagaagaaacctctggtggcactggtgcagacagtcattgaaaatgctaacccttgggaccggaaagtagtggtctacttagtggacacatcgttgccagacaccgatacctggattcatgattttatgtcagagtatctgatagagctttcaaaagttaattaatgactgcctctgaaaccttgacaactaattcagattttttagcaataacaaaatgtagtaggcttaaaaaaaatcttaactctgctacatggctctgactgctgtgggggattgaaaagaatatgcttatgtttgatgaaagatatttaacaagttttgttttaacagagttgacttttcaaagaaaattgtacttgaattattactataatattagaataaaaatgtttatcaatataaaa

SEQ ID NO: 1279 - DNA, 139537 bp, Homo sapiens
acttgtggctctgccgctctagcccccggcggagccagctgctgctcttcggtgctggccccggtgccggccccgttgcccagggaacaggctcccggcagcccccgcggcccggagtccatcccgcctcctccggcccggcggggccgacgagtccggaggggctgccgcgggaggtgagtccggcgacgccgcaagcggccccgacgcccccgacgcccccgacgcctggccccgagcccctcctcggcctcccccgggccactcttcccttgcctcagccccgcagggtctccatgcccgtccgccccgtctccctcgcccgcggtctcgcccgcgcggagtggcggacactaaatgccacaacacacggagcgcctggctcgccgcccgcagaatccggcggtccgcagcggggaacaggggccgcccgcccctcctcaggcctccgctgcgcgtcccgcgccctcggcccccggccccaccctgcatcccggctgccggtctggccgcgggctctgctccttcgccttaagattgacgtcgtgttctgtcccccactcgcagcccgcgtcccttacatccgcccaccggcgcctggccccaggccttgacactcatccagttggtgttcagtgttcgatgagtggataagtgaatgactcctttcccaatcctatttgaaggcatgggaggcagaataggtagtaagtgttaaaggatggggtgtcctggagtcagagccgggcaggtcccagcggccccttcctagctctgtgctggggcaagtgccctacctcactccgctccagtttcatcaccagtggaatggagatgagaatagtttctacctctggcttggtaagaggattaaatgggtcagtgcatgtaaagttaagcacggtgcctgccgctgtacatttcagtaaaggggagcccctgctgtcatctgtgctagcctgcgttctcgccctctagtcccttctgatatgtctctgacttctcatgactttagtttctccttctctacctccatttctcttccctgcacttttttcttcctctcttattgggattcaggaattttattctgttctgtgacttatgttccatgtgttggcagaatgtgggataccagcctgggtgcatccttttctcatctattggagtgaccagttgcacttgtggactgcctccttgcagccaaggtcttgtagacagagttctgggaaatctcaaaacgcaaatcccaggcataggtagaatctgggaatgaagccactgtagctccttgtgatcaccagcgattcctggtcttttaggctgcaggactttgtgttttctcacacccagctataatgtaccttgataaacctctgaccttatttttgttgttgttgttgttaacctgacttacgtcccatattggtggttatttggccatcgtgtgccagcactgtgccaggctggctctagggatgctgtggtgaaccagacagacccttcctgaggtcactgcctcagaaagatcatggtctggcccatgaactttaaaagggagaactaagtgcaggtgtaggggacacacaaattgaattttcaggactgccttggaaaaccagtggtggggaagatggaatgaggataaccctcttctgaaggagtgactaggaagtagcttttgttaggcatcagctatattatacccacgtgtctttttcaatagaagactggcatctactggatttttttttccaattttttcttaaagaagttacacttaagtttggggagaatttcatttcatattagccgctgtaggagttgaaaaaaatggctactggaacttagtgggaagaaaaggaaggaaacaggcatcaggcagaggcagttgattgaacttgggaagatgaggaatagatcaggaaagggttataatgaaaagctttggtgtcaagcacgaagagatttctagattcagtaatgcacagagagatcagtaaaattagaagggagtagttgatggctttgcgaattgctaaggtagaagggagctgttactcaagatgcatgttcaatttaaaatgaatgtattctttggacctggacataagagttctattgactttttgccactattttatatttagggctgtcatacttgggtgaatctagcacagtgctttgagagagagattcattcaacaaacgtgtattgagcattgattgtaccatactctttattggtcttttaaagcaccacaaagtatacagactagaagaacataggtgaagatgagaaagagtccattgaaggggagagaaaacagataatgatggtgctgtgcgataactgccatcatggagttctgtgaaagcagagaaagaccaaccaagtatctgagggaatttatgaaggcttcctggtggcggaggactagttcttacagggcacatgtgggggaatagggaagagtggaaagggactttgttctgcagagacatacaggttatggtgtgtgcagggactgtgatggaaagctgatggatgcacaaacaaaacgtggcctgtctacacaatggaaggctgttcagcaataaaaaggaacgaagtactgatttgtgctacaacatggaggaaccttgagaacattaggctaagtgaaagcaaccagacacaaaataccacatattatatgattcaattttgatgaaatctccagaataggcgaactgtagacagagaggagatcagtggttgcccagggctgagagaagaagcgtgtagaggggtgattgctaaagggtagggagtgcacagtgtgtggatggaagagtggcctgagatgaagttagatatagactgttttgtcatagtgtctaatttccatgcttgtgttaggctttagcttgtgaccattgggtagccaatggggatgggagcaaggaagtgacaaaattttgtctggaagataaatgactgcctcagtctcattacgttcctccttaataatttaatactcaaataattaatagatgtcgtagccagatttcaaacatagattctacaatagggatacaaattgttgcttcctagggattttggagagaatcctgaaaccattagtgtacccagagcactctgataacatggttattgtacagcgaagtggatgacttagactctatattagtcctagctccagtttgagaaatcatccatctgggtggcagttgggtgttagtagtcagcagtgaaggctagctgccaccttccagggttatgagattgacagggctagtggggaaaggaagcatcgtaacttgaaggatgccatagggtggtgttttgtatttttttaactgaaatagtcatgactaaggaagcattattcattatatttttatttatttatttatttttgagatgaaatatcactctgtcacccaggctggagtgcagtggcacgatcttggttcactgcagcctccacctcccaggttcaagtgattctcctgcctcagcctcccaagtagctgggattacaggtgtgcgccaccacacctggctaatttttgtattttttagtagagatgggtttcgccatgttggccagactggtctcgaactcctggcctcaagcaatcctcccacctcggcctcccaaagtgctgggattacaggcgtgagccatcatgcccagcccaattttaaaaattggattgagactattgttttgcagtaagacctgaagttaacaaatctttactgagcatctactctgtgccaaagctattattagatactaggatttaccttggtaagcaagagagaattcatgttgcttacattcttgtaggagagatgatttttaaatggtttagcaaataaagcaattagaggttgtaatgaggattatgaagcacatatgatagaggaaagaagggacagttgggtactcttgagtgatctggtcagagaaggcctttctgtggtggtgatatttaagctgagaccccacagttgagaagaagccagataaatggagtgagatcatttattctgcatagaggaaataattatgacacctgagtgggacagagtgggtcagtggagctagaacttggaggacaagtggagacgggtagagaggtgacaggggagctgcaaagggcttagaccacacggggcatttggtttttattcttagagcactgggcaaccagtgaggagttttgagtagaatgggtagtatggtctgatttctctttgaaggagctgatattttcctttgttttttggggggtaacagctttattgagatataatttacatgccacacagttcacccatttatatacaattcaatggtttttactgtattcacagctatgcaaccgtcactacgtcaattttagaactttctcatcaccctaaaaggaaactccgtacccttcagcaatacaccctaaccccttcttctcccagccctgggcaaccactgacctactctgcctacagcttgcctattctagacattttgtatacatggaatcatataatatatggtgttttgtgcctggttgctttcacttagcataatattctcaggattcctccgtgttgtagcatgaatcagtacttcattcctttttattgctgaacaggcttccattgtgtggatagatcacattttgtttgtccattcatcagttgatggacagttaggttgttttgacattttggctattatgagtggtgatattatgaacatttatctacaaattctttgtagatatgttatcatttctattgggcataaacctaggaatagaacttctgggtcacatggtaactctgtaaccttttgaagaactgcccactggtggctgcaccattttatttttcaccagcaatgtatacagttttttccacatccttgctaacacttgttcataccctagtgggtatgaagtggtatctccttgtggtttcgatttgcatttccctgatgagtaatggtgctgaacatctttttatgtgcttattggccttttttttttttttttttttttttttttttggaaataaagtctcgctctgttgcccaggctggagtgcagtggtgcgatcttggctcactacaacctccacctctcgggttcaggtgattcttgttccttcggcctcctgagtagctgggattacagatgtgcgccactatgcccacctaatttttgtgtttttggtagagacagggtttcaccatgttggccaggctggtcttgaactcccaacctcaggtgatccacctgcgttggcctcccaaagtgctgggattacagatgtgagccaccgtgcctggccttactgggcatttgtgtgtcttctttggagaaatgtttcttagactttgcccattgtaaaattgtcttttgttgttgttttgagatgaagtcttgctgtgttgatcaggctggtctcaaattcctgggttcaatcgatcttcccaccccagcctcccaagtagctgagactatagccacgtgccactgcacccagcttttaaaattgtctttttattattgagttataagagctctttatatattctgggtaaaatctctttatcagatatataaccaggagatattttcttccattttgtgggttttttttttttatttttgtcggtggtgtggattagatgtatttttactttcttgatggtgccctttggagcacaagcgtttttcatttcagtgaagtcaaagagctaattttgatggctgaatgagcctggcttctgggggcaggtgtggaagaccatggcagcagtgtaggcgagggatatgatagcttgtactgtggcatggccacagagttggtgaggaggcgccaggcttgagggaggcttggagatagggctgatggactgagttgagagattgttgtacgggtgagggaaacagaggaattgagggtgaatactaggatttcagcttgaacaacacttttgattcaaaatgtgattatgctgttacctgccggacaattgtgacagtttctaatacctgctggagcctagcaagggcagccctgcgctccctccctgggttctgaagttgcttttggtaggattatcactgagtgtgccaaggagatggtcagggattctgaccttttgtaatacccactaagacctcctaagccaccacaaataaacatattatctgagtagaatagtgcacttgctctgcaaatgcacttttgaggcaaatctcttgactcccttctagctagactgcagtctcaaagcccttcttgtgtagagcctgcgagctgtcagtggatagcatcaaatcaagcggatggattcttgaaagctaaatgtcatcatttgacagagctactatgaggaaaaatatttttatttttaaaaaagttttattgatcgattgatttgagatggggtcttgctctgtcacctaggctggagtgcagtggcttgatcatggctcactgcagcctcgaactcccgggctcaatggatcctccaggttcagtcgatcctccgggctcaattgattcttgtgcctcagcctcctgagtagatggtactacaggcacgcaccaccacacctggctacttttttgtattttttgtagagacagagttttgtcatgttgcccaggctgatgtcaaacccctgggctcggccaagtgcagtggctcacgcctgtaatcccagcactttgggaggccgaggcgggtggatcacaagatcaggagattgagaccatcctggctaacacggtgaaaccccgtctctactaaaaaaaacaaaaaaacaaaaaaacaaaaaattagccaggcgtggtggcaggtgcctgtagtcccagctactcaggaggctgaggcagaatggcatgaacccgggaggcggagcttgcagtgagccgagatcgcatcactgtactccagcctgggcgacagagtgagactctgtctcaaaaaaataaataaacaaacaagcaaacaaacaaacccttgggctcaagtgatctgcccacctcaacctcccaaagtactgggattacagatgtgagccactgtgcctggctgaggaataacttttttttttttgagacagagtttcgctcttgttgcccaggctggagtgcaatggcacaatcttggttcactggaacctctgcctcctgggttcaagcgattctcctgcctcagcctcctgagtagctgagattacgggcacctcccaccatgcccagctaatttttgtgttttaatagagatgaggtttcaccaagttggtcatgctggtctcaaactcctgacctcaggtgatccacccacctcaggctcccaaagtgctgggattacacgcgtgaaccaccacacccggccggtaataagatttttaaaggaggaaataacattaggcaatacttactggtgaagagctcagtacttccgcttgcttgctaggagatctcatgagctaaagcagatacgaaagtgcctgccagagatagggagtagaaggtgtgaaggccaggacgtgagaggccaggcctgttgtaattagaagcaattcagtgtggctggaggacaagtgagagatcctcgggtggcagaggccagatcaccaaggttcttgtaagccagcaacacttgggctttagcaggaggaagatggggaccactgcagagtgttaagcaagggagtgatgacatcagctttgcacatcaggaaaatccctctgtttgccacgtggatgacggggagggagaggcgggcagatgagctgggcaccagagagagctgcaggtgagaggtaatggtggcccgagctaggggtgacacactgaggtgtgtgggagatgtactgaatggagaatcggggacatggagaggagaggaggagggatcagggatgatgctccttttctggcttggtcagcatggcccaggcaactggtagaagatacaagataggtaagtgtctttgacattgttcatttactctgtgtttatagctaggatgtaagttttactaatcccatttcagatggtaattggagatctagagaggttgagcagttattccagggtgcctcaggtagttttaggagcattgggatttgaacttgggtctttttcacttcagtatcattagccactcattgtgcagttcttcctcggtggaaagagggtcagttctgtggctgtgggtctgagacctgggggttgggtgaggtggaacatggagttgggtgaacattgggtaaggaggaggagcagaaagtcttagcagaaatgtttgctgtgtctgcattgtttttcccaaacctagcgcaggacagtgagacagcggctctatgccttttcctcagcccgtcctagacactgtttctgccaggaggacagttttgctgggagttggcctcaacctgctcctcctatctgaatggtgggtgaaggacagacaagcctggtgctaagctcatccagaggcccccagatagggaaatagcatggattctcttctgcccgctggggacttcttgggcacctggcccccaggcatggctgtcctgactcatctgggtgctatggcttacgggcctctagatatcctttggaaaaacgtgtgaggcataaattgatatgaacattcttcaaggcagtttggcaatacatttttttttaattcaacatttccacctcttgcagtgtactccaagaatatacttggatatatttctgttgtttttgatggcaaaattaaaatcttttggttgagaaaattttggtttatccatacagtgtgttctctgcagtttttctgtatagtcactaaaaatcacattctaggggaatatttaatgacatggaaaatactcatgatttattaagtgaaaaagtctgtgtgtgtgcatatatgtttatatacatatatctgtagctatctgtgtacatggcatatctcagtatgatgagattgtgacttttctttacttctttgtccttttattttgagatagggtctcactctgtcacccaggctggagtacagtggtataatcagctcactgcagccttgatctcctgggctcaagcgattctctgtgtaccaccacacctggctaatttttgtattttttgcagagtcaggatcttgccatgtttcccaggctggtctcaaatttctggcctcaagtgatctacccaccttggcctcccaaagtgctaggattacaggtgtgacctactgcacccagctgcctttgtacttttcttttcttttttttttttgagattgagtttcactcttgttgcccaggctggagtgcaatggcacaatcttggctcaccacaacctctgccttctgggttcaagcgattctcctgcctcagcctcccaagtggctgggattacaggcatgcgccaccacgcccaggtaattttgtatttttagtagagatggggtttttccatgttggtcaggctggttttgaactcccaacctcaggtgatccgccctgactcagtctcctgaagtgctggggtttacaggtgtgagacaccgcgcccagccttctttgtgcttttctatattaacaaatttttgaggccgggcatggtggttcatacctgtaatcccagcaagtctgggcgtggtagctcaagcctgtaatcctagcactttgggaggccaaggtgggtggatcacctgagatcaggagttcaagaccagcatgatcaacatggtgaaaccccatctctattaaaaatacaaaaattagccaggcctggtggcaggcacctgtaatcccagctactcgggaggctgaggcacaagaatcacttgaacccaggaggcggaggttgcagtgagccaagatcatgccactgcactccagcatgggcgacggagcaagtctcaaaaaaaaaagcaactttttgatagtgagcatttataactgttataaaaagaaacctttatttttaaaaagttaaataaattatggcacatcaatgtgtgtatgagtatgtatgtatgcactctttaaggaaacaaagccttttactatttctgtgccttggaaagaagaataagaagtttctgcatccatgaagtggaggtaacattcatgtctaatgtttggggattgcaggaaaaaaaaatggaagtaactatgatgcctacttcatgtttgttttttttttctttctttttggtgaggatttaatgggtttgtgtgctaagaacagtttgtattaagtacagacggttttcaacttacagagtttcaacttactattttttgactttaagattgagcgaaaacgataccattcagtagaaactgtatttccagtaaccatacaaccattctgtttttcactttcaatatggtattaaataaattacatgagatatgcaacactttgtgataaaataggctttgattagatgattttgcccagctgtaggctaacataagtattctaagcacatttaagttaggctaggctaagctaagatgttcggcaggttaggtgtattaaatgtattgtgacttatcttttcagcttatgacggttttattgggacataaccccattgtaagttgaggagcatctgtaaaaacattagctattcccattattattactgcaaaagagggtggattgggttcttaagtatcacagaggaatgcaattattattattattgttatttacttacctttaagaaagttctcatacgtggatatgttctgcctgtattggctattgtgactgtcagatgaaatgggaatctaaggctgggcgcgatggctcacacctgtaatcccagcactttgggagactcagatgggcagatcatgaggtcaggagttcgagaccagcctggccaatatggggaaacccccatctctactaaaaaatataaaaattatccgggcttggtggcacacgcctgtagtcccacctactcgggaggctgaggcagaagaacccaggaggcgagtgttgcagtgagccgagatcgcaccaccgcactccagcttgggggacagagcgagattctgtctcaaaaaaaaaaaaaaaaaagaaaagaaatagaatctaaaaatgcttggaaaactggatatgctatacagatttagggaattattattccagcattgaattggggtcatattgaagaaaaaatgatactttgctgctcttccattccattttttagaattttatatttaatattttttcttttgctctacacattcagagaaacttctctagtaatgaactatagaaatgatcccagaaagcacagcctttgttcttctgttcttgtcactcattccttccttgcatattttccttttatttatttattcatttaagagacagtgtctcactctgtcactcgggctagagtgcagtgacacagtcatagctcactgcagcctcaaattcctaggctcaagtgatcttcctggctgagtgcagtggctcatacctgtaatcccagcacttggggaagctgaggaggaaggatcacttgagcccaggagttggagaccagcctaggcaacatagtgaaaccctctctattttttaaaatgaaatatttgttttaaaagcgtgatcttcccacctcagcctcatgagtagctaggactacaggcatgtagcaccatgcctgactaatttttaaaaatattttttgttgaggcgggagtcttgctatgttgcccaggctggttgtgaactcctggtctcaagcagttctcccaccttggcctcccaaagcactaggattacaggcataagccactgttcctgggccaaattttctgtttcatcattcattcatttatgcaacaaatacttgctgaatgcctctgatgtgcctagcccttttctccctgcggggggaagaggggtgagtgaggcagatatgggctctgctgttatgggccttacagactagtgtgtgtgtcagagtggcaggcaggcagataaccagtcagagaaaagaaaggagatgtgtggataggccggacacggtggctcacacctgtaatccaagcactttgggaggctgagatgggaggatctcttgagcccaggagcttgaggctgtagtaagccatgattgagaccagcctgggcaacacagcgagacctcatctctacaaaataatttaaaaattagccaggcatggtggcatattcctgtagtcccagctacgtgggaggtggaggcaggaggttcacttgagcccaggagtttgaggcgtcagtgagtcatgatcttgctactgctttccagcctgggtcacagagtgagactgtgtctcaaaaaaaaagaagaaaggggctgtgtagagaaagtaaaactgggagaggtgacagagagagaactcagtagggggaggagaaatcaagtacggcctcatgaaagagggcacaattgagaaggaggaagagctcagtagagaaagaacattccaagtggacggaacagccaatgcaagggccctggggtgagaacgagctggattaatttgatcagaagagggactggaagttggtcagtccactatgtagaaatagaaaacctacagttcaaagagaccataaatccatgatgcaagaagtttctgtgagaggagcttggaagtctccatagaacctgtagagctaaaatatccctccaggtgtaatcaggtacagagcatctacctggactgttacagcctgcctgtcagagctgtgactgtgctgttgtcaagagcctaggacttggagggaaaagacctagagtcaagtctcggctgtttgatcttgagtgagtctcatgaccctctggcccccagtcccttctaaaagttagggatgatgctacctgccttataaggtagggtcaggattaaatcagtgagtgagcactttgtgaaagatggcgtgcatggaagggttgcatatctttagtaagggaagctttgaagccaaagtgcaagtgggtgggtctccatgtggaacagagtaaggtgctgtgtggctggactcttgagcgctgaggaggctgtgggcatccaaccaggccagggcacctgttcttcaccatctcattaacacagccagcatatctgcatctgagattggcccactattctcctaatagagtgtctttcctgtttctcttttccatatcctgtccaacctggtgggcttcatagttcaggatgtgttcagtgaagccatgtctacactcactctaatccccactgatctctctctcctcatgaaaacccacaaattatcacctcattacttgtggatttgtgtcttttcactatttcatctgcctccctgtctagatcataagctacttgggagtaagaactgttttgttttttgtattctttccactcctccatggcattcactacaacataaatcatagaggtcagaacatactgaagtgcattttgagttaaaatgctcaaaagtgatcttagtgacacgtgtttactttccctgtttatttaagctccagctataatgtttacctgcctaaaagttccatgttgccagtattaaacatacttctttttgccatgactaggcattgaaaggattgtaatgctttgttctgtagcccccaggtttccctagatgacaaataaacattccttttcctgcgtgaagatagtctgtggaaaccttggccatggcatcgatatcagagcctgttacattcagagagttctgcccgttgtactatctcctcaatgccattccgacaaagatccagaagggtttccgctctatcgtggtctatctcacggccctcgacaccaacggggactacatcgcggtgggcagcagcatcggcatgctctatctgtactgccggcacctcaaccagatgaggaagtacaactttgaggtgagccttgctttgcttttcacctgagggggcacgagccatagctgacgcttaacatgcttgtgttctaggatgagataatttacttctgatttgccagaatatggccttaatacctcacccaaacaatactttaaaaccatctttagctgaagtggaatataactaaaaacattggtgtttttaactttttcctgcctccaaaaatctaacatcactttatttatttatttgagacagcgtctcgctctgttgtccagcctagagtgcagtgggacaatcatagctcattgtagcctcaaactcctggggtcaagtgatccttttgcttcaacttcctgagtagctaggaccacagggatgactgccacacccagctagtttttgttttgttttgtctgtagagacatggtttcactatgttgcccaggctggtcttgaactcctcggctcaagcagtcctcctgccttggcctcctaaagtactcggattacaggcatgagccaccacacctggcctaacatcactttaaaagagaatatcacctgaggtcaggagttcgagaccagccttgaccaatatggtgaaaccctgtctctactaaaaatacaaaaattagctgggcgtggtggcatgcacctgtactcccagctactcaggaggctgagacaggagaattgcttgaacctgggagatggaggttgcagtgagccaagatcacaccactgcactccagcctgggtgacagagtgagactccatcttaaaaaaaagaaagaaagaaaaaaagagaacattttagtatttaaaacttactacaacactttgaaagcagatatttttttcctaagtgtttacaggagcaggcacatgcctgtttttcaaagttttgaataatctctagttcttctcttgaaattatgatgaaaaaaggatgtatatgaatattggctcattgccagaatatgcacctcttagctgagctgaggtctcttctatagcattgggatcctgaccaatctgtttctgcagtgctgtggactcaggcatttctgtgtattgtagatattggtggagatgttatttgactgtgttgtggctggcaccaactattggtgaactgtaatgtaattcacccacttagtcaatatctgtagtttattgagtacgtcacttttgtgagagactcaaagttgactgagttgtggcttccaccacatgggactctattctgtctgtggttagggggcttttatggaccaagatacagcttttgtatctaagagaaatgtttacaaatacttgtgttttaatcagtattcaatatattaaagttttcatttaaaacgtaactaatttaagcctctgtgctcattttaaaataatcaaaatggttcatacacatacagccctttctatgtgtcagacattattctttaaaaatatattttttaaattttttaaaacattattttttccttctcactatgcttcttggacagacatatattaactcattttatcctcacaaaaactctctgaggcagatgttattatgatcttcctcatttactaaggagacagctggtgaagagagggtaggtgacttgcctgaggttggctggtagtaaatggcagcaccatcatgtgaacttgggcagactgtctctagggtctgtattaatatatatatatatttttgagacggagtttcactcttgtcgcccaggctggagtgcaatgacatgatctcggctcactgcaacctccacctcccaggttcaagcaattttcctgcctcagcctccagagcagctaggattacaggcacccgctatcacacccagctaatttttgtatttttagtagagacggtatttcaccatgttggccaggctggtcttgaactcctgacgtcaggtgatccatctgcctcagcctcccaaagtactgtgattacaggcgtgagccaccacacctgcccgtgtattaatattttttgtataaaaattagaactactgctatttcttctctttgagtaatagctcatggattcgactgatcaaattccccaaacatttaaaaccattacgtaatctttcaaactgtagttaggagtttaatagtctgaaatctctcaaatgcttcagacactttataaggaagactcgtgaatccaacgatgaaccccaacaagatctatcaaagaaatccatgcacagaggcaccctagtcacactgctaaagatcacaatcttaaaatccgtgcacagaggcgtcctagtcacactgctaaacatcacaatcttaaaatccatgcacagaggcgtcctagtcacactgctgaacatcacaatcttaaaatccatgcacagaggcgtcctagtcacactgctaaagatcgctgtcttaaaatccatgcacagaggcgtcctagtcacactgctaaagatcacagtcttaaaatccatgcacagaggcatcctagtcacactgctgaagatcaccatcttaaaatccatgcacagaggcgtcctggtcacactgctaaagatcaccatcttaaaatccatgcacagaggcgtcctggtcacactgctgaagatcacaatcttaaaatccatgcacagaggcaccctagtcacactgctgaagatcacagtcttaaaatccatgcacagaggcaccctagtcacactgctgaagatcaccatcttaaaatccatgcacagaggcatcttagtcacactgctgaagatcaccatcttaaaatccatgcacagaggcatcttagtcacactgctgaagatcaccatcttaaaatccatgcacagaggcgtcctagtcacactgctaaagatcaccatcttaaaatccatgcacagaggcgtcctagtcacactgctgaagatcacagtcttaaaatccatgcacagaggcgtcctagtcacactgctgaagatcaccatcttaaaatccatgcacagaggcaccctagtcacactgctgaagatcaccatcttaaaatccatgcacagaggcgtcctagtcacactgctgaagatcaccatcttaaaatccgtgcacagaggcgtcctagtcacactgctgaagatcacagtcttaaaatccatgcacagaggcaccctagtcacactgctgaagatcaccatcttaaaatccatgcacagaggcgtcctggtcacactgctgaagatcacagtcttaaaatccatgcacagaggcaccctagtcacactgctgaagatcaccatcttaaaatccatgcacagaggcgtcctagtcacactgctaaagatcacaatcttaaaaatagccagagaacaatgacgtattacctgtagaggaacaatgatttaaatgactgtggatttctcatcagaaactgtattagcccgttctcatgctgctatgaagaaatacccaagcctgtataatttataaaggaaagaggttttattgactcacagttacgcatggctgcggaggcctcaggaaacttacagtcatggtggaaggcacctcttcacagggctcactgtcacaagaacaggaggggggaaaccatgcccatgattcagttatctctacctggtccctcctacgacatgtggggattatgggaactacaattcaagatgaaatttgggtgaggacacagccaaaccatatcagaaacaatggaagctggaagacagtagcatttttttggttttttgtttttgttttgttttgagacggagtctcgctctgtcgcccaggctagagtgcagtggcgcgatctcggctcactgcaacctccgcctcccgggttcaagcgattctcatgcctcagcctcccaagtagctgggactacaggtgcccgccaccacaccggctaatttttttgtatttttagtagagacggggtttcaccatgttcaccaggatggtctcgatctcctgacctcgtgatctgcccgcctcggcctcccaaagtgctgggattacaggcgtgaaccactgcaccaagcttgtttttttttttttttggcagagtttcgctcttgttgcccaggctggagcgtagtgactgcaacctccacctcctgggttcaaacgattctcctgcctcagcctcccttgtagctaggattacaggcacacgccaccaagctcagctaatttttctatttttagtagagacggggtttcaccatgttgtccaggctggtgtcaaactcctgatgtcaggtgatccactcgcttcggcctcccaaaatgctgggattacagctgtgagccactgcgcctggccgatagtagcacatttttaaagtggctgagaggccgggcatggtggctcacacctgtaattccagaactttgggaggctgaggcaggtggatcacttgaggtcgggaattcgagaccaatctggccaacatggcgagagccccatctctactaaaaatacaaaaattagccgggaatagtggctcatgcctgtaatcccagctactgagaaagctgaggcatgagaatcgcttgaatctgggaggcagaggctgcagtaagctaagatcgtgccagtgcactccagcctaggcgacagagtgagactccatctgaaaaataaaatgaagttctgagagaattgtcaacccgaaattctttactcagtgaaaatacctatcaagaaaggtgaaatgaaagtattaccagatgaaggaaaacttaagagggttcgttgccaaccgacctgctctaaagtcattgctaaatgaagttctttagacagaagggaactttgtacatcaagaatgaagaatggtaaatacctgggtaataaatacaatagatgatttttcccctattgagttctttaaaatatatttgacagttgaaaacaaaaattataactgatcaagttttaacagatgtagatgtagtaatatctaagacgagtacaacataagtaagggagagtaaggtatcctatacatttgtacattcttcttgaagaggtacaatattgattctaagtagattttgaaaaattacgtataggccgggcacggtggctcacgcctgtaatcccagcactttgggaggccgaggcgggtggatcacgaggtcaggagatcgagaccatccaggctaacatggtgaaaccctgtctctactaaaaatacaaaaaatgagccaggtgtggtggcgggctcctgtaatcccagctactcaggagactgaagcaggagaattgcttgaacccaggaggcagaggttgcagtgagccaagatcgcgccattgcactccagcctgggcaatgagagtgaaactccgtcccaaaaaaaaaaaagaaagaaagttggagtggctgtattaatatcaaggttttcttctgtgcaaagaaataaccaggggtaaaaaagacattacataataacagattcgtatatgtcccttaacaacatagcttcacacaatacacgaagcagaaatggacaaatctgcaattacatgtggagacttcagtattcctctctcaataatagaagtagtagacagaaaaccaacaggatgtagaagaactgaacaacaccatcagccaacttggtctaattcacatttatagaacactcagctgaatatacattctttgcaagtgcacatggaacattcatcaatatagaccatgtcctgagttagaaaacatacctcaacacatttagagtagactaagctttccaggcccttgtgttttactttgttttttcacttttctttaaaatataatttacacaaagtttgcaaatctttttttttttcgagacggagttttgctcttgttgcccaggctggagtgcaatggtgcgatctcggctcactgcaacctccgtcccccgggttcaagtgattcttgcctcagcctcccaagtagctgggattacaggcgcctgccaccacgcccagctaattttttgtatttttagtagagatggggtttcaccacgttggccaggctggtctcgaacgccagacttcaggtgatccatccacctcggcctcccaaagtgctgggatgacaggcgtgagccactgtgcccagcctgcaaatcttaatagtaccatgtgatgaatttatatgtgtatgcctgtttaatcacccagttcaagatacagaacatttccagcaccccagaagattctcttgtgctacctcctaatcattacccctccccaaggtaactattctgacttctaacacagagtagttttgacttctacagagtagttttgctagctccttgggttttaattcactattaagtaacctctggcagtaaggtttatatgcgttagcggaatttggactccttactcaggttgcagttacaacccagttttcttttataaagcacatgtgtctcattgatcaccattgtattgtcttttttgttttttttgtttttttttttgaggcagagtctcactctgtctcccaggctggagtgcagtggagcgatctcagcccactgcaatctccgcctcctgggttcaagtgattctcctgcttcagcctcctgagtagctggaattacaggtgcccgccaccatgcctggctactttttgtatttttagtagagacagggttttaccatgttggccaggctggattcaaactcctgatcgcaagtgatccacttgcctcggcctcctaaagtgctgggattacaagcatgagccactgcgcccggtcccgtattgtcttttagaaaaactgtataactatttaaatattttcagtcaccaaactaaaaaacaaatactaaagttgaagtttattgctccccagaatgaaactacaaattacatctgatggccatttttacagtttaaccaataattagttctctatcatattatctttgtttcgttttcctttaacagaatacctaagactagtagttgttctttttttttttttttgagatggagtttcgctcttgttgcctagcctggagtgcagtggcgcaacctcggctcactgcaaactctgcctcccgattcaagcgattcttctgcctcaatctcctgagtagctgggattacaggcatgtgccaccccatctggctaattttgtatttttagtagagacagggtttctccgtgttggccaggctggtctcgaactcccgaccccaggtgatccacctgcctcggcctcccaaagtgctgggattacgggtgtgagccactgcatccggccggaagttgtttttatttttttactatttttaatttttttaaagaggtttatttggcccacaattctgtagctggaaagtccaagattgggcagctgcatctggtggggacctcatgctgcttccactcatggtgggaattggaaggggaccaggtgtgtatcaagagatcacatggtaggccgggcatggtggctcaggcctgtaatcccagcacttcaggaggccaagacaggcggatcacgaggtcaggagtttgagatcagcctggacaacatggtgaaaccccatctctactaaaaatagaaaaattagccaggcatggtggcccatgcctgtaatcccagctactcaggaggctaaggcaggagaatcacttgaacccgggaggcggagattgcagtgagccaagactgcaccactgcactccagcctgggtgatggagcaagacaccacctcaaaaaaaaatatatatatatatatgtgtgtgtgtgtgtatatatatatacacatatatatgtatatgtatgtgtgtgtatatatatatatctatatctcacatggtcacatggcaagagaggaagcaagacaggaaccaaggatgccagactcattttcttttcctttcctttttttttttttttttttttttttttgagacagagtttcactcttgttgccctggctggagtgcagtggtgcaatctcggctcactgcgacctctgcctcctaggttccagcaattctcctgcctcagccttccgagtggccaggactacaggtgtgcgccaccacatctggctaatttttgtatgtttagtagagacagggtttcaccatgttggccaggctggtctcaaactcctgacctcaggtgatccacatgcctcaccctcccaaagtgctggaattacaggcatgagccacggcacccggctctttttcttttagtatggagtgcttcacaaatttgtgtgccatcctcgtgcaaggaagccagactctttttaacaacctgctgtcttggaaactaatccagtccttggagagtgagcactcattcacccatgaggagggcattaatctattcatgagggatctacccccatggcccaaacacctcctactaggccccacctcccagcactgccactttggggatcagacttcaacataaattttggcaaagacaaaccacatctaaaccatagcagatatgataagtcacgtgagctttgaaggactgtgacatggtagaacagcatccacaggctctaccagagtttggtggaacagcatccacaggctctaccagagtttgagggagcagcatccacaggctgtaccagagattgagggaagctggtacaaattactggatccagcaccatagaaggggactctgggagaatcccatgtaaagattttagctagtccaggcatagtggcacacacctgtaatcccagcactttgggaggccgaggcggacagatagcttgagctcaggagttcgagactagccttggcaatacagcaagacccccatctctacgaaagaatacaaaaattattcaggcgtgatggcgtgtacctgtagtcccagctactcaggaggctcaggtgggaggatcatttgagcccaggaggtcgaggtcgtagtgagccgagatcgagccactgcaccctaacctgggcatcaaagtgagaccctgcctcaaaaaaaaaaaaaatttagctagttatcctttaaatgtatttcacccatacatgcatatgcctgctgtgtacctacaaaaactttttaaatctaaaatattaacatttggaaaaaaaatgtattttgctggggccaaaatccatacttggtagccctgagtatcaacagcattttttgagcgcccattatatataggatatcaaacttataattgtggagaatcacaagggaggtataaaataaatttcttgtccaggcacggtggctcacgcctataatcccagcactttggtaggccgaggcaggcagatcattttgagctcaggagtttgagagcagcctgagcaacatggcaaaaccccatctctactaaaaatataaaaattacccgggtgtggtggcgggcacctgtaatcccagctactcaggagactgaggctggagaattgcttgaacccaggaggtggaggttgcagtgagtagagattgcgccactgcactacagcctgggcgacagagcaagactctgtctcaaaaataaaataaagtgaaaattttttttttggcaagaatgtagaatttagaggtagaagatttagagcttggaaacaaagctgtatacctatatgtaaacacataggaaaaggtctgaaggaattttcacatgattacttaactctaggtagggattaagattgggatgggctgagggaggaagagtgaaagggaattacgtatttttttaactttactgaggaattactagaaatttttggtacatattacacgcataaacacagcaacacaaagatttgttttgagctttggctgccagttattagtggtttaaccccagagatgaattaaatatttatgttgttgttgttgtcattttcatcatgagagctggctgggtcttagaatcatttggtacaatccccactttttatagataaagaaattctaagattcctgcttcaaggcacgtatctctgattgcctaaccattgtgcttacttcttgtgagaggaggtaggccctctgtgcagtctgtggatttcaaggatatggaatacagatgcgtggtctctttggaatgtccaagtcgaaagttaaagatgcattaactagtttagggaaaatctaagattttatgggaagataaataaaaaagtttatgctcaaataaatccatgtatggcatgattgaaagattatgtttttaaatgaagttatgtttcctaaagaggaaagcagaccttttctgtggtaaatatagccttgcatgtgttttcaagaatggtgctttggaaaccatttttttctacagaagttagtgggagagggcagatggaaacacagattcttcctacctagtgccaaaagcactgagaaaatgttgcaaggagctaataacaagtacaaaaatgttagaaatgtgttaaatatataggtctgatatgtgtaagcatagaccaaaaagactacctgacctgagtttctaatgttctgttttgaagttaaacatatgatcccttttccttagcattcaacaagccaatgagatttcatggatttgccttcagagctgtctttttttttttttttgagacggagtcttgctctgtcccccaggctggagtgcagcggcgccatctcggctcactgcaagctctgcctcccggtttcacatcattctcctgcctcagactcccgagtagctgggaccacaggtgcctgccaccacgcctggctaattttttgtatttttaatagagacagggtttcactgtgttagccaggatggtcttgatctcctgacctcgtgatccactcgcctcagcctcccaaagtgctgggattacaggcgtgagccaccacacctggctgggtggttgcagttttaaatagcattccagggaaggtctgactgagaaggtgacagttgaacaaagacgtaaagagcatgaccaacacaccatactgacatgtctgtattccaagaaaacggaagggaaaggcactgagcctgaaacatgtcttggatatttcgcattgagaaaagtcatgcttcagaatgttacaagtatttcattggcttatactttatagacatattttaaagaggtgcagaaaggacagtttttgtctcaccatagcagccaaggtgcatttgcccagtgccttccattgtctttccctgtgggagtaacttttaggtccagtgatgaggagcctgtgatgtctgtgttctggtttgttgataacattaccatacagggcttcacgggtgtccttcttagcatggattgcttccattcattggttgctggaaaatttgctttcaaatgtttttaacagtgactcttagggaaaaaaaatacattttattagatgtccattctccctaaatttacctgagttcaactgaattccaataggtttttttttagtgttaatttaaaaaaacaagctggccaggtgtgatggctcatgcctgtaatcccagcactttgggaggccaaggtgggcggatcacttaaggtcaggagtttgagaccagcctggccagtatggtgaaaccccatctctactaaaaatacaaaaattggctgggcgcagtggctcacgcctgttaacccaacactttgggaggccgaggcaggaggatcacgaggtcaggagatcgagaccatcctggctaacatggtgaaaccctgtctctactaaaaatacaaaaaaaaggccgggtgcggtgcctcacacctgtaatcccagcactttgggaggctgaggcgggcggatcacgagatcaggagatggaggccattgggctaacatggtgaaatgctgtctctactaaaaatataaaaaattagccgggtgagatggcaggcacctgtagtcccagctactcgggaggctgaggcaggagaatggcgtgaatccaggaggcggagcttgcagtgagccgagattgcgccactgcactccagcctgggcgacagagcaagactccgtctcaaaaaaaaaaaaaaaaaaaattagctggatgtggtggcacgtgcctgtagtcccagctactcaggaggctgaggcaggagaattgcttgaacctgggaggtggaggttgcagtgagccgagattgtgccactgcactccagcctgggcaacaagagtgaaactccatctcaaaaaaataaaaataaataaataaataaataataaaaatacaaaaattagccaggtgtggtggcacacacctgtaatcccagctacttgggaggctgaggcaggagaatcatttgaacctgggaggcagaggttgcagtgagccgagattatggcactacactccagcctgggtgacagagcaagtctctgtcttaataaatacataaataaaaatgataagctgatttaaaaatgcatatgaaattgtagtgggtggaatagtcatactagtggaaaagaggaagcaaatgggagaagttgctattaggtaacaaaacttatagagctttagtaattaagggagtgtggtattagcacaagaaaagatacatagatcactggaacagattagagaagtcagaagaccaacatgtatatggatacttgagtaattgcaaaggtgatacgacaaagtctttttcagtaaatgatgtgggacagctggatatgaatgggaagaaaaatgaaactggatccctacctcacttcatatggtggttattttgagcactttaaagtattaatgccactgtctcttgactgctgagattctgctggcagtgtaattatttcctttaccgggaatttgccttgtctgtttctgctttagatcttctctaatgatagagtccctggctttaggcttcttccttcaactccagtggatattccctactttgttttgtcctatggagttaagaaaattattccagaaaagcagatatctttgtttaacttccagatcattaaaaagttgtgttagtattcaaacattaaacagatgttctttgttagtaaaaggaggaaaatagtgtaaccattcttaataattgaatgaattcatatttggtcttaaatatttcaaaatatttcagatcaattctttggtatgctagtggtttctactgaaggttaagctttgacctactaaaagcagctcataaagaaagctttgtcagacttcagttcccatgaacctgctcacaaagaacactttttcccaatgtagttttgtcttgtgtatgaaaggaaaactgcctgccaaggaggctaagaaggttagctgaatgctattgtaatggtgagatgtttgtccagaaaaccattcctgacacctttcaaatcaaaagccttttttttttccttaaactttttgattgctggatttctgtttgaggaagttatgttgctacaatgagggtagcaataaatgcctcctgggaagttggaaataaaggcaaaggagagttaaacacaatagatgagatcagaaatgggcaaagttatcttaaagagacagaatggctccctggctagaataagactgaattgtccctagatcaaaaaaagaagagaatgtgtgtggcagaaggaagaaagtggactctacactgtgttagttaggaaaaccagaaattgggccaaattgcctgtttagtgggagagatagcttttgagagctgtgatcccgctggtgtggctggctctgggcagatatttgtatctgaaatgactcatgctgtgggacccttcctgagatctaacacttacagtggtttgatcagaaattgcaccatgcttgccaagcaacttttggactaaaagttgctgcccacgtatatcaggggaagaatatatatatatatatatatagtacctatcttagcatctgatttgtatgaccattacttcaatgtaaaataataaattggctttccagcttaaacttcaatttcttgtatattatatgatcatgagacaacctccctgggctgatcaacagcaggacgctaaaaagattgagtatctgagtcaggaaggtagagggccagaccctacatgtagctaattcaccattgtgaatctgcatgttaggtaaaactatggatttgttttttgtcttttgagacagattctcaccctgttgcccaggctggagtgcagtggcatgatctcagctcactgcaacctttgcctctgggttcaagagattctcttgcctcagcctcccaaatagctgggattacaggtgtgcaccaccacgcccaaccaattttttgtatttttaatagagacgggagtttcaccatgttggcgaggctggtctcgaactcctgacctcaagtgatccgcccacctcggcctcccaaagtgctgggattacaggcatgagccactgtgccaggcctaaaactatggtttttaaagatatacacgcatgtggtaaagctatgaatcaaagcaagagaatatttcatctcaatgttaggagagtggttttggtggggtggggtatgtagtcaggcagaggcacacaagagcttcaaaggtgctgttaatggtccctttcccaagctagatggggattccatgggtgctcattttttagtaactctaatttaagctgtacatgttatatatagtcatggatatataatcattattttaaaaatgaaggcaaggaggataccataaaatgaggtacttcatatttaaccagctggcatcctaagcacctttcctgccctcccctctctgcacctggcagagttgatcacatcctccccattacccactatacatgggtgtcagtgccaatagtgctttgctcttgtattattgatgagtcttgctccttttcctaaattgtgaggcctcctgaaggcagcacccttgtcttatgaaaaagttgagcttctgaggatatgtctttggtgaattttggaaaacgtttagcctttatctctgaagataccacttttcattaccctctcttttcatttcctgctgaaacccctttttttgtttgttttttgttttgttttgttttgttttagacagagtttcactcttgttgcccaggctggagtgcaatggtgtgatcttggctcaccgcaacctctgcctcccacattcaagtgattctcctgcctcagcctcccaagtagcagggattacaggtgctcgccaccacacccagctgattttttttgtatttttagtagagacggggtttcactgtgttggccaggctggtcatgaactcctggacctcaggtgattcacctgcctcagcctcccaaagtgctgggattacaggcgtgagccactgcgcctggctgagaacccacttatgtgtagcttggacctttatgttctctcttctatgtctctaaacttctctttcatgttttgaatcttttcatctctttgttgcatggtaggtaatttcctcagatctgtcatctagttcaatacttttttttccagctgtgactaatttgctgttcattccacccagtgacattttaaattctcttggattttttcatttctatttccaatagtagttgttctttgcttacatttcagtttcctgttttatttttaaaacattttaatcatttttcttttatgttctgtgttcttcaatctaagtgaaatacttggggttgttcagtgctgttatggcttgttttacttgactcattcatgggcctgcttccctatcgtaatttctaattacgagcaatgtggctgatcctaatgtatgagaaccctgggggacctggatcgggactgctccacagatggggtttatgtttaccaatgccaggcaccttggagtgctaccaacatagaagcacttcagattaaccgtctgcatagagctttgcttggaaagagaataaattcaaactctgatgctgaatggggcaggcttatgatgacacattcttcggaaagattcttttttattcgttccaatcaatgcttgagataagacagatttccttgccagctccatttgccagcaaatcaatttttccctagcttactccttcacttagggttaggtccttgggattctggcttggcagagaatatcagctccagctccccatcatctactccgctctgaaaaccaaggctccagaggtgtgccagatagttacagggtagcctgtagcttcagggctagcttctgttttagtttgggggcattcttcttggttttggggtcctgtggattttccatactttcttgaaaattcagctgtgcatttgaaaggctttgttatatattgcactcagcattgccaggtgtttggagaggggtgttttgggatagctaggctattgtattgtgcaaaattaaagcctcatattctatttctatatgaactgtagttaagtgttaataatctgatgtctgggatgttttgattcttacatcaataactatgacatttattaataatcatattaaataacattaactcaagctcattggttacattacaaaggacactgatacattacaaagcacacatacaagcactgcacaccagtattgaggcttccagccccctctacatgatcatttatttatttatttatttttgagacggagtctcactctgttgcccagactggagtgcagtggcatgatcttggctcactgcaacctccgcctcccaggctcaagcgattctcctgcctcagcctcccaagtagctgagattacaggtgcgcaccactaccacctggctaatttttgtacttttagtagagatggggtttctccatgtgggccaggctggtatcgaactcctgacttcaaatgatccacccgcctcggcctcccaaagtgctgggattataggcatgagccaccgcgcctggtcatgatcatttttattttggaaccattcattcagaaaaatttcacagccattttgaacttgtgctatgacatggcaaaatctctagtaaatcattttaattcctgatgagttcatttttataatgataaatttctaaggaaaatattttgttttcaacttcttgccaccatgtcaagactgtacattttaaaacatattacatcacattttcccttcaaagcaatgccagtgaattctgttaatggtatcattcatctcatgttacccaactccagatcataaagtttccctcattctccttcctttccacaaacctaccaaatcctctatcgccaagtcctttgggttaattcacggagaaagtatcgagcacagaggcagaacagggcctctggagagtgtcacatttgtgtgtgaatcctgactcttgattttcactagctttgtaaccttagacaaattactaccaggcacggtggctcacacctgtaatcccagcactttgggaggctgaggcaggatcactggagtccaggagtttgagaccagcctaggcaacatagcaagatcctgtctctacaaaaaataaaaaattagctgggtgtggtggcacacacttgtattcccagctacttgtaggggctgaggtgggaggatcacttgagcctgagaggtcaaggctgcagtgagccatgatcgggccactgcactcagcctgggtgacagagcgagaccctgtctcaaaacaaaccaaaaaacaaattagttaacctgtctggagctcagtcccatatttgtaaaatgtggctaactacagcaccttcccttatagaaagctgtttgaggatccagttatgcatttaaagggcttaacacattacctggcacaggaaaacaaagacaagctgctgtcctgttttctttgttgctgccatccttctcacaaggtctcgacggagtctgtcttcatcacgatttcactgccctcatgcctgttctgtttaccccttttctagactgggcccttacttaccttagcctgagctattgtgaaacactcccagcggcttcctgacttgccccactccctccttccgccgtcctgtcctgctcctaatcgtgtttgtcagaaatgcctctgactgatacactggcaaaatcagaaatcttcaagggatccccctttttcttgctgtagcttaagatctaaatctcttaacctagatcacgatctgacactagatatatttatagtccatgaaaataccctgaaagctttcaagtaccagatgaaagtgagctccttcattaccacctcaactcactgtaggcggcttttcatgtgcaacagctaagctttaagagggctgggactgtgacctactttattttgtattgttatagcagctcacttggtacccagagcaaggaggtatatttgtttcttgcatatttggcaggttgattactatataaattactctattgaagattaaaatggtttactgaagatgtcgccatatatcttagcaaggtcaaaacagttgtgtaatttttctgaatgaatactttcaaaataaaaaagaccactcagaccagaagcctgaacatctgtgagcaatgcttatacatgtgctttttaataaaccaacatgttgggccgggcacggtggctcacgcctgtaatcccaacactttggaaggttgaggcaggtggatcacaaggtcaggagtttgagaccagcctgaccaacatggtgaaaccccgtctctactaaaaatacaaaaattagctgggcatggtggcgtctgcctgtaatcccatcgactcaggaggctgaggcaggagaattgcttgaacccgggaggcagaggttgcagtgagccgagatcacaccgtggcactccggcctgggcgacagagcgagactctgtctccaaaaaactaaactaaactaaactaaaataaaccaacatattaaactttaataggattattgatctgaaaaccaaaacatggtaggaattagtttataagtcatatttagacgcatcatcttataaccctctcagcaaaacctgtggggcaggtagattatggataacaagtgttcacttcatgaattgtccctgttgatcaggtgaagtagaacttggatctggggcagctcttgtgactccagattcttggtttttgagcaggtgttgggggaaatacctttcttgttgaagttctttagtactcttttttttttttttttgagatggagtcttgctctgttgcccaggctggagtgcagtggcgcgatctcagctcattgcaacctctgcctcatgggttcaagctgctctcctgcctcagcctcccgaacagctgggattacaggcacacaccaccacgccaggctagtttttgtatttttagtagagacggagtttcgccgtgttggccaggctggtcttgaactcctgacctcaggtgatctgcccaccttggcctcccaaaatgctgggattacaggcataagccactgcacccggcccatcttttaataagagctcagcatattcatacttgattgatcagcattttcgtcattagaaatgaggtggggtttttttgtttttgtttttttgtgttttcatttcaaagattaaaaacctagagaggaaggagagtatttggggaaaatggtggaagagggagcaccagtcatctgtctccacacctagacatcaattgtactggcaggatctgtctgatctaactattttggaactcggaagtctactgaggtttacacattcttgctgggatggcaaactgtggttaattttggtcagtttcaactcttagcacagtagcagctatgcactccccaaccccagttctgtggaaggcggctacgcgggtgttcctagagcttgcacacagcgtgggagccagaataggcaaaaagcatcttgtcctctaaatatttggggtctgtgctctgactgctgattgctgcttctgatcgtagaggtgcagacaaagagatgggtggccattgtcgttacacctcctcattattgcaagttcttccccctccaattaacaagacttccaggggatttaaagagctaatggtcctgctcccttgcttcacttttattttttcccatttgggagccagatgttagagaatatgacattgaaaagcaactgcatataagggggagaattaagaagtgactgtgcatgcctaggaaaaggtataggcacagtaaagacctgagaagaccctgagtttatacccaagactgatctttggcacagacggcctacagtaaacaaaaagaatcacacacacatccacacacagaataacaaaacccagtaaacttgaaaaggggaggatctgattttctgaattaccacagtattagattcaaatgttcagttttcaacaaaacaaatcacgaggcacacaaagaaacaggaaagtatgctcttccaaggaaaaaaaaaacaactgaaactgtgagaccacatagtagacctactagaaaaagattttaaaacaactgtcttaaagatatgcaaacaactaaagaagatgtggcgctgggggcggtagctcatgcctgtaaacccagcacttggggaggccaaggcaggtggatcacttgaggtcaggagtttgagaccagcctggccaacatggggataccctgtctctactaaaaatacaaaaactagctgggtgtggtggtgtgcactggtaatctcagctacttgggaggctgaggcaagagaatcgcttgaacctgggaggcagaggttgcagtgagccgagattgtgccattgcactccagcctgggtaacagagtgagactccttctctaaataaataaataaataagatgtggaaaaaggtaaaacagcgtatgaaggctgggtgtggtggcttacgcctgtaatcccagcattttgagaggcagatcagttgagtccaggagttcaagaccagcctggccaacatgttgaaacccgggtcatcgctagtaaataagacaaaaattagctgggcgtggtggcacaagcatgtagtctcagctactcaggaggctgaggcaggagaatcacttgtacccgggagatggaggttgcactgagccaagatcgtgccactgcactccagcctgggcaacagagacagattctgtctcaaaaaaaaaaaaaaaaaaagaaaaaagaaagaaaagaaaaaggaaaacagtgtacaaataaaatgtaaatataaataaagagatagaaaccctaaaaagaaactgaaaataattctggaactgaaaaatacaataactgaaatgagaaattcactggagggattcaaaggcagatttgagtaggcagatgaaagaatcagtgaatttgaagataagatattaaaattatcaagtctgacaaacagaaaaatgtttgaagaaacatgagcagagcctaagggtcatcatcaaagagactaacatgttttctgggagttatagaaagaaatgaaagggggagagagattatttgaagaaatagtatctggaagcttcccagatttgacgagagacatggatataaacatctaggaagttaaacgacctccaagtaagatgaactcaaggacacccacaccaagacacattacaatcaaactcccaaaagcgaaaaccaaagaacctttgggctggattcagtggctcacacctgtaatcccagcactttgggaggacaaggcaggaggatcacttgagttcaagctcagcctgggcaatatagtaagacctcatctctactaaaaatcaaaaaaattagccgggcgaggtggcatttgcctgtagtctcaggtcctcgggaggctaaggtgggaaaattgcttgagcctggaaggtcgaggctgcagtgagctatgattgaggcactgcactccagcctggcctaccgaatgagaccctgtctcaaaaaaggattcaacctgaggaagctgactaaaaaaacaaacttcagagaggagagaaatgcctcctcatatacaagggacccccaataagattataagcagatttctcatcaaaaactttggaggggtcaggtgcagtggctcacatccataatcccagcactttgggaggctgaggcaggtggatctcttgaggccaggagtttgagaccagcctggccaacatggcgaaactctgtctctaaaaatacaaaaattagccagggatggtggcgtatgtgcctgtaatcccagccatctgggtgcctgaggcacaagaatcgcttgaatctgggaggcagaggttgcagtgagctgagatcaggacactgcactccagcctggatgacagagtgagaatctgtctcaaaaaacaaaacaaaacaaaaaaacaaagtttggaggcaagaatacagtgggctgatatattcagagtgttaaaaagaaagaagacctgtcaactaaccatctaatacccagcaaaactgtccttcagaaatgaaaaagaaattaagatattcccaggtgaacaaaaatggagggagttcattagccacaagacctgccccgcaagaaatactcaagtgagtcctgcagagggaaattaaaggatattaaacagttactcaaagccatataaagaaatgaagatcttggccgggcacggtggctcatgcctgtaatcccatcactttgggaggccgaggtgggtggatcatgaggtcaagagatggagaccatcttggccaacatggtgaaaccccatctctactaaaaatacaagaattacctaagtgtggtggcttgtgcctgtagtccccagctactcaaggaggctgaggcaggagaatcgcttgaacccaggaggtggaggttgtagcgaactgagatctggccactgcgctccagcctggtgacagagcaagactccgtctcaaaaaaagaaatgaagaaaaaaaaaaaagaaaaagaaatgaagatctcaaaagtgaaggatatgtgcaattttaaaagctaatattactgtaacaatggtttataattgcatttttgtgttctacatgatttaagagactaaaatgcttttttaaaattagtctaaaagctagtagtattgtaatgttggtttgtgaatccacattttcttttcttttcttttttttttttttttagatggtgtcttgctctgtcacccaggctggagtacagtggtgtgatatgggctcactgcaacatctgcctcccgggttcaagtgattcttgtgcctcagcctcccaagtagctgggattacaggtgtgtgccaccacacccagctaatttttgtatttttagtagagacggggtttctccatgttggccgggctggtgttaaactccgacctcagttgatctgcccgccttggcctcccaaagtgctgggattataggcgtgagccaccgtgcccagcccacattttgttttctacataatttaaaataatttttttggtaaaataatttctaaagcatttaaaataattatttactttatggtttggggcacacagtttataaaggtataattttgtgatatcagtaagcaaaaaggttgaggacccagctgtaatggagtggagcttttctgtgttactgaaattaagctgatagaaatttaaattagtgttataactttaggatgttaaatgtaatcctcatggtaatgacagagaaaatcactgtagaatatacacaaaaggacatgagaaaggaatttaaatattttaatgtacccccaaaaatcaactaaacacaggagtagacagtaatgcaggaaactagggacaaaaaccttaaggcatatacaaaacaaaatgacaagccaggcgcggtggctcacgcctataaccccagcactttgggaggccgaggcgggtggatcacgaggtcaggagttcaagactagcctggccaagatggtgtaaccccgtctctactaaaaaaacagaaaaattagccaggcatggtggcggggacctgtaatcccagccacccgggaggctgaagcagagaattggttgaacccaggagacagaggttgcagtgagccaaggtcacaccattgcactccagcctgggcaacagagtgagactcgtcgcaaaaaaaaaggaacaaaatgatagaaataagtccctgtttattggttaattaccttaaatgtaaatggattaaactctccaatcaaaagacaaagattgtcaaaatggtttttaaaaccaatctgggctggacgcagtggctcacacctgtaatcccagcactttgggaggccaaggtgggtggatcacctgaggtcaggagttcgagaccagcctgggtaacatggtgaaacccaaactctactaaaaatacaaacattagctgggtgtagtggtgcatgcctgtaatcccagctacccaggaggctgaggcaggagaaatgcttgaacctgggtgacagaggttgtagtgagctgagattgcaccattgcactccagcctgggcaacaagagcaaaactccatctcaaaaaaaaaaaaaaaaacaaaaaacaatcctactatatgctatatataagagactcacggccaggtgcagtggctcaagcctgtaatcccagcagtttgggaggccgaggccagcagatgacaaggtcaggagatcgagaccatcctggttaatatgatggaaccctgtctctactgaaaagtggaaccctgtctctattaaaaaatacaaaaaaattagccatgcttggtggtgggtgcctgtagtcccagctactcaggaggctgaggcaggagaatggcgtgaacccgggaggcagagcttgcagtgagccgagatcgcaccactgtactccagcctgtgcaaaagagcgagactccgtctcaaaaaaaaaaaaaaaaaaaaaaagagagactcactttaaatccaaatgttgctggtgaaaggatagaaaaagatattccatgcaaatagtaatgaaaagggatcggggtggctattctactatcagacaaaaagagttacagaattgcaggaagaaatagacagttctacaataaaagttggaagctttaatatcccactatcaataatggatagaaaaataaagaaactttacatgataaaccaactagatttaacagacatttatagaacactctacccaataacaatagcatacattttctcaaatgtagatgggatgttttccaggatagactatatgttaagccacaaattagtgtcaatagattttaaaagatatacaaagtatgttcttattgcaaccacaacaggataaagttagaaatcagtaacagaaggaaaattggagaatccacaaatttgtgcaattaaccatatactcttagtcaaccaaagggtaaataaagaaattacaagagaaatttaaaaatacttaaagatgattgacaatgaaaacacacataccaaaatttatgggacagtgaaaacagtgctaaaggagaaatttatagctttaaatatatacattaaaaaataagaaaaatctcaaatcaacaacctaaactttaccatttaaggaactagaaaaggaagaaaaactaaactcaaaactagcagaaggaaggaaataataagattagaacagaggtaaaggaaatagagactagaaaacaatagagaaaatcagtgaaaccaaaagttgaatttttgtaaaggtaaacagaattgacaaacctttagccagatggatcaagaagaaatgagagaagacacaaatgattaaaaccagaaacaaagtagacccttactattgattcaacagaaacaaaaaggattatgacaggatggtgatctgttgaataccaacagattggataacctagatgaaatggacaaacccctagaaacacaaaacctactgagactaaaccgtgaaaaaatagaatacctgagtagatctataattagtaagaggatagaatcaataatcaaatatctccttgtaaagaaaagccctagacacgaagccttcaccagtgaatttaaccaagcatttaaagaagaactaacactatttcttctcaaatttttccaaacagttgaagaggagggaatacttctgaattcactctatgaggccagaattatgctgatatcaaaactagaaaagataaccacaagaaaaatacacatcagtatccctcatgaacattgatgcaaaaatcttcaagaaaatactagcaagtaaattcagcagcatattaaaaggattatacaccatgaccaaagtgggatatatttctggaatgcaaggatggttcaacatatgaaagtcagttacctaatatgctgttttaacaaaatgagggacaaaatcacatggtcactccactggtccataaaaagcacttgacaaaattcaacacccttttatggtaaaaacactcaacaaactgggaatagaaactaccccaacataataaaagccatatatgaaaaacagtgaacaattatacttaatggtaaaaaacggaaagcttttcctctaagatcagaaacaaggcaaaatgcctgcttttgtcacttcagttcaacacagtgctggaaattttagccagagtcattagccaagaaaaagaaattaagaggcatcaaaattgggaaggaagaagtaaaagtatctctgtttgcagatgacatgatcttgtatgtagaaaccctaaagattccacaaaaaattgtttgaactaatacatgaaactgacatagtagcagcatacaaagtcaatgcacaaaaatcagttgcatttctaaacaccaacaatgaataatatgaaaaagaaattaagaggaaaattccacttaaaatggcattaaaaagaataaggaggtgaaagactcatacaatgaaacatgaaacattgctgaaagaaattaaagacataggtaaatagaaacacattgtatgttgagaaattggaagacttaacattgtgtgtttggtttttggagacagggtcttgctctgtcacctaggctggagtgcagtggcacaatcacagctcactgcagcctcaatctcctaggctcaagtgatcctcccacctcagactcccaagtagctaggactacaggcatgcacaactatgcccggctttttttttttttttaattttttgtagagatggggtctcactatgttgctcaggctggtcttgaactcctgggctcaagtgatcctcctgccttggcctcccaaaattgtgggattacaggcatgaatcaccccgactagcctgacttaatattgttaagctgtccataccacccaaagtaatttataagttaattcaatacaatttctatcaaactcccaaggccattttttggcttgggagttttagaatataaaaatttattctaaaattcatatgggatctcaggagaacctgaaaagccccaacaaacctgaaaaagaacaaagctggagatctcaaacttcctgaacttaaaacttaactgcaaaaatgcagtcattgaaacagtgtattggacttggctgtggtatgaagaaataagaaaaagaagagaacagcatgatacataaaaatagacatagagaccgatgaaatcaatagcccagaaataaaccctcttatatagtcaagtgaaatttttttttttttttgagacagactgtcactctgttgcccaggctgcagtgcaatggcgtgatctcggctcactgcaacctccacctcctaggttcaaatgatgctcctgcctcagcctcccgagtagctgggactacaggcgtgtggcaccacacctggctaatttgtgtatttttagtagagacaggatttcgtgttagccaggctggtctggaactcttgacctcaagtgattcgcctgcatcagcctcccaaagtgctgggattacaggtgtgagccaccgtacctggcccagtcaagtgatttttgataaggacgtgaagattgttccacagggaaaggacagtcttttcaacaaatggtataggggaaactggatattcacatgcaaaagaatgaagttggacccttacctaatactacattcaaaaattaactcaaaatggccggggcctggtggctcacacctgtaatcccagcacttgggaggcccaggcaggcggatcacttgaggccaggagtttgagactagcggggccaacatggggaaactctgtctctactaaaaatataaaaaattagccaggtgtggtgatgcatgcctgtagtcccagctactctggaggctgaggcatgagaatcacttgaacccgggaggtggaggttgcagtgagccaaggttgcaccattgcactccagcctgggcaacagagcgaggctccatctcaaaaagaaacaaacagacaaaaaactcaacaatgaaaaaacccaattcaaaaatgggcaaaggacttgaatagatgtttccccagagaaggtaaacaaatgaccaataagcatatgaaaaatgaccatcactaattattagggcatgcatgtcaaaactataccccacacccattaggatggctactgtcaaaaaaaagaaaaaaaggaaataacaagggttggtaaggatgtgagaaatgggaaccctggtgcattgttcacaggaatgagatgatgcagccaatactagaaaacagtatggtggttgctcaaaaaaattaaaaatagaattaccatatgataccaaaattcagtcctgagtacagtatgtacccaagataattgaaagcagtatctcaaagagatgtttgtacactcatattcataggagccttattcacagtagttaaaatggggaagcaatccatgtgcgtctatcaacggatgaatggataaacaaaatgtagtatgtacatacaagagaatatgagtaagccttaaaaaggaaggagttctgatatgtgctataacacggatgaaccttgaagatactgtgttaaggagataagccagtcagaaaaaaggcaaatactgtatggttccatttgtatgaggtatttagagtattcaaaatcacggtaaaaggaatctgaggagattaaaaaaaaaagagtagtcaaaatcataaagacggaaagtagaatggtagttgccaggggctggggggagggatgaatggggaattattgtttaatagagtttcagttttacaagattaaatattcgtggagatggataatggtgatgattgaagagcattatgaatgtattgaataccactgaaatgtatactttaaaaagggatactggtaattttacgttatgtgtattttaacattaaaaaattgggggatgagggctgggcatggtggcccacacctgtaatcccagcactttgggaggccaaggcgggcagatcacgaggtcaggagatcgagaccatcctgcctaacacggtgaaaccccgtctctactaaaaatacaaaaaaagcggggcgtggtggcgggcgcctgtggtcccagctactcagtaggctgaggcaggagaatcgcttgaacccaggaggtggaggttgcagtgagccaaggtggcgccactgcactccagcctggtgatagagtgagattccatctcaaaaaaaaattaaaattggggcatgagggcagggtgcagtggctcacatctgtaatcccagcactttgagaggcccaggcaggaagatcccttgtgcccaggagattgagaccagcctgggcaatatagtgagaccttgtctctacaaaaaaaaattaaaattacctgggtgtggggcacacgtctgtagtcccagctacttgggaggctgaggtgcgaggatcgcttgagcctgggaggttgaggctgcagtgaactgtgattgcaccactgccctcctacctaggtatatttgttttttggtttttttgttgttgttgtttcttgttttttgagacagagtcttgctctgtcgcccaggctggatgcaatggcacgatctcggctcactgcaacctccgcctcctgggttcaagtgattcttcctgcctcagcctcccaaatagctgggattacaggcatctgccaccacgcccagctaatttttgtgtttttagtagagacggggtttcgccatgttggccaggctggtctcgaactcctgacctcaggtgatctgcttgccttggcctcccaaagtgctgggattacaggcgtgatccaccacgcccagccctgtttttgtttttgttttttcaacagatgtaatttctgacttgtataccttttcaatcaagaatatgtatggactgcagcctgatgaagtttttcactcctttagtaatgtcctccttgttttacattttcaaagcctgcatagttacagattcatttgttttcaacgtttccccaggggaagacggaatctatcactgtggtgaagctgctgagctgctttgatgacctggtggcagcaggcacagcctctggcagggttgcagtttttcaacttgtatcttcattgccagggagaaataaacaggtgagtactcatgatcttaacacgtgttaacttcttggcacattcctcatggatttttaaaattagaaatcctcatctgcttagaaagtttatgctcagagaaagccgggcacgactttctctgcccaggctcatgcctgtaatcccagtactttggaaggccaaggcgggctgatcacgaggtcaagagatcaagaccatcctggccaacatggtgaaaccccatctctactaaaaatacaaaatttggccgggtgcagtggctcatgcctgtaatcccagcactttgggaggccgaggcaggcagatcacgaggtcaggagatcaagaccatcctgactaacacagtgaaactccatctctactaaaaaatacaaaaaattagccgggtgtggtggcgggtgcctgtagtcccagctactagggaggctgaggcaggagaatggcgtgaacccggaagacggagcttgcagtgagcggagatcacgccactgcactccagcctgggcgacagagggagactccatctaaaaaaagaaaaaaaatacaaaaattagctgggcgtggtggtgcgtgcctgtagtcccagctactcgggaggctgaggcaggagaatcacttgaacccgggaggcagaggtcacagtgagctgagattgtaccacgctactgcactccagcctgacggagcgagactctgtctcaaaaaaaaaaaaaatgctcagagaagcttaacactgtgctgtttataattggagaacatttttgtgctgggttggacacttggcataaagtacatgtgggtcatttcatttttgcttaatattctcaaggtatgctctctgtgggttttgaaggtgactagacagatggaactttgtgcagggttctgcttggaaaacgagattgggaaaaccagctcttccctaactaggagtgattgtataccttttccatgtagccccagctcacagcatttatcctttttttttcttgtgtatatttttatcccttgttcatagcttcggagatttgatgtcactggtattcacaaaaatagcattacagctctggcttggagccccaatggaatgaaattgttctctggagatgacaaaggcaaaattgtttattcttctctggatctagaccaggtaaaattattttcagaaatactgttggctcttaccttcttacatttggaaaaactatatttataacttgtatttttagtcaacttgtattcttgatcatcatccctttataatctcaattgttatttgtaacatttacttttatagacttatgttttataagcttccacttctatgactaaggagttggcctactggaacattcacttttttcattccactgttgtgtattacttttacttgaaaaagaagctattatcattcctacttccttgaaaggttagtaggagtgatgccaagcacttctgaatcctaactgtggacaagtcagtgatttcaatggatggaggactctgccagccacctggcctgtgtgagatgacctcatgtgacaggaagtggcagaggaggttaggtggcagtatggtgaagatgaagaaactggagtgccaagagatccaggaactagtccaggggtgcaggcttgcacctcacagagcttgctttcaaactgtgcttctgcttcgacgcccgtgccttttccactgcacgtatggcttgatgatctgctgggttttatttgttttgtcatgtgtctgcaaccaaactgaactccttggtggcacagtcctttctttttcttatttgtagccttcattcctagagcactataggaattcagcaattttttttttttttgagacagtctcgctcttgtcgcccaggctggagtgcagtggcccaatctcggcttgtgacaacctccatatcccgggttcaagcgattctgccacctcagcctcgcaagtagctgggattacagggacctgccatcatgcccgactaatttttgtatttttgtagagacggagttttaccatgttggtcaggctggtcttgaactcctgaccttagatgatctgcctgcctcggccttccaaagtgctgggattacaggcgtgagccaccacgcccagccaagaattcagcaattattagctgcatgactttcagtccctctgatccaagactgacctagtacaaatattctctagtagtagttctcaagctttgtagtcacaggatccctttacactcttagaaagaggaccccaaagcatttttgttcatatgggttatctctaccaagtacaccatgttagaagttacaactgagaaatttaaaaatatacatatttttttgagatggagtctcgctctgttgcccaggctggagtgcagtggcgcgatctcggctcactgcaacctccgcctcccgggttcaagggattctcatgcctcagcctcccgagtagctgggactacaggcacctgccaccacgtctgactacttttttgtattttttgtagagatagtgtttcaccgttttagccaggatggtttcaatctcctgaccctgtgattgaaatctcccacctcagcctcccaaagtgctgggattacaggcgtgagccactgcgcctggctgaaatttaaaaatattttactttgaaataataaatccataacatctgcacataagtgacatattttgtgaaaatatctctatagctctattttcaaaacaggtgagaagagtgagtggcattgatttatatttttacaaatttctttattatctggcttaatagaagatggctggattctccctaatctcaagtaatcagggacacaaacactgcggaaggccgcagggtcctctgcctaggaaaaccagagacctttgttcacttgtttatctgctgaccttccctccactattgtcccatgaccctgccaaatccccctctgtgagaaacacccaagaattatcaataaaaaaataaattaaaaaaaaaaataaaaaataaaaaataaaaaaataaaaacacacctcaccaagctcagccaccaacttaaaaaggactggacaatacttttaccactttcccttctcagaattcaggcctgtcctcggaatgctacagggtacagcccatttgagctcctgtatggatactcctttttgttaggccccagtctcattccggacactagaccaacttagactgtgccccccctcaaaaaaaaaaaacttgtcatccctactatcttctgtctagtcatattcctattcaccattctcaactaactcatacatgccctgctctggtttacactgccggtttacactgtttttccaagccatcgcagctgatatctcctggtgctatccccaaactgccactcttaactcttgaagtaaataaataatctttgctggcaggactgtgctgaatctccttaggcactctctaatcagatatcctgagtcgtcccaattcttagaccttttatacctgtttttctccttctgttattccatttagtttctcaattcatccaaaaccatatccaggccatcatcaatcattctatatgacaaatgtttcttctaacatccccacgatatcaccccttaccacaagacctcccttcagcttaatctctcccactctatgttcccacgccgcccctaatcctgcttgaagcagccctgagaaacatcgcccattctctctccataccaccccccaaaaatttttgccgccccaacatttcaacaccattttgttttatttttcttattaatataagaaggcaggaatgtcaggcctctgagcccaagccaagccatcacatcccctgtgacttccacgtacgtatacgcccagatggcctgaagtaactgaagaatcacaaaagaagtgaatatgccctgccccgccttaactgatgacattccaccacaaaagaagtgtaaatggcctgtccttgctttaagtgatgacattaccttgtgaaagtccttttcctggctcatcctggctcaaaaagcacccccactgagcaccttgcgacccctgcccctgtccaccagagaacaaccccctttgactgtaattttccattaccttcccaaatcctataaaacggccccacccctatctccctctgctgactctcttttcggactcagcctgcctgcacccaggtgaaataaacagccatgttgctcaaaaaaaaaaaaaaaaaaaaaaaaaaaaaaaagaagatggctggattctgcattcaatctgttgccatacattgttttgattgaagtgtataaagaaaaactggctttacacagacatgtagttggaaatgggaggagtattttgatagccttttcagatagttgtggacattctttaataatatcctcatatgactacctcataaagcaaatggtagttgctttaaaggttacggtgacaaatgacaaatggtagtttctttaaaggttagtaaaaatgtggaatctgaaaccacatggatgaatttttcctactctgttacattaaaatctactttacccatgttggattttgtaacattatgtattggtcacttagaaaatactattcacagagtgatgcagatcttccaaatgttgacactttttttttttttttttttttttttgagacatggtcttactcctctcacccaggctggtgcacagtggtgcaatcacggctcactgcagctttgacttcccaggttcaggtgattcccccaccttggcctcccgagtagctgggactatgggtgcacaccaccatgcccagctgatttttttgtatttttatagagacagggcttcgccatgttgcacaggctggtcttgaacatctgggctcaagcaatctgctcaccacagtcttccaaagttcttggattacaggtttgagccaccgtgccagctgataaattttctaatacaatatcaaaaaaataccttcattaacatcaacatcattgtaatcgggaaagtctagctataaggaatcatgtcaagttcacagggacagatacaagttttcagattgctaatctttgtgtgagagcaacaaataccattacttgttttccttgaagtgacaggcttttttttttttttgagaaaatgtctgctaaatacccaaatttgaataattacagcatttcaaataaaaatggtgttttgtgaaaaaagcagctggctcagctcatagctgcaacagttgcacaagtggtttccttgagagaaccactgagtgtatttcagtgtgcagcagaagggagaatacaaaagtacctatcctctggccaggtgtggtggctcacacccgtaatcccagcactttgggaggccaaggcaggatgatcacttgagcccaggaatttgagaccagtctgggcaacatggcaaaaccccatttctaccaaaaaacataaaaattagccaggtatggtgatgcacacctgtaatcccagctactctggaggctgaggttggaggatcagttgagccttggaggtggagattgcagtgagctgagattgcaccactacactccagcctaggccaagagccagaacctgtctcaaaaaaaaggtttgcaacattttcatgtaatggaaatttctttatcttgattttggtgttggttacatgactataaatttgtcaaaattcatagaattgtatacccaaaaagggacgaaatttactgtaagttttaccaacaaatctgatcactgccccctacttccctcacaaaatgtcagtgatgttacagcagtatttctgaaataattgatgaaacttttcatatatatattggatttcatatatatgaaatatacatatatttcatatatatataatgtatatatatatatattttttgagacagagtctcactgtgttgcccaggctggagtgcagtggtgcgatcttggctcactgcaacccttgcctctgggttcaagtgattctcctgccgcagcctcccaagtagctgggattacaggcatgtgccacctcgcccagctaaattttgtatttttagtagagacgaggtttcaccatgttggccaggctggtctcgatctcctgacctcaaacgatccacccacctcggcctaccaaaatatagggattacaagtgtgagccactgcacccggcctgatgacacttttctgtaaaagtaacttacagaatcagattttttatacaatgaaatatgctttgtgttagcagtcgtatgccttctagaattttattttgtgtttatatataaaatatggtttttttttcttttttaaagacagagtctcactctgctacctgggctagagtgcagtggtgtgatcacaactcactgtaacctgaactcctgggctcaaatgatccttctgtctcagcctcccaagtagcggggaccataggcacgtgccaacatgcctggctaataaaaaaaatttttttgtagagacatgatctcacaatgttgcccaggctggtcttgtaaagtatcattttatgttaatagcattttatatatttaatatcatttaatttcttctaaccttctgttttctattaccctttcagttggcaaggatataatgtcctcaaagctgctttgaaccctttgtgaggggagactataatatgaacttacagagctgattattgtcgcaataattttatagaatgttccattccattgttttataatagaataagcaatacacacagtgcaacagatttctgtttagatctttatggattcttctttgaactctctgcatgtttactgcatcatccctgagcctgctatggtgcacagtaaagaatgtatctactgaggacatgtttttaaaaattatgcagattttaaaatgtttcctgtcaaactggatgcagcatgagggagatgttagtatggactcttttcccatccgtcaaataatctcgctatggtgggttgagagtgaatctgcagagagtgaaagcatgcgttaagtaaggtgcaagctgacctaagcacagctagcgggaaggacactgacttgtcctaagggaggtccattctttagcctggcgctgatgtgaggtgtaaccagactttctctgccaggggctctgtaactcccagctggtgttggaggagccatcttccattgtgcagctggattatagccagaaagtgctgctggtctctactctgcaaagaagtctgctcttttacactgaagaaaagtctgtaaggcaaattggaacacaaccaaggaaaaggtaagtttcacaagtttgccagtttggcctaaatgctgggccttgttgtagaaggtgctttagggtttcttaggtctcctgtttgccggagacctcctgtttgcaaacccacagcgcctctaagcctggggttcctggtggggccctgtgcctgcttaggatttctcctcccagaggcagacaagaagagtgtgttcttcttgtcgcagagctgtaggagcctgcacacacagccactctgcctctcagggtgccacagtcagcgcagagaagcctcaggggtggcctggtctatctgttccttgtggagccacctcctccacacagccctggtgaggggtcagggttgtggggctcactcgttattcagcacgtgtttaccatgcacccctgtgcactgtggcaggctcagcagtgacatggtaaacacggcagatctgagccctccgttgtggaaatggaaacacagatagaacacttgttgaccactgtgtcagctgctgtggaccaaaatacacaggatgctgtgtgagtttagacacacttttgtccaggtgaagggtcagggaagacatcctgaaggcatgggttccaggttgagagatcattcctcctttgaccagtgatgtggaggaagggcatcgagaagtccaccagccataccagccgtgtgggaaaagacaactggaacacctggggaacctgtaattcatcatcccaccctagcctgtaaagcactcttgtaggactctgcagcgagtttgcgtggggatggggtgaggaggggtaggtagagcagtggagctgacccctcctatgccaaggaggaggtagactggggccaacgtgggggtgggaagcagagggcggcattagtacagatcatgcgttgatgagtctacagtcatggattgtcgattggccgatgggagctggaagagttcccgtcttgtgtctcccaggaaagggcactgtttgcctgcatagaatcaggggcagggcagctgatggtcacggcatgtggggagggcttgaggctggccctgtggagagtgacagcagggactgggaaacatggtgagattggcaggcgttgatgaggccctgcggctggtggtgccgttggggacaggccgtcctggagagtcgggtgaggcggagccagcccctgtggtcgtagtcactgcccgttattctgtgttctgggctttgcggcaacacacaagtttattctcttttctgcatggcagccctccggctgttaaaagacgctctcaaacctcccctttcttctattttcgatgctgaacaccttcttttttctttttctttttcttttttgtttgagacagagttttgctcttcttgcccaggctggagtgcagtggtgcgatcttggctcactgcaacatctgcctcctgggttcaagcgattctcctgcctcagcctcctgagtagctgagattacaggcatgtgccaccacacccggctaattttgtatttttagtagagacagggtttcaccatgttggtcaggctggtctcaaactcccgacctcaggtgatccgcctgccttggcctcccaaagtgctgggattacaggtgtgagccaccacatgcggcctgctgaacaccttcttaatcccatcaacaatctggcctttttatatctgcagtctccctttcggtccctggagaactcagtggaatttatggccctgcagatcttagttctgctgctctctctgccagtatcctactcctctggcattttatcctggttcgtctgtcaatgttttactgcactgtcttggaaggaaggcagagtgtaaagagaggcattgaaaaccaattactttacatgtgggtcctattcccaacaatctctcttaaaacctggcccttggccggacacagtggctcacgcctgtaatcccaacactttgggaggccaaggtgggcgggtcacttgaggtcaggagttcaagaacagcctggccaacatggtgaaacctcctctctactaaaaacacaaaagtttgccaggcagggtagcaggcgcctgtaatcccagctactcaggaggctgaggcaggagaatcgcttgaaccggggagacaaaggttgcagtgagctgagactgcaccaccgcactccagcctgggtgacagagcgagacttcatctcaaaaaaatcgaaaacaaaaaaacaaaaaacaaacctggccctttaacctcttgtgtggagacccaggcagtttctgtaaacctctcctagtgcgtctgtgcagtcaagtctttagggaacattgattgaaagcgtgctctgctccccaggaacgttttaggatgcagaaacaaataaatgtgtccccttctcagaaggagagagattttactgagccttggggaaatgagggctaacagaataagaggaaatgtttttaacatctgtgtcttaaagacttgctttctgctgtagactattgtgtgcgtctatccctggaagcagtgcttccctcacaactgtttagtgagcggagctaggcatgtacacgtggaggcgtgacagcaagtacggaggcatccaaggagacaaggcctctgccctcaaacacaatgagagagactgtcggtcagcaggaggagagtagaggctgtcagtgctgtaaaggagcgggctaggtgaagcattagggagtgctaggcatggggcaggaagttgcatttggataggatggtcaggaaaggcctctacaagggcagtgatctttgagctgaagcctgggaagagctgctggaagagcattccaggctcagggaacagcatatgccaagacctcaattgggcaagagcttagatgttcaagaagccagaagtgactagggcactggctatggctggagtccaggggagccgtggggaggctgacacgggagtccaggggagccgtggggaggctgccatgggagtccaggggagctgcgaggaggctggcacgggagtccaggggagcctggcatgggagtccaggggagccgtggggaggctgccacgggagtccaggggagccgtggggaggctggcacgggagtccaggggagccacggggaggctgctgcaggagtccaggggagccgcagggaggcaggggagccgcagggaggctgccttgggagtccagggaaaccattgactgagatggagactggagactggggaaggctgggccagaggtcaggacatcaggacctctgctgtggacataaggggtttgacgggcctgtcaggtggctgcgtgggagtcgcagaagagagttctgtggaccggtctggagcccagggaagaagtcttgaccagaggggaaaatgaggtcaccagatacaggtgacactgacaccctgacattggatgaatccacgcagggaatgtctgttcattcagcgctggagctttgcgccaagcctctgccctgctccagtactcctcatcgggggatatctgtgaacaaggcagaacagatctctaatctcagggagctgtgtgcagagtagtgaacagataaacatgtcagagggtgcagagccagagagggaggagcaggagacacaggtgtctctttaataggatgacagggaaggctcctctgaggaggtagcatgggctgattcctgaaacaaagaggcaactagtgcgagaagaccttagagagaggctctggaggcagagggccctgcgcaccgaggatctgagcagccaggctggctgtgtggagcacggtgtggggagccccctcccgtcggctttgtgggccctgcccatggggctctttcagtccagtgctgtggtcagtcacagagggctgtggccaagccagggaggtcactctggctgctgcttggaatatgctggagggggcaggtgtggcagctcagcagggccagcaaggattctgggtgatccgggtaggagaagacaggatggggcggggttggtggtcggactgcttccaaggcagagctggcagatttgctgccacgttggttctgaggtgtgagagggatgagttggagatgattcctaggtctgtggtctatgcagctgggtgagtggacatgctgtggattgacgcagagaatcctggaggcacggggagaaggaggagatggaacagcctgctgtggccccgccatgtcctctccctgcagtggagagctggcgtgggaggcgggtggcgggtgtacctctcggggagctgtgcgctggcagccactggcatgcagacaggagctcgcctagggagatttgggcaggcttgtgttctgaagaggaaagggcatcaggagagaacaggagttggggggtcagaggagtcggaggccatatggagggacatagcagctgctgcgagaccgggggctgaggcagcttcgacgggcctgagtctgtagcatggaggctgtgcacagccctcctcatcagcagggccaagggattggaagggctgaaagaggagttgacggcgagtatggagagcttttaggaggagtgtttttgtagaagagaacaaagaaagacaaataggtggtgcccaggggggaaccatgtggcctggtgggagttttgggagaggggccgtgtggcagcacattggtgtgtgacgcgggtgcctgtggagggaacacagtgctggtggggacagagtgcaggcggtggcctcagttgggccctctcatgggcagcagtgtagggttgaccagaaaccgggacagagactctcttccagagaaagggcagggcactgagcacagggcaggtgcaggcaggtcaggaggcccagaggtagaagacgaggggtcctcttcccgtcgagtccgtgaacctcttcagaccggatgatgtgtgttacatccagaaaacctcagaggccctagccatctgcaaccgtgggtttgctgtcctgtgtatttatgttgcattgtttcatgtgtcagagccctctgcagacctgttactgtgtcccctgtgagtctagtactcagggaagccctccctggcagtagcactttgccctggggaaggagaaggagacgcagcaatctgtaggtgtggcgcccgcatgtgggtaagagccagcagccggttctggaaccccgcgactagcacatctgtttggatggccagtgggtgttagctgttgagatctctggcagggcttctgtggatccttcttctcactcagcttagactttcaggctcccattttgggtgctgtcagctttcagcgtatcagctctgtggcaccatacattatgcacaaaatcataaaacaccattttatagctagaatttgttagccagaacacactccttacatatcaacgtggtctataaagggaattaaaatttttttaggtaatcaatgaggtttttggaaatcatctctaccgaaattaagaaattatattaatttgtttatgattttagaatcctgcaatacttagaccttaaaagttggagcttcagtgtcaaattcagaaagcaccagcaagtactgcagaatcgcactgcaagtggatggtggctgagtcgggggcttaggacaatttgtacctggctctagctggttcttcacaacttcactgcctttgaccaacccactcatcagacatttccgttctttttattttttagagacagggtcttgctgtgtcaccaaggctggggtgcagtggtgtgatcacagctcactgcagccttgaacagctgggttcaggcgatcctcctccctcagcctcccgagtaactaggactacaggcacgcaccaccatgcctggctaaattttttaatttgtagagatggtgtctctctaggtcacccaggctgttgtcaaactcctgggctcaagcagtcctccctccttggcctccaaaagtgctgggattacaggtgtgagccaccatgcccagctattcagcagttttagaggcagccactcccaggaccttgctcagcagggctcctttcccttcctccagggtaagagtccacctggtgttcaggacctcgccttctcatgcccactcagatgcaccaccttgatctgagctctttgagcagctctttgagcctcagatggcgcttccagatgctgatgtgattgttcacacaggtcagcacagtgttatgagacaggctgaggacctcatcttatttattttttattttacccagagcatcaaacacgatgtcttacagaatgtaggaatcactaaatgtttgttaacatgagtgctttagttacataagatgaaccagtcaaaatggaaatgacaagagatttttcagaggtcctacaaatagaaggaaaacatttaaaaattggatcgccaagagaaattgattgacaggaaaggcagaggaagagattatgggctcccttgctggaattcctctggttcgctctatttagaggacatctccagaacaaacccaccaaaggcagtaatcagatacgatgctgttgatagagttgtccataaaagatccacgatgtcaaaacacccttggttcgtcctaacgatcattgtttcaaagctgaatttgatatataatatcctccttggaccctatccaaagggatttagttactgaggtgccagagggacctagtgagattctggtgtgcgaagaaaccccgcaaataactatctgtttgcctatgtgggtgggccctgggggtggcctctagggttgggtgtgctgctgtgtgcagggagtgtgggaacaggcacagcacaagttggccgaggtctggtggggaagcagtggcacggaggcagctctcaactgtgacctgcctgtagcctcgttcaggacaattgagcacttatggggacttagtgtcacaagcattgcttttgtgctgcatgtaagtaatctcattaattcctcacttcagcctttgagatgggagttactctgcctggtttacagaatgggaaacgggtccagaaaagttcaataattgcacgtaccacatacccactaggtgtcagggctggacatcgagcccagggctagctctaaaaccagtgctgtttctgcttttcacaatctgagaagtatttgggagaaggaatcagccaggcatagggctgaactgaaatgcttacatgtgaactctgttagcatcctgagaaataacgagaactcagattgccagtgggagtgtagattgtataatcacgtttaaaaagcttgaagttgtcttctaaacttgaatatgctctcagcaacccagcgattaccccacagcccaccaactgcatcctgagtgtccgtgacagactctgacacctgtgggctaaggggtatgcacagaaatgctcatagcacaattgctcaaaatagctttaaaaaataataattgaaatatccatcaacaagaaaatgaataaatgaattgtggaatacattaagtcctcgtttaatgtcattgataggttcttggaaactgcgacattagcaaaacaacgtataacaaaaccagtgtttttccctcaccaatgttgttgaaggagatggtgttatctgaggacctgctctatgtcatttcgcttacagttgtagtttctaagaacctgtggacgctgagtaggacgtactgtaccattcagcagtagaaatgaattagtgcgacagcttctttttatcaagaaggataaatctgagaaacatagtgttaagtgagaaaaagcaaaagagtacaattagcatcatacattttaataaaaatgaaagataaacaatactaaattatattgtctttagagatacatagatatgtgattaaaccaacaaaaaagtgaggaaatgataaaggcaaaatgcagtccagtggttccatctggggcacaagggggcaggaagtgttaggagcacaggagaacattggttgggtgactgatgatttctttcctaagtttggggatgggttcccaggtgtacctttccttgctaggcttcataactgcatggatatatgtacatatacacagtggtgcactgcataacaacatttcagtcattgacggactgcatgtatgacagtggtcgcagaagattataatggagctgaaaaaattcctatcagctggtgtcttagcgccacacattacgtgttctgtttttagatagacaaacagtcatcattatgttacaggtgcctacagtgttaagtacagtcatatggagtacaggtttgcagtccaggggcaataggctagactaagcttgtccaacccacggcccaacacaaatttgtaaactttcttaaaatgagattttttggccaggcgcagtggctcatgcctgtaatcccagcactttgggaagccaaggcaggtggatcacttgaggtcaggagttcgagaccagcctggccaacatggtaaaaccccatctctactaaaaatacacagttagctgggcatggcggtgcacacctataatcccagctacatgggaggctgaggcaggagaatcacttgaacccaagagggagaggttccattgcattgagcccagattgcgccattgcactgcatcctggacaacaagagcaaaactctgtctcaaaaaaaaaaaaagaggttttttttgtgactattattattattattattatttttagctcatcagctattgttagtgtattttatgtgtggcccaagacaattcttcttcttccaatgtggcccagggaagccaaaagattggacagccctgggctagactatgtgggtgtgtcataggctgtgccatctaggtttgtgtaagtacgctctatgatgttcacacaacgaagacatcgcctaatgacatatttctcaaacatccctgtcactaagtgacctgtgactctatatatagcatattcttttgtttgtgtcagatatttcataatttcagaaagaaaaaatatcaagcttgggggcaggaagggacattggtgcctctgatgggtttagagaaattctgaaaaggcaacaatatagatgggttgctgtgaagctcattcattcaggatgtggactgagcacagcaatcagacgtcagaagcaacagaatcagagcagggaaaggatgagcagacctggattcttcaccttctgcctcagtttcctctcctccaaaacgggagttgtaatacagtcatgtgtcacctaacaactggaatatattctgagaaatgcattgttaggtgacatctttgttgtatgaacagcattgagtgtactgacaagcgtaggtggtaggtacagcctacttccacctgggctaaatggtacagcatattgctcctgggctacagacttgcaccacatgtgactgtactgaatactttaggcagctgtagcacaacggtaagtaattgtatgtctaaacatagaaaaggtaccataaaaatatggtattataatcttatgggaccactgttgtatttgcggtccatcattgactaaaatggtttgttgttgttgtttttgaagcagagtcttgctctgtcacccaggttggagtacagtagtggcactatctcagctcactgcaaactctgcctcccaggttcaagcgattctcctgcctcagcctcccgagtagctgggactacaggcatgcgccaccatgcctggctaatttttgtatttttagtagaggcatggtttcaccatgttggccaggctagtctcaaactcttgacctcagatgatctgccgtcttggcctcccaaagtgctgagattgcaggcatgatgcatccagcctgaatacaatgttatgtgatgcgtgactgtatctgccactcatggttgttgtaaggattagacacgagagtgggatcaagtgccaggcacagtgcaggctgtgtgagtactcagtgaatggttccctgtgtgctaatggggcacacacctgtgagggtgtggtcgggcctctgttggtacagggatgacagtgtggtttgacaaaaaacaaacagtagaaagggtgaaaaatcaattattgtcttagccaaaaaattcttgttgtacttaatattaagggttgacaactgcattactttaaatcagtccatgtctgttttttgttctttctttctttcttctaattttagtactgggaaatttggtgcttgttttataccaggactctgtaagcaaagtgatctaaccttgtatgcgtcacggcccgggctccggctatggaaggctgatgtccacgggactgttcaagccacgtttatcttaaaagatgcttttgccgggggagtcaagccttttgaactgcacccgcgtctggaatcccccaacagtggaagttgcagcttacctgagaggcacctggggcttgtttcatgtttctttcaagaaggctgggtgctgagttggaatgaatatagtatctatctcctagacacagtcaaccaggtaagtgaagggacgccaccatatcttctgtgtctataggcaagagaatgtatctctataaactgttctactcagggacctcagaatgctaccaggagcagtattgacttacactttactttttcctttgggccagtcaaggaaatcaaatgaaggtttggtaatttttatagatttgaaaaaaaaaatttggttttgacatttaggtccaattttctgccgagaaatgatgtatgttttttgtatgtaaacacaaaattaaacttgttctttttgttgttgttgttgttgttgttgttgttgagaaagagtctcgctctgtcacccaggctggagtgcagtggcatgatctcggcttactgcaacctccacctcccaggttcaagcgattctcctgcctcagcctcctgagtagctgggattacagacgcatgccaccacgcctggctaatttttgtatttttagtagagacagggtttcacaatgttggtcaggctggtcttgaactcctgacctcgtgatctgcccgccttggcctcccaaattgctgggattacaggcgtgagccaccatgcctggtttttttttttgttttttttttttgagatggagtcctagtatgtcacccaggctggagtgcagtgtgcagtggtgcaatctgggctcactgcaacctccacctcccgagttcaagcgattctcctgcctcagcctcccaagtagctgggattacaggtgcgcaccaccacgcctggctaatttttttgtatttttagtagagacagggtttcaccatgttggccaggctggtctcgaactcctgactcaggtgatccgccagcctcggcctcccaaagtgctggggttacaggcgtgaaccgccgcgcccggccgccacttggttttttttttgttttttgttttttattttcagttttctttacttagcaatatatcttgggcaaatttccaacatcattaaaatcatggtaggaaataatttctgcttaaaccaagatgataacagattatcatcagagacagatttagaaactttaaacaaagctgtttagtttcagtttctccttgtcttaagagcagagcttttgctctttttaaaataaactccctgccttaccctcccgactcctcacccccagactctagaccaggccctgtcctgttcacgttcttccattctgagctcagcgggcctctgacaggcacccctttcttttataagcagagcctcactgtagaaaataaacagttttcagccaggcgcagtggcttacgcctgtaatcccagcactttgggcactttggaaggccgaggtaggtggataacctgaggtcaggagttcaaggccagcctggccaacatggtgaaactccgtctctactaaaaatacaaaaattagccaggcatggtggtgggcgcctgtagtcctggctactcgggaggctgaggcaggagaattgcttgaacctgggaggcggaggttgcaatgagccaagatcacaccactgcactccagcctgggtgacagagcaagacttcatttgaaaaaaagaaaagaaagggttttcttctttggtgtgtgtcagcagaacatgaagttcatcttctcctcattgaagttttatgaattattatcagccgtacctggtaacactggtttggcagaaagaaaactggcccggggtggggggcagaactagactcgactcttctagcctggttctgcctttaaccaagagtctcttatcggccggagcctggtttgttttcctgtaaaatggggtgggggtggaagaagcatcgacttaggggaatcaccaaggtgccttgagtttgttcattttataagggatattctgaaaggtatttttgcaccctttcctcagttacagagaacttctttccctggataccttttgaacttatgtgcacttattaattagtagcatcaagatgctttgtaactgtgcattggttctttcatctgagcatttacccgatgctttacccagtaggtataattaacttcattttataggtagagaaatggagacaggggaccgtctgggacagatgtcacagtcaccctcagagactggaccacccagtggcagcatgactggcagctttcggaaacaaatgttatgtttgcagcagtccatcagttatttaaaattagccaaaaacatagactctccttctacaacagactagtctctttatttgcactgtctacagcaaagcaaggacttgctttaagtcagtgtgggctcaggatgtcctgtgttttgttgccacccactttcagataatgctggaggaacctcccctcccttcatgtattcattcaaaacccatgagttgcagtgcgcactggcctctcctgcaggaatgcacacagtagggggactagacgtgtctgcacgttatttcagcccaggagtggggcgtcaagcggaagtttggatgaggtgctgcaagccctgagagccctgggtgttgcagcagagggcaagcttgtcagaggctgcttctcacagaggtggcgtctggagagaactggaacttccccagcaaacatggataggaaaggaatttgagcagaaagagaagcacgtgcattcaccatggaggaacagggctgggactgggctggcagggccggtgcacctgcagcagggacgagggcagggtggtacgtgggtcggagatgaccgaggccccaccatgccaggggacccctcagatcctgcttaccaatctgtgagatgttacctaactttggattgaattggaattttcagaaagttaccatagtaaagtgcagttatcatttgactgatttggactctcacacatgcatttttatgctttgagctgttaccgttgtttagttttgtgttttttgttttttttttttttttttttttgacaggccacagttgctggtttggaaggatccggtgatattgtgtctgtttcgtgcacagaaaatgaaatatttttcttgaaaggagataggaacattataagaatttcaagcaggcctgaaggattaacatcaacaggtttgtatttattataaaatgtaccatgtatatgatgggaagtactatactctgttgtttgtaattgcagttaataattgatcaaacttaccattgggccaggcatggtggctcacgcctgtaatcccagcactttgggaggctgaggtgggtggatcgcttaagctcaggactttaagaccagcctgggcaacatggtaaaaccctgtctctaccaaaaatacaaaaaactagccaggcgtggtggcatgcgcctgtggtctcaagtactcgggaggctgaggtgggaggatcgcttgagcctgggaggcagaggttgctgtaagctaagattgcaccactgcactccagcctggatgacagagtgagacctcatctcaaaaacaaaaccaaaaacttaccattattttgctaaactattgcaactttatttgaacttggaggatttggagggtttcctctgattctttttttttttttttgagatggagtttcgctcttgttgcccaggctagagtgcaatgaggcgatctcagctcaccgcaacctctgcctcccaggttcaagctattctcctgcctcagcctcctgagtagctgggattacaggcatgcgccattatgccaggctaattttgtatttttagtagagacagggtttctccatgttggtcaggcaggtctcaaactcccgacctcaggcgatccgcctgcctccgcctcccaaagtgctgggattaaaggcgtgagccactgtgcccggccgctcctctgattgttaaaatagcatttacagtacatttcttgaaagtcacctactttaaggcttacatcagatagtctcacatttagtggagttgctttcatggttgtggaagatggggagattgagaaaggaggaaggaaaaatcagaaaccactttactgatccctgctctccgtctgagacagtatgtgggattaatgctccaaaagacatagatttgcatagagttttagaatatttaaatctgtcatctgggacataccgtttacccttaactcagttcttccttgtaggatttatttttctctgtgcttttgacattttttggtaattcatacaagcccaaattttaatgagcaaagaatcctaatatgtgtcctcttgcggacatccacatgctttatatatttgggttcctcggggaacttgttcctcatggtggcaacaacagccatgtggaccccatcaccctcctcctcactaccattacctctgatgtcagagagggcaaattggggtgaatattccaaaacataatttgtataagaagtgaataagctctgactcttgagtttatgagctgggggcccctcagacagtgtcatcaaagggttagaatggctttcaggaagggtggtgacttggagccaccaggctaagctctggacctctgctgcccatagagctttctgcagtgatgaagatgctcccatctgccctgtctggtaggcagtccctgtccatgtgtggctgctgagtacttgcaatatagcaagtgcagctgagagatgaattttacattttgtttaatttttattttattttattttattttttgagacagagtcttgctctgtatcccaggctagagtgcagtggtgcagtctctggtcactgcaacctccacctcctgggttcaaacgattctcctgccttagcctcccgaatagctgggattacaggtgtgcaccaccacaccaggctaatattttgtattttagtagaaagggggtttcaccatgcaccatgttacccaggctggtctcgaactcctgagctcaggcagtcctcccaccttagcctcccaaagtgatgggattacaggcatgagccaccgcgcccagcctaaattttgttcaattttgatcaatttgaatttcaatacttacaagtagctggtggctgcctattggacagggagctctaggcaagatctgccattaagttatgtaatcttcagcaagtcgcttcacagcagagtcctcccctccagtctccagtgtacacttcattgcctgcagtctgcccctaacacatgccctcaatagaatgtgggtgcttcaagggcaggaattcctgtgtcttatggactgccatgtcccagcagctagccctgtgtctggcacacggaggatccccgataaagagaggatggcgaatggatcaaagtgggctgtggtcttgtgttgagggtactgtagctggaactgctctggccttgtgccctgtggtgtcgtgttgcagaaaagatgagtccactgcagtgggaagctcactggcccttgggcttggggacaggagacaggtactcacatgcctgttctcactctgcggtctactggccttgatgctgtgtggtaatggacttctctgtcttgagtttgttctaatggaaaattacctttccctcttccaggaaacttaattacaggtacacatgtatttttcaaatgccctttgagtaatcttaaagtatattcaaggcagagtcttagtatgaagtataactaagctgttttgttatacacaggcatctctcatttgtaaataatttgtaaattgaagcgagaaatgctgtattcttagtatttttttacttttttttttttttttttgagacaggtttcactctgtcgtgcaggctggagtgcagtggcatgatctcagctcactgcaacctccacctcccaggctcaaatgattctcccacctcagcctcccaagtagctgggactatgggcgtgcaccaccacaccctgctaaattttgagactccgtctcaaaaataaataaataaataaatataaaaagaaagctatggcaaattattttactgattttaatatatgagcttcttgaagaacaaaaactgtttcttagagtcttttgtatgattcttttagttttggtggattttttttttttttttttttgagacggagtctcactgtgttgcccaggctggagtgcagtggcgcaatctcggctcactgcaagctttgcctcccaggttcacaccattctcctgcctcagcctcccaagtagctgggacccccggcgcccgccaccatgcccggctaattttttgtatttttagtagagacggggtttcactgtgttagccaggatggtcttgatctcctgaccttgtgatccgcccgccttggcctcccaaagtgctgggattacaggcgtgagtcaccgtgcccatcctagttttgctggtttctatgaatttagaatcattcagttctttagctggctggtgcctctgtgacaactggtatttagggctagcaaacgtggataagtgcacatcagctctctcttggatcaccagtggtaaaaccagactcttctttcttagtgagagatggtctggagatgtctggatgctcagagcgtgtccacgtgcagcaagcggagaagctgccaggggccacagtttctgagacgaggctcagaggctcttccatggccagctccgtggccagcgagccaaggagcaggagcagctcgctcaactccaccgacagcggctccgggctcctgccccctgggctccaggccacccctgagctgggcaagggcagccagcccctgtcacagagattcaacgccatcagctcagaggactttgaccaggagcttgtcgtgaagcctatcaaagtgaaaaggaagaagaagaagaagaagacaggtaccctctgtagctggcacacacccatctggggttacagtctttccagattctctgggagtgctgctgctcactgagtgagcaatgctccatacatccaaaagcagagaacacatacatttcttccccaaaggagttttactgcaaaatacttcacattaacggaaaatacacacacacacacacacacacactgtaaggtctaaatgatgacagaacacctgtgtgtactcaccaccctgcttaaagggtctcagttttgtacttttcaatatttatttatgtatttatattatttatttattttttgcgacagagtttcgctcgtcgcccaggctggagtgcaatggcacgatctcggctcactgcaacctcacctcctgagttcaagcaattctcctgcctcagcctcccgagtatgcatgcccagcgaattttgtatttttagtagatacagggtttctccatgttggtcaggctggtcttgaactcccaaactcaggtgatctgcccgcctcggcctcccaaagtgctgggattacagcgtgagccaccgcgcctggcatagtttttagtatttaaattaaaatgtcggggccgggcgcagtggctcatgcctgtaatcccaacactttgggaggccgaggcaggcggatcacgaggtcaagagattgagaccatcctggccaacatggtgaaaccccgtctctactaaaaacacataaattagctgggcttggtggcatgtgcctgtaatctcagtcactcgggaggctgaggcaggagaatcacttgaacctgggaggcagaggatgcagtgagccgaggtcacgccactgcactccagcctcgcaacagagcaagactccgtctcaaaaaaaaaaaaaaaaaaagtgttggtttatccatgtataccattgattaaatcagagattctgtgagcctgggtggaaagttgtggaaaccagaagatctatgctggtaaatacttgggacattttatgtttagtgttgaatatgctaccaaatatgggatttaacattgaatttttttctttttttttttcaacttttattttaaatacagggggtccatgcgcaggtttgttacatgggtatacagcacccaggtagtgagcacagtatgcagtaggtggcttttgacccatgccgcctcctctcccgctctggaggtccacagtgtctgtccttcccatgtttatgtccatgcgtgctcagtgtttggctcccacttacaagtcagaacatgctgttggttttctgttcctgttgcattaatttgcttaggattacggccagcggttccatccatgttgctgtaaaggacaagatttcattctttatttttatttatttatttatttatttatttattttttaatttattggagacagagtttcactgttgtcacccaggctagagtgcaatggtgcgatctcggctcactgcaacttccgcctcccaagttcaagcaattctcctgcctcagcctcccgagtagctgggattacaggtgcccactaccacgcccagctaagtttttgtatttttagtagaggcaggggtttaccatgttggacaggctggtcttgaactcctgacctaaggtggcccacccgcctcggcctcccaaagtgctaggatggcttatgagcgtgaaccaccgtgcacagcccagatttcattctttgttatggctgtgtaacactgaatttttcaaaccttttactccttggttcctgttaatcctctctagctaagatgactgcaacactgaaggaaatgttattagatttctaagcattttaataattataaggaattggtttgtgacccaggtgaacatctcagtttgtcccctggtttttcttagctgccctcaaacccatggatttgttcagtacttgcatgcatagaaagcatctctttgttgggattatttgtacttaagaggtttattcttcattcaccaaatatcctttatttaaaattttttttcttgagccaaaaatatgtgtgcaagttagtctcttactaatcatatagaaccgtgccttattttgaatgttcttattctgaattagaaggtggaagcaggagcacctgtcacagctccctggaatcgacaccctgctccgaatttcctggggacagtccccagtccttgaacacagacttgctgtcgatgacctcaagtgtcctgggcagtagcgtggatcagttaagtgcagagtctccagaccaggaaagcagcttcaatggtgaagtgaacggtgtcccacaggaaaatactgaccccgaaacgtttaatgtcctggaggtgtcaggatcaatgcctgattctctggctgaggaagatgacattagaactgaaatgccacactgtcaccatgcacatgggcgggagctgctcaatggagcgagggaagatgtgggaggcagtgatgtcacgggactcggagatgagccgtgtcctgcagatgatggaccaaatagcacacagttacccttccaagaacaggacagctctcctggggcgcatgatggggaagacatccaacccattggcccccaaagcactttttgtgaagtccccctcctgaactcactcactgtgccttccagcctcagctgggccccaagtgctgaacagtggctgcctgggaccagagctgatgaaggcagccccgtggagcccagccaagagcaggacatcctaaccagcatggaggcctctggccacctcagcacaaatctctggcatgctgtcactgatgatgacacaggtcagaaagaaatacccatttctgaacgtgtcttggggagtgtgggaggacagctgactccggtctctgccttggcagccagcactcacaagccctggcttgagcagcctccacgggatcagacattgacgtccagcgatgaggaggacatctatgcccacgggcttccttcttcatcctcagagacgagtgtgacagagctcggacctagttgctcccagcaggacctgagccggctgggtgcagaggacgccgggctgctcaagccagatcaggtatgtgggttcgggtggtgggaaaagtagctgaggcttctttcttaagggtaataattgtcaagactgattattttccttctcatggaaagaaattctattcctactgcaaaatccgtaggccaactctgttttcaagtctgggtttcaggggatttccagcacagggactatgaatggcttgaactacttctgacctgttctaccctgctcagtaacctgcctccccaaccaaggtagcgtcttgctgtttcctctgaccccacaagtgcaggctggtgtaggcacttactgttagccatcgtagggcagggctgaattggcctggggccatctcagaaaaccagtgggcagaggactgtccacctgtggagtagagaaagctctgagcagtttggaggcagggagtctcctgtccttctcctcacacccctccaaggaaccatctgcaagagcacgaggccatttccagaactgctgtctcctcaacctccgaacagtggctccaaggctcccctgcgagctgtacaggaaccagtttggagtaaccagtctttgtaggtccacccagcacatgtaactaggagatgacttttaactgtccttgagcattttatattaaaagtgatttttttaaaagtgcctacttcccttagcaagtaattattactagatatatttgtttcaaaactgtgtcttgccctgtctcctactaactgtcgatgtgaggtatgaattatggctgcgcacttacagccacgtgtgctttccacagtctacgctggcttctgtcagtgctagcagtgtgacgctttgtcagtgctcaccatgtgcaggtatcccacaaagcactttagaggtttaactcttttacttctctaaacacgaactataaaataggcactcttcttgtccccattttacagaggagaaaatggaagcacagaacagctagacagcttgcacaaggtcacatagcaaatgaagggcgggccccaggaccccctcactcaccctctgtgctgtcatgcctcagaagtgaaacatgctgcttacttgttttgagacaaaacgccataagtctggcttttttttcttctttctttcttttttttttttttttctgagacagggtctcactctgtcacccaggatggagcgcagtggcgcaatcatggctcattgctgcctcgacctccccaagctcaagtgatccacctgcctcagcttcctgagtcactgggactacaggcatgtgccaccatgcccagctaatttttgtattttttgtagagaaggggttttgccatattgcccaagctggtctcgaactcctgagctcaagcaatctgcctgcctcggcttcccaaagtgctgggattacaggtgtgagctgctgtgcctggccaagggtggccttttattcagtcatccggcatttatcttttcaacccagtggttcttgagtggccttgactgtcagcctctgtgattatgctggggaccacagtgcagatggcagctagttgtggattccatcttcctgagcctcagagtcttgagggggagccaggtacatgttcacatcctcgcagttgagtgggactcaggtgagggtactgagcaaagtacagggctgcaggaagcgcaagcagcatggccccctaatgtctgggcgttagccaggcagactgtcggtggggtggggtattggaattctaggccagaaatttaggaaagccctcacttaggtgacagggatcctggccctttgagcccctgactctctaacttcctcccttcctcatcccactccaggtagctgggaagccaagaaattttatggtgtgtttttatttggaggttcggtgtggaagtaagacttgccatggtgagcagggctggattgagaagagttgggcaccattttctttgaagtagttaacttctatgtgggtatctgtacaaatacatttatcttctttgcatttattgaaaagtattaaagtacaaagactttatttagctttgatttttaaaagaattctagcaaggtcgggcacagtggctcacgcctgtaatcccagcactttgggaggccaaggtgggcgaatcacctgaggtcaggagttcgagaccagcctggccaacatggcgaaaccccgtctctactaaaaatacaaaaaatagccgggtgtggtggcagatgcctgtaatcccaagtactcaggagcctgaggcaggagaattgcgacttgcttgaacccaggaggcggaggttgcagtgagccgagattgtgcccctgtactccagcctgggcgacagagcgagtctctgtctcaaaaaggaaaaaaaaaagaaaatatggtggaaaaaagaaagacagtggtagtgccatatatccagtgcctctgtaatgattagactacaaaaaattgacttgcatccaaatgttgaagaacctggctctttgtgtaaggtgaggtatgcctgcagaataatagcagctccttcgtaacgtgatgtgatgctctaagcgttacatttgcaaaggtgttagaacaggagaaaatgtcatccagggactccagggagtctttgtagggagacagcagcacgcgtctcagaaggtttgtagtagaggggtgtccacagatagcaggggttgggagaagggttgacttggcgtcttgctgacccgttttaccgtctcgtgttaatgatatcctctcacctttcttactgagaacagtaagccaaatgtggctgtgtcctctgccacagaactcactggctcttcccttgttagtttgcagaaagctggatgggctactcgggtcccggctatggcatcctcagcttggtggtctccgagaagtatatctggtgcctggactacaaaggcggcctgttctgcagcgcgttgccgggcgccgggctgcgctggcagaagtttgaagatgctgtccagcaggtggcagtctcgccctcaggttcgcctccccgctccctgctcccgctccctgctcccgctcgccgctcctgctccccgcccccggggtgcagacatcttagtacagggctcccctgcagcagctctgggctcacgctgccgtgcgttcaccaggtttgcctcttcaggaacgtttgaggggttgtctccaaagaacgtgaattgcttcattggatgtcaattcgtagtgtaaatgggtgttcagtttgagtttttgttttctttattaattgcaatggtaagctctgatcgtatttttgtaagctagacaaaaagtttgaaaattgagggacttttttagggatattaatatactaactcttcataaaaataatacgtgtttctctttctcattgttgctttaaagcaaccgaactaacgaagacgggcctatggatatgttagatatattccaattatttggcttcctctttaggaattctgttttaatgagctctctgctgtgggtgaacagtctactccctgactctaaaaggaaagtccattcattctttcatgctgctgttaggccattgttagtgaactggagctggtgtttcctgaacgatgttctcctgagctggaagacctcccatatctgcatggaatcatttgcttgctttttctttctttctttcttttttttttttttttgagacagagtcttgctgtgttgcccaggctggagtgcagtggtacaatctcagctcactgcgagctccacctcccaggttcgcactattctcctgcctcagcctccccagtagctgggactacaggcacccgccaccacgcccagctaatttttttgtatttttttagtggacacggggtttcactgtggtagccaggatggtcttgatctcctgacctcatgatccgcccgcctcagcctcccaaaatgctgggattacaggtgagagccactacgcccggctttgcttgttttttcttaaggttgtgttggccacgtcggcacctacgccagtggggacacttttgccttgaagcagcctggtttactgtcaggacattggaatagaagtcagacgaagccgaagctgagtctgtggcttgggacctgtctgttctctgtaacttcactgtgtttcgggatgaatttcccttaattctccctggtctctgtcactgtttaaaatattagtttgttcagcgttgtttttcttgcttgctttcactgtttgtttgaaaaatatttttctttagagactggctaacaacccactccacaagctgtcattacacagttgtgtgttttaattcatttctcgttggtatcatttaccttcaggtttgtctccttagccttttagaactttggttctattcctgactatattagttacttgtattcccaggccccttggtccctcactgtgctagcgggaactctgtatctccatgagattcacctgctcagttgaggcgtccttcagggcccagtcccatgtccttggtgggcagcagagcccttgtgccgggggcaccacaggcagagatgctcgacaggccctctagtccagcccagctgacactcggtgatcactggtggccccttgccttgcctgcgtcggcctgctccaggcctccagctgcagcgctatcctgccttccctttcctctctcctcctccatctcttcatcaaagtcctcttcacagtgaaaacaggccaactcagtgcaagtgtgttccttctgtgcaccttttccattcagctcatccagaactgatccttctctttgaatccctaaaggactttttcagcctctcctagggcactagttgtgcttaggatgtttatttggagacttatcaaacctaataatgtcatcagtgtttctcctcccgtgtgaggagcgcctgtcatgtgcccagctctgtggccatgtggttgatctgcttccgtctgcagtctttagagcagccctgtaaggtggagatgatccccacggcccaggaggaaagtgaagcttggagacgggcggtgacatggagcctgaagctgcatagccactgggtggtggccaagggcccaaacctgggtctggtggcctctttccccacttggggggacagaacaggatgtgttttagaaatctttctcccctcaatgcccagcatgaagacttttgtatagaaatatattctagtatttattggacagtgaatagaatttttatttccataggagcccttctctggaagattgaacagaaatctaaccgggcttttgcttgtgggaaagtcaccatcaaggggaagcggcactggtacgaagccctgccccaggcagtgtttgtggccctgagcgatgacacggcctggatcatcaggaccagtggggacctatacttgcagacaggtaaccgcgggccacgcttagaggcctgccagctctgccgtcactgcctctgctgcaccctgctttgctagtaacatgcttaccacaatcgctatgattaagaggctaaatccattcgaattaagacacttctgggaagagagtatttgccatttggcatgtattagcagtttcctgcattgacacaaactcaacccaggacaaatttagggcaaaaatgaataggattatttggtgagatacagaaacagaatcttattctcctatggccaaccaccgcatatcacgtatcctacaatgttagatcttaagaggtaagaatacagaggaaggacataaaattcatttccccctttaagctaaagtttaagtggctgcattttttttttcagccatatcaaagcccggctcctatatacttacttacccgtgggccaggaaaaaaaaagaaataatttgctcttttttattttgagacggagtctcgctctcttgcccaggctggcatgcagtggtgccatcttgactcactgcaacctctgcctcctgggttcaagtgatcctcctgcctcagcttcctgatcacaggctgggattacaggtgcccatcaccacgcccagccaatttttttgtatttttagtagagatggagtttcactatgtcggccaggctggtcttgaacttctgacctcaagtgatctgcccgcctcagcctcccaaagtgctgggattacaggtgtgagccaccacaccaggccataatttgctctaaatagcagttcaggccaggtgtggtggctcatgcctgtaatcccaacactttgggaggcctagacgagcagatcacctgaggtcaggagttcaagaccaacctggccaacatggtgaaactctgtctctactaaaaaaaaaaaaaaaaatacaaaaaattagctgggcgtggtggcgcttgcctgtaatcccagctacttgggagcctgaggcacaagaatcacttgaacctgggaggcagagcttgcagtgagctgagatcgcgccactgcactctccagcctggtgacagggcgagactccgtctcaaaacaaaacaaaacaaaaatagcagttcagcaagtcacaggaagctgccctcagggaagtttttagctgatggaagggcacagtgggacttgcttattaaaaataagctgtaatgacagtcagtgtttactgtcagcagaatggggaaggatcttccaccagcaatgtgatttatcagtatctggaaggactgtggggcaggagttatcgtcagttgtccagaggccacgttggatttatgtaaagatcagtcttccaggcgtttaatgttgttgattccaggagaatgttgttgttgttgttttgagacggaatctcgctctgttgcccaggctggagtgtagtggcacaatctcggctcactgcaacctccacttcctgggttcaagcgattctcctacctcagcctcccgagtagctgggactacaggcacatgccaccatgtccagctcacttttgtatttttagtagaggcagggtttcactatgttggccagtctggtcttgaactcctgaccttgtgatccgcccgcctcagcctcccaaaatgctggcattataggcgtgagccaccggcctcaggagcatgttttaatcactgctgtgagtcgtcagctggggatgagtcttcaggttgaagctcttgcacagctggctctctcctagctgtgtaagaacctctggcctgggtgcacagccatgctggcttcataggccatatgctggcccaggtctctccagcctagttcctgtgtctttctttaaatgaaagtagctctgtcaaggcacatgcacatctaagctgccaggacatttgagctttggtcatggggaagacaggaggtgcttctggcctgggggtgaggagcgagtgacctctaaaccagtagtgccagaggaatcaccaggacagtgatttcacatgaggtggccccacccagacctgttggattaggtccaatccctctggagactgctcaggagtgtgtcgtgtaagaagtcctgccggtgattcccacctagtttagtggaaggaaatatcacccaaggactgcaatactataggtgcgtctgtgattagtcacggagcatatttgagtactgagacctaattgcaggcctaaggtcaaggaatacagggttgtaggcgacagttggtctgtctgctcccctgggaatagcctttgagctcatttagacatactttattgacagaacacaaggaggcaaggggagagccctggacagggagccagggaccctgagctttggcctgccactgccttgcagtttgacagacctcagatttcatctgggaaattcggggtttcattttattagtggaacctcgcacccagtcagagcagagaggagccgccgtgctggagctctctgcaggaacgactgcaggcctcaggtccctgccaactccagcagcgctgcagccctctgcctggaagagctgctctgccctgcagcctttgggcctccatctggccactctcctgctcttggcttttgtgttcttctcttagaacttcttaagctacattgggacaccagataattctgaattgttcagttttcaaagagtgtctaaaactgttttcagatagatgttacatttaggcagaatttaaccactttatgttgattaaacttgacaacaaaaaagcggccggacagggcagctcctgcctgtaatcccagcactttgggaggctgaggtgggaggatctcttgagcccaggagtttgagatcagcctgggcaacgtagaaaggccccgtctatatttttaattaattaattaattaaagtttttttttaaagcactcatcataaaagaatatagcaaaataccaaaaaaggaaaaataagccaataaccaagtcaaaatgaggtgtggagttctgactgtgtgtctttggggcttcttcccatcttcctggcaggtctgagcgtggatcgcccttgtgccagagccgtaaaggtggactgtccctacccgctgtcccagatcacagcccggaacaatgtggtgtgggcgctgacagagcagagggccctcctgtaccgggagggcgtgagcagcttctgtccggaaggcgagcagtggaagtgtgacattgtcaggtactggcgggccagagactcctttcacatcgtgcttgtcctacccttcgttcttgtccacttgacaccacaaggcaccatgaggccgttcctgggaggcagcacctgcagcctccatggctataggctaagcttgaatctctgcctaattctgaccggcaaactggacgttgagtcagagctcgctttttaaaaatgctgccgccctctgcgcagccctgagcatcacagcgtcatgagtctgtcatgacggtctctattcagaattgcccaccgtcaggtagttctggtttagtgtctgtgacggcttaggtccaaatatttttctttattttcatgctaatcgaagttgatctctgaactgtagcttttttttttttttttgatacaggttctcactctgtcacccaggctggggtgcagtgccacgatcacggctcactgcagccttgacctccgggctcaggtgatcctcctgcctcagcctcctgagtagctgggactacagatgcatgccaccatgcccagctaatttttgtattttttgtagagatgagttttgggttttcatcatgttgcccagactcatctcgaactcttgggctcaagcaattctcctgccttggcctcccaaagtgctgggattacagacatgagccactatgcctggcccgatctctgaactgtaatttattaagctatttttttttttaccattcaagatgttagttatagaattgccatcagatcattttactagtatggaagtattaatagtcctttgaaaaactagattaggatattcttggtttgaatttagcaagccaataaactttcagtgaatacctattaagagccagaatggtccaggtgtggtggctcacgcctgtaatcccaacactttggaaggccaaggcaggcggatcacgaggtcaagagttcgagaccagactgaccaacatagtgaaatcccgtctctattaaaaatacaaaaattaaccgggcatctcaggaggctgaggcaggagaatcacttgaacctgggaggcggaagttgcagagagctgagatcgcaccattgcactccagcctgggtgacagagcaagactccatctcaaaaaacagacagacaaaaaaaagcaacaacaacaaaaagccagaatggtgctaggggctgggtgcgccaagagggctgagactggccctgctctcatcagttccaagtctcatgggggccccgtgcatggatggacacccattagcacagatggccctaaacaggagtgtggagcatgcagcactgagggaaccatggactccatgcagagatcaggaaggcagcatgcagagtggaccaacagctaagccttgaagctgacgaggacttccccatatggaaggagggggagggcgtctccagcaaagagggcagtgtctgcctaggtccagctgcacagaatagcctggcacatcgggggagtttacagtcattcccttggtgagggagggagtagagagatggaggcgctcaggggccttggattggcgggggaaggagtagagagatggaggcactcaggggccttggattggcgggggaaggagtagagagatggaggcactcaggggccttggattggtaggggaaggagtagagagatggaggcgctcaggggccttggattccttttgtgcctactcgcttttttcttaggttattttctctcttaagagtgttcccagccattctgggtcatcagtgtgtctttcaaaagctgccacccacttgaaccatatctcttgcacagtaatttaactcagacccaaacttccttccctggcacctgctgatccgctccagggccacgtctcttctcccagccacgcctgccgggagaccctggatgtccgcagtccagacacactgggcactctgcctatgggtgctgacccccctgttctcctccttattttcagcgaaaggcaagctttagaacccgtctgcataacgctcggggatcagcagactctctgggccctggacatccatgggaacctgtggttcagaactggcattatttccaagaagccccaaggagatgacgaccattggtggcaagtaggtgttcagctctgcgccacgtgccgaggtctcccgaccttttctgcttccccttttcttacttctctcttttccttaacgatactagattaaatttaaaatactcacttttttattatttgtttgtttgttttgaaacaagatctccttccgtcatccaggcggaagggcagtggtgcagtcacggctcactgcagtcttgacttcctgggctcaggtgattctcccacctcagcctcccaggtagctgggactacaggcgtgtgccaccatgcctggctagttttttgtatttgtttgtagagacagggttttggcatgttgtgcaggctggtctcaaactcctgagctcaagagatccacccagactgggcagagtggctcacacctgtaatcccagcaatttgagaggccaaggcaggcagatcactcgagtccaggagttcaaagccagcctgggcaacatggtgaaaccctgtctctaccaaaaatacaaaaattagttggacatggtggcacacgccgttggtcccaactactcggaaggctgaggtgggagaatagtttgagcccaggagacaaaggtttcagccaagatcacaccaccacactccaacctgggcaacagagctagaccctgtctcaaaataaataaaaataaaaaagagagagagagagaaatccaccctctccgcctcccaaagtgctgggattacaagtggagccaccactcccagccaatagtattccttttttctatttgatggattagactttgctgtgtttgagtgcattagaaacataaaggacttttcatcataggaaataatttgcaaactctttgtgtaaataatgcacttaatttatttattttgatattgtttatatatttattattataggctaaataaacccagtgacatccatttgaagacctaggtaataatgatgtttaattatgaacaaatgtgctgagaaaagagcccagataataggtttgaaagcccaacccagaattaaaattgagctgtctctgcttattcagaaggcctctaagtagatggtatttcagcaaagacaggagaattttcccacgtgcttccagaaaaggaaacactataagaaacaggatgagggtataatcaagctcactgtgtgtgatttggtcccagcaagagcgcctagaatgaatttctcttttctttttcttttctttttttctggggcagagtctcactcttttgcccacactggagtgtggtggcaggatcacgacccacctcagcctcccaagtagctgggaccacaggcacatgccaccatgcctggctaattattttggtagagacaaggtcttgctgttacccaggctggtctcgaactccttggctcaagcaatcctcccaccttgacctcccaaagcgctgggattacaggtgtgaaccaccaccctcggccctagaatggattttcaaaggagtgtctactttccccttctttggtatagtttagtgttagtgttgctcccacagtctcccactgtggtaggtaagatttcactgatagtcgatggtcgtgaaatatttgatgtttcttttttttgagacggagtcttgctctgtcacccagtctggagtacaatggcgcaatctcggctcactgcaacctccgcctcctgggttcaagcgattctcctgcctcagcctcctgggtagctgggactacaggcacgcaccaccaggcccagctaatttgtgtatttttggtagagacagggtttcaccatgttggccaggttggtctcaatgtcttgaccttgtgatctgcctgcctcagcctcccaaagtgctgggattataggcgtgaaccaccgcgcccggccagtatttgatgtttctgaagtatcttgccccattggtttatgttttattgtcacctcagacttgctttgttgaaggcttgtcttgcattgactgctctgaggtctttcagatgagaatgtagaaaaatgagttgtgtttactctttgataaaatatgtattctatataatatgtacattatatacagatgtatctaatttatatactaggtaatatttgatagtcatgcaaatgattttaaaataccttttgtgtacttgtaaccatatatatacatatacatgtaaaaatatacatatatgtatttttgtagagacagggtttcaccatgttggcaggctggtctggaactcctgacctcaagtaatccacctgccttggcctcccaaagtgctgggattacaggcgtgagccactgtgcccgaccaggagtagggcatttatgccagtgatgttttatgtaatcaaacccagcagggcagaaatgtgagtgaacatcatggagaatcagattttcactcataaagaatttgccttatatcaagctgcccaagaagagaagagcttcctgcagggaggggtggttggagaaatgtctgaggtatatgaatgcttttcaggaatgttatagaagcaagctacccttctgagctagggttagagtctagatacccaggatggtcctagttgatgctcttgccctggagtaattattagtagtcccaattcagatcataaattagttcatcacagccttgcatggtggctcacacctgtaatcccagcactttgggaggcctgggcgggcggatcacctgaggtcaggagttcaagaccagcctggccaacatggtgaaaccccatctttactaaaaatataaaaaattagccggctgttgtggcgtgcgcctgtagtcccagctactcgggaggctgaggcacgagaatctcttgaacccaggaggcagaggttgcggtgagccaaaattgcaccactgcactccagcctgggtggcagggcaagactatgtctcaaaaaaaaaaaagttcatcactctacttgtgatacctttttagatgcatattatgtttctaagtaccgtatactgttgtccattggaaatacctgatttaaaagcaaaattaaagctgggcatagtggttcatgccagtaatcccaacactttgggaggccaaggcagggagatcacttgagcccagaagttcaagaccagccctgggcaacacagggagacctgtctctacaaaaaatttaaaaattggctacatgtagtagcattcgcctgtatttgggaggctgaggtgggaggattgcttgatcctggaagtcaaggctgagtatgattgtgccactgcattccagcctggatgccagagcaagactgtctcagaaaagatggcaaaattattctttctcactctgattagaatgaaagtcttcttagaaggggtgtgagggggtgataatcacaaaagtaatacatgcttgtaacagatccatgttgtataaaagtatataaaatgtgaatatattcttccatacctttaaatccaaccctacgaaggagctggagttagcattagcagtttgatggcatcctgccacatttttttggtcctttcacaagcgcacacgtgcacatttgtgtttggatggtcatcttgttactagaaatgcagaggtgtggacctgagctagaaccttccctcaaggcagagagtctacacttgtaactgctctgacagcagggcttttgcttgtctcctccttccaggtgagcatcacggactatgtggtgtttgaccagtgcagcttatttcagacgataatccatgccactcactcggtggccacagcagcccaagcccccgtagaaaaggtggcagataagctgcgcatggcgttttggtcccagcagcttcagtgccagccaagccttctcggggtcaataacagcggtgtctggatctcctcgggcaagaatgaattccacgtcgctaagggaagtctcataggtgggtgaattgctgtaattttcacactggctttataggcagcctcactttaaagccaacatttaaagaaaagctttaagatctcaacttgaaaagataatttagtgccagtggtatgaagtgtctagtggaggcactctatgctttgtgatcagtttctctcctttttaaaaaatctgtcattcctaaaactcgtatccctgtgtctggatagtgtttcccctggaaaccttttatgacataagaaaagcaaatggaggtcatttttatgttaacaatttcacattttaaatgaaaaaatccacccaaacctagtgagagagaatggtccacttcctggagggaaggtgatcgccactgttggaaatgcaaggctctggccaggtctgtgaatgtagatgccagtctacacatcctggggtttgtttctgtgagtgaaccccttgcttttctccagccctctccctgctgcatggcctccacgaccctggactgggtgtggctctgcctggcagtattcagagggagatgaatgttaggctgtgattgctcatgtcgctttatttagggacactctagaattatctggagaaagggtttgaaggccagctgtcgtccagaactaagatctgaagtggttttgtctatgctttctttctttaacacattcttcctatttactctttccaggcacctactggaatcatgtggttccccgtgggacagcttctgctacaaaatgggcctttgtgttggcttctgcagctcccacgaaggaaggtgggtcagtcttagcctcactgaagaatctagagcacagcttggccattggaaaggttcaaaccacagtcggactgtggccttgttggttatggggcatgcctcggagactgaccacgtgagggtgtcagaggccagtagcccttgttagctgagccgagggccctgaatcgggataggcctgaccaggagagcctctgagagggaccgagcgtggtgaagatgagggaaagtgtccttctgaaggaggggctcacacagtgcagccaccggggctggcagctggtgacttccagtggcacatggcaggggccacagcttctttgggcaccttcccatctcccctcgagaatccttctgtcacctcccagcaacttccttccgtcttgttcacagcctccggataacctaagtccgacatttgcaccgcattaggcagacctgccctgcagcggggtgctcctgccaaccacattctgggcagaactcagtgtccctgcggagtacagggtttgtgagggagccagggcaccagagggtgagggagctggcatctgcggccgggaggggcacttcccccacccgcttagctgggagccccggcagtcaggcgacctctctgggaagtagctgtacctcctcccaggattgcctgaggatgaaatgcaaagatgctgtgaaatctgtggtgaagagggaatcgtttgcttagttcaaaccattagtcccactaggatgcaggtgactgggtcagtacaataacttcttactcaccagattgttcggaccacagttctggaacccagaaatctctgaaaacaatgttatttcttgagtctggcataaattaatttggcagcaaaacctgaccggatctcacatagctgcctccagccttggttgatctgttggctgtgaccgcatccatgttgcagggatgttaccgcacttcaccggggagcgcctggcccctccgtggttgttttgtaaacctctggcatacccattagcttaggttttcaaaaatccagaaaaagtttgaattccaaaacgtggccacaagttgtagataatacttcatataacgtactgtgaccaagattttaactgccctaaggattatttgcattttaaacagaatctgttaaacctaaaggacttttttaaaatgctgtagggaatgaaaggacatgattttgaggcaagggtgggaagagaagcacttccagcttcctaagccttctccagcagctgccccaccccccggccccatccccagaaggtccgggagagcaccatggcgccatccttcctaggaactgccaaccctccctccctccagggcaccgagttgatagtcttctcctcttggtaaaattaactttctacattaaaaatgctttggtgcctttgttcaagtgaaaaacttctcagcccatgaaaaatgggaggtcaaagccactaagccaacattatggccttcataaaatctcctaagccttgccttctttccatttctttccaacatctcaggcgtgtttcttgttagtcacggtgtttccctctgccttctaccttaaagtgctacaccgctcctgcccgtgtgggaatgggcaggtgagtgagctggcatctgtggccaggtggctagcgtctgctgaaaggcaaaggctgccttgtgcatttagggcaggcggcttggtgcagacaacacctcgatgacaaacatgacccctttctgcaggaagcttcctgtggctgtgccagagcagcaaggacctgtgcagcgtcagcgcccagagcgcacagtcgcggccctccacggtgcagctgcctcccgaagccgagatgcgcgcctatgccgcctgccaggatgcgctgtgggcgctggacagcctcggccaggtgttcatcaggacgctctccaagagctgccccacgggcatgcactggaccaggctggacctctcccagctaggtacggccacctcgtgagtacacctgccggtgccctgactgccctaaaccggcatcacaacgtgatgtcggacaaaactgcccggcctgtgtccaacctgtgagagttctgagggggtgtttataagctgctgaatttcaggagctcagttggccactctttcagactagacaggctctgggttttgtcccttcccctgccccttagagtttgcagggctgtcagaacccgaggagggtgtgcgtcctcaggtcaaggggccactcgctgcgagcggcttgaaggatactggtgatgcagctgccccgtcagtctttctgaatatggaacatagctttatgacctgaaaagctgaaaagatgggtgttccctatgacaggatcagtgccacgtttgtctatctcctcaggacagtacctggcggaggagagtggctcagcacacaggtgctagctctccttcagctcagccagatataggaggacctgcatccactagctcctgcttttctctgaatcttctatcaaaagccgtggagtaggctaagaaatgtagtgctatttgtaggccgggcgcagtggctcacacttgtcatcccagcactttaggaggctgaggtgggtggatcacctgagatcaagagttcgagaccagcctggccaacatggtgacaccctgtctctactaaaaatacaaaaaaaaattaggtgggcgtggcagtgcacgcctgtagtctcagctactcaggaggctgaggcaggagaattgcttgaacccgggaggcgggggttgcagtgagccgagatcatgccattgcactccagcccaggcaacagagcgagattctgtttcaaaaaaaaaaaaagaagaagaaagaaagaaatgtagtgctgctatttgtaaataattcattcatgttccaagaaataataacataagcccacaacattagatttctctctgagtagattcttggtggatcaggcagcataggtgtggtttgcctgaaggtggagttgtgcagatggcccccagggcccggatgagccctgcacttgcagcaggactgacttaggaacttcctggctgcaaggcttcccagtttttttaacttagaaccagcatttggttatgtggtagacttgaattgtataagcatttaatgtttgaaaactcaatcacatgtactcaccaaaaaaaaaaaaaaaaaaaggatggggagaaagaaagcaagaagagggctgggcacagtggctaatgcctataatcccagcactttgggaggccaaggagggcggatcacctgaggtcaggagttcaagaccaacctggccaacatggtgaaaccccgtctttactaaaaatacaaaaattacctgggtgtggtggcacatgcctgtaatcccagctacttggttgggaggctgaggcacgagaatcacttgaacttggtaggcagaggttgcagtgagctgagatccatgccattgcactccagcctgggtgacagagcaagactctgtctcaaaagaaaaaaaaaaaaaagaaagcaggaagagaagggcttgttccccttctccccaagcccctggctgcattgcagtctgtatgctaccagctgatgagagcctcttgccattccgtaaagcaagcatcgtcctaggctgcctggcagtggttggtgtgctcagccccgggggctcctacagggtgctgagtagacatcacccattcttttgcctgaaaaggcccctgaacactaactcagctgaagaagcaagttctgttccaaggcttggggactgaaggtttgtccagggcaacttttgttctttatgctttgggcctccccacctgccttttggacccaccagtcaccatctagctttttgagaacacccgcctctccacatcactgacagtgactgatagacaaggctgaggctgagagtggcctgaacattggtgctgactgacctgccgcctgccctggaaagcctttcatttgttcagagaccctactggtcctgagccattctccagcagctcctacccagactaactggaaaatgccgctagttccctctgagggtaaaaagtccagggcttggtgtgtattctccctgctcctgaatcttgagcactgtgggaggctgtgttcacctgcaccatttgggtgagaagcagaactgcttcccttgcacgtccccttcccagcccctccaggaaggctgctgcaccgtggtgggattcagagtgaatgggcatcatgccaggttctgcactgctggagccagccctgcctgggcctcctgcctccagcacagctcatgcctccctcctggctcgatccagtcctcccagcaccggctagctggccaaagtggtgcaggtctctaaggtgtgtatttgggcttcactgggaggtttctctcggggagaaacctggcttgagtgggattgagtctcaagagtgtgagggaaacaggaacaagtccatcctgagtccaagatggccttgggccatctggtgttcagcagatactcattgaggggttgggtgtgtgaacagagggatggcctggggatcctggtcgctgtggatgggcaggttttcactgacctcctgtgttccgcctgcaaaatcattagcaaatcaatgtcagtatccggctgaccccgaaatgaatcagacagcagtgggtgcaaggaggtcacaggcagaggtgtggggactcatggcagaggcaggacagagctgggccccaggcgggctctggactctgggcaagctgctgtcaccttgaaccgcaatttcctctcctttcttttttttccaggtggggtctcactctgtcatccaggctagagtgcagtggcacgatcttggctcactgcaacctctgccttcccaggcttaagcaatcctcgcacctcagcctcccaagtagctgggaccacagacatgtgccaccatgcccacctaatttttttgttttttgagacggagtttcgctctgtcgcccaggctggagtgcagtggcacgatctcggctcactgcagcctctgcctcccaggttcaagcaattctccctgtctcaacctcccgagtagctgagattacaggcacccaccaccacacctggctaattttttgtatttttagtagagacagggtttcaccatgttggccagtctggtcctgaactcctgacctcaggtggtccgcctgcctccgcctcccaaagtgctgggattacaggcgtgagccaccacgtacagtccctgctaacttttgtattttgggtagagatggggttttatcatgttggccaggctagtcttgaactcctgacctcaaatgatccacctgccttgtcctcccaacgtgctgggattacaagtgtgagccaccatgcccggccttggtttcctctcctttctaatgggagcagcaacccccaagcccaaccccctggaggatgcacggggcatcccgtctaaatgttggccatctccgggcggtgtggtcatcctaaggctgtgacacgtcttgcttgggggtgctctctagtctttgttagctgctggtggtggggcttttgcttgtgttgccccagtttgtgccacagggaggacaaatccagcatctcttgttaaagcaccacctcgcttagtccttatcctgccctgaactttagattttgtttatttgagttatctggttgatcttgaaatgtcagattaagactcctttcctgtttcctacacatcctgagagaatgcagcaagtccagggttggcagctttgtgttggggcaagggaggtgaacaggcaaccgggactcccaggctgttcctctgcacacgcacctatcccctcaacgagtatctgctgaacactggagggctcgaggccatcttggactcagggtggacttgttcctgtttccctctcgctctttttttttttttttttgagacagagtctcgctctgttgcccaggctggagtgcagtggcgcaatctcggctccctgcaagctctgcctcctgggttcacgtcattctcctgcctcagcctcccgagtagctgggactacaggctcccaacaccacgcctggctaattttttgtatttttagtagagatggggtttcaccgtgttagccaggatggtcttgatctcctgacctcgtgatctgctcgcctcagcctcccaaagtgctgggattacaggtgtgagctaccgcacccagcctccctgtcactcttaagttgagactcaatctcactgaagctgagtttctcccctagaaagaacagccacctccccagccttcactatgccagggtaggggcagtgagcatcaggccaggggcaccaggtgttcagttattaggctctctccaggtatggtctgtgtcctgcaggaaaagcaggtaggtcaagagacttctctttttgtttgtttgagacagagtcttactctgttgcctaggctggagtgcagtgacacaatcttggctgactgcgacctccgcctcctgggttcaagtgattctcctgcctcagcctcccgagtagctgggatgacaggcatccacagccatgcccggctaatgtttgtgtttttagtagagacggggtttcaccatgttggccaagctggtctcgagctcctgacctcaactgatgcacccgtcttggcctcccaaagtgctgggattacaggtgtgagccactgcgcctgacccaagagaccttttaataattacttatttaagtgaaaattttgaatgcaggtgtgctgtctgcccaggagcccgtgtatgactgtgcatggcggctgtcatcaggtggcatgcattgaatggggattattgactgtaaaggagagtcatcaagctgacatggctgctgcctgtgttacttatctggaattaattggggtgcttcatttattttttacaagtcagcagtgggccgggtgcagtggcttacacctgtaatcctagcactttgggaggactgcttgaggccaggaatttaaaaccaacctggccaacatagcaagaccccatctctaaaaatatttgttaaagtcaacagtagggggtgcacacagcaatgaatggaaacacagtgactgcatttgaggatgttgttcaatatcaaatttagcctcccccaattgtgctcttcttcctaacttcgctcctctgctcccactaaattccctttttttttttttttttttttgagatagtgtctcaccatgttgcccaggctggagtgcaatggtctgatttttgactcactgcaacctccgtctcctaggttcaagcgattctcctgcctcagtctcccaagtagctgggattacaggcctgtgccaccccgcccagctaatttttgtatgtttagtagagacggtgtttcactgtgttggccaggctggtctctaactcctgacctcaggtgatccacccgcctcagcctcccaaagtgctgggattataggtgtgagccactgagccctgctgctcccagtaaattctgctggaaagaccagagtgctcttttggccagtcgctcagcagtgtcctggccatctacccgaggatctccctgcttctggacctctgcttccctcccaccactgtcagggtggagccccctcgtcaccaagttgctgtactgcagtagctgcctcctggcaccaggtgtgcccacctcccaccacggctaccagagctgtcttcctcaaacccagctcagatggtgttgccctccacgttacatggctccacgctgccactagaatacagctccagtctttggtgtggcacccagggtctcgcagccagacccggcctgctgttccgaggcctcgtgcgttggggactccagccactcctggcctttgtgttggggccctggctaactttcatattttgggtagagatggggtttcaccatgttggccaggctggtcttgaactcctgcccttccctaatgtgtggtgcatgttcatgccacccatttgcttctcttcctggggcctagcattccttccgtgggctgctttccttcaactcttcttccttcaggactcagttgagatcgcacctccccaccagacattcttcattgactgtccccatcatagcactgtgcttctacctgtcatttcagagccaagcacggtggcgcacacctgttgtcctagctacttgggaggctgaggcaggaggattgcttgagcctgggaagctgagcctaatctaggcaacagagcaagctcctgtttcttaaaaaaaaaaaaaatacacacatatatatatatatatatatatatgtaattttagtttgactcacattatttttgttgaaagtttacacacggagtgtgtagggactttacaggcagagaccaattgcttggtgacagtacgtacccaacaggatttttgttttaatttgggatggggtctcactatgttgcctaggctggtctcaaactcctgggctccagtgatgctcccacatcagcctcccaaagtgcggggattacaactgcatgcagctgcaccagcaggatttaaaatgtcagggaaagtcagtactgtttgcagctccatttctgagtaactctgggatgtgagttttgatcctatatttggccatgttactggtagtcaaagataaaactgccttccatgcaagtacaggatgtcatcacacacagtagcctggtggatgatgtgactcccaccctcccaggaaaattctcatctcttgctctaagttgccatcagccttcccagggcatgaggcagaagatgttaggttataaaaacttgtcggccaggcatggtggctcacacctgtaatcccagcactttgagaggccaaggtgcgtagatcacgagatcaagactatcctggccaacatggtgaaaccccgtctctactaaaaatacaaaaattagctgggcatggtggcttgcctgtagtcccagttactctggaggctgaggcaagggaatcgcttgaacccgggaggtggaggttacaaagatcatgccattgtactccagcctgggaacagagcgagactccgtctcaaaaaagcaaaccaaaaaatcttgttagagatacatttacatgtgttctcccttcagccctggtgttttctttacaagtgtcttcctggttgtatgagtagcaagcagccttggacagcatgacctctgctccctcggggacagtgttgaccttgggcagcactaactcattgttaggtcaggaccatcatcagtcttctctaaaaggcaagcagaaattttaatttcagactgggtgtggtggctcacgcttgtaatcctagcactttgggaggttgaggcaggaggatcacttaaggccaggagtttgagaccagcctgaccaacatagcaaaaccctgtctctacttaaaatacaaaaattagctgggtgtggtggtgggcgctgtagtctcagctactcaggaggctgaggcacaagaatcgcttgaacccgagaggcagaggctccagtgagccaagattatgccactgctgagccaagatggtgccactgcactccagcctgggcgacagaatgagactctgtctcaaaaaatactactaataataatcaattaattaaaaaacaaggccaggtacagtggctcatgcctgtaatctcagcacgttgggaggccaaggcaggcagatcacctaaggtcgggagtttgagactagcctggccaacatggtgaagccccgtctctactaacaatacaaaaattagccaggtgtggtggcacatgtctgtaatcccagctacttgggagcctgaggcacaagaatcccttgaacctgggaggcagaggttgtagtgagccgagatcacgccactacactccagcctgggtgacagagcaagactctgtctcaaaaaaaaaaaattaaattttaatttcaaggatgaggatgactttagcgaagtatcaaataatgaacatgatttctacctttaatttttttttttttttgagacggagtctcgctctgtcgcccaggctggagtgcagtggcacgatctccgctcactgcaagctccacctcccagcttcacgccatcctcctgcctcagcctcctgagtagctgggactacaggcacccactgccatgcccagctaatttttttgtatttttagtagagatggggcttcaccgtgttagccaggatggtctcgatctcctgatcttgtgatccacccgcctcagcctcccaaagtgctgggattacaggtgtgagccactgcgcccagcctcaattttttttttttaaatacagcttccctcttctttctacccctatacaaattaccagagcaattactgctataggattaaattaaaggaattcttaaattaaatggttggctgctgaaccaagttgtagcagttgaatatggaattttgtagtgatttattataatcctagtttttggaagaaaatttgcatcacttagcagatatttaagatgcttgtaacatttcatttcccagtacacataaatatgcattatgtcaggcattggaatgtttagcaaactaatgaaatttgtaatttaatttatcaggtcacagcatttaatgaagaactattcagtgtcagtttatgccgttaggtaacaaacaggattgtgttacgcagtaatttatacagaaaagtattttataaataaaatgtcaaataaatgccactttttgttttaaaatgatatgtttaagaaataatcctaaagggaaaatgtctgctttgtcgaataaagtaattaaagcatttttttaaaacaagagaaaaaaataaggacaaagcagggacagacaggaaaatgtcagtgtgtttgcatcagccaggctgggctgtgcttcggtagcaagccccagatatcagcgacttcacacagtgaaccgtggcccccgctccacgaagctggccctgcatctgtcctcttctagggcagtggtcctccaggtggtggcttcctgatcctgcctgctttgctctgcggctccaccatctcggttccttctgctcagagcctgttgccagtactggtcgtgggtcctgcctaactctaagggaatgtgagggagccatggagtgcttggggagggctgtggtctctgccaccgcgttcaccacatcctgaccacttcttccatggaacaggttcacaaacctcattcatccaggcggcctgggtgacactctggggtaaaagtctgcaggaaagccctcagttcaactttgtcatctttcacctgtctcttcaattcggaataagctggtttatgcactggaagtacatcatctagtagtcttttatatgtgttctgaaaggttgttcactgtgtaatgtgaactccgtgttctgtgagcagtgttgttgctgccaactctgagatgctggcctggtgtgtttttgtcaccatgtgactctgttagcatgatcactgctgcctgtagtttctcttagaggcaggttgaagactctaatgtaaaattgtcttttaattagcatttgtttctcagctatttctagagttactgttgaaggtactttattttgactggtacagatctttgcatatgtaatgttagagttccagggaattctgtttaaactccccggtaaaacattctgtacaagatcaaggaaggagaaaatacagttaatttttggaatagagaaattgtcatctttagaaaatgcaaagaggaataatgataattttttgtgtagcagtgaatgaatagctttaagttgatgtcataactgaagacacatgagattttcacatggcagagtcatgcctctgtgttttgctacactccgtgggctgtcatctgataccagtgacaactgtgcaagggtggtacctcccgattctgcacccagtgtggggcgtcctccacctgcccctctccagcagcaccaccagctaatggagctgcacaccttttattccccggttgaaagtcaaaataacccatcaaaattaaaaacttctcatccaaaaacactattaagaaaatgaaaaagcaaaccacagactagatttacaatgcacgtatctgacaaaagactagtacctacaatgtgcagagaactcctctaactcagcagtcaggagaaagttcattttaaaatgagcaagacttgaacaggcacttcacaaaagaagatatacagatgtccataagcatattaaaagattcccagcatcattccttagcaggaaatacaaattaaagccacgacatgatacaacttcacctctcctagaatggctgccgtggaaaaggttcaggggtgcgggcagccagaacccgcagacacggctgtgggtgtggagcacaggatctccattggggaaactggcggtttctttaaaaatgaaacaggccgggcgcagtggctcacacctgtaatcccagcactttgggaggccgagacggatcacctgaggtcaggagttcaagaccagcttggccaacatggcaaaaccctgtctctactaaaaatacaaaaattagctggacgtggtggcaggtgcctgtaatcccagctacttgggaggctgaggcaggagaatggcgtgaacccgggaggcggagcttgcagtgagccgagatcccgccactgcactccagcctgggcgacagagcgagactccgtctcaaaaaaaaaaaaaaaaaaaaaaagaaaaaaacaaaaaaacaggaggcagaggttgcagtgagccaagatcacgccactgcactccagcctgggcaacagaacgagattctgtctcaaaaaaaataaaaaagcagtcagttcagcagttacctcagggtagagggcattggccagaagggagttgagggaactttttggggtgactaagttgtttaaaaccaattgggacaggcgtagtggctcacacctgtaatcccagcacttcgggaggctgaggtgggtggatcacttgaggtcaggagttcgagaccagcctggccgacatgattaaactccatctctactaaaaatacaaaaattagctgggcgtggtggcacgcgcctgtaatcccagctactcaggaggctgaggcacgagaatcacttgaacccaggaggcagaggttgcagtgagccaagattgcacccctgtacaccagcctggatgacagagcaagactccatctcaaaaacaaacagaacaaaaaacaaaaacaaacaattcaacttagccctgaagatctgtgcattgtgctgtaggtaaagtctcagaggtcagaggttgctgatgcagaggacccaggctgacccaggtccaaaccttagatcctcctttgcctcctggcctggccacctcctgccgtgtggccctcagcagatctctttctggctgagtcccgacggtctcatgggtgaagtgggatgatactaatcgtgtatcattgttgtgggtttgagatgagtatatgaagacctggctgacagcctgtccacagcagctgctcaggaactgttgactgctgttcttttagccagactattatcaaatgtaatttctatttttaaaaaactcttcccatttcctttcctcttgcaatcagtctcaatagcagtaagaaataaataaaaatgaagattctttgggagacttagttttgtttttttttgtttttttgagatggggcctcgctctgttgcccaggctggagtgcagtggcaccatcacaggtcactgcaacctcgacttcctgggcccaaccgatctcagcctcccgagtagctgggactacaggtgtgtgccaccacacccaactaatttctgtgtattttgtagagacaggatctcactatgctgcccaaactggtcttgaacttctgggctcaaccgatccacccgccatggcctctgaaagtgctaagattacaggtgtgtgccactgtgcccagtcagtttaattctaattaagatcaagattatctgtaaatacgagttccctctctccaaatctagaatttgctggcattagtcacatgtctgaggaagctgacgatgggacccacattgagatactaatcccagggctcggtggttcagggcactgtactgacagcatcttgactgctttgcctgttgcctggaaggggtgccgtgtggcgcctggcaggtggcagagtggccagaggccattattactctcttgagttacggtgttctcaagcccagctgagtccacacagccgatgtggatggactaggacagatccgatgacttagtgtccaagttcaattgcaaatgcagcctcatttctttctttgaagtagaaaatcaaagttcatagattagatgaaagaatagtcattgtacaaaagtaattatagtgtgtgtacttttctttatctacaggagctgtaaaattgacaagcttggcatgtggaaatcagcacatctgggcctgtgattccaggggtggagtttacttccgtgtagggactcagcctctcaatcccagtctcatgcttccagcctggataatgattgagccacctgtccaggtaagcagaagttagctggtggaactcactcttcagtaagacagaaactgtgaggatgctggtactgggaaaaaggatctgcacagcctctagaggcctcccagcaaatgcggggagccatgcccccagggtctacacactctcgttcatcaacatcacaactggaattcgggatttgtgaagtttagagctgaacagactgttacagattatgagtcaacacgtatattttctctttcaaaataataatatttcgtttttgactttttactaagtgaatattattttttaaatctgcctatatattggaacctctattttataataataatgataataaatcagtacccagaagtataaagaaggtaaaagttactttgaatcttgtcatggagaaaatgctgagtgcctctcctggtttgttgaagaaattccgtttcctgtccagcccactgctggccagctcctgccatgtttcagctgaccgtgcatcccaacacagagtctgtgttctcctgacctccagcactcagctcacaaggagaagtctgatttgaatgtactatctagttacccttaaagatcccacaggcttggttcctgtgctgaatagatttctgttgaagtttataactgggggctgtggttttttgagacttatttgcccagactcctgccagcccccatttggtgactctgttgggaaacaggtgaagttgccaattgtggaggcagcagtggggcaggggggatggttcgttgttgggcagagaaaccttcagtggagtcaggaaagaggtaaagagtagggtaaatgcctttgtgcataactgtctacattttggtcatggtgaggcctcagggatgaggacaccagtggtgtccaccagccctggggagtgtggtggtgggagaacctttactgaaatcagcattcggctccagagctctgtggaggccaccactagcggtcatggccacagggaggcttctcgtcctccttggtgggtcttcctcctccagagggtgatggggatgatattgtctatgacaacactttgtgaatgatacggcactgtcaaacatgaggttgtacataatgaattataacacatgctctgttttccctctgcacacggtgacgtactcatagtggcacagagggagagtccaccctgcagagaggagccttcctcactgccatgtttagcactgctggggcacagtgattatgaaaagcaagccgcctgtcgttagtttcattattgtccttaaattctctggttgcccgcacccaggtggactcctttgacacaccactgtcaatacgttcctttttttccttctaacaactttatatttttccttttaagttacaacccgcataacataaaatttcagccttctacagtgtgcagctcagtggctttagcatcagttagcagcagttagcaccatccaattccagagggttcccatcactccaaaacagagagaacacccttacccattagcagtcacttcctgttctcacagaaccagcccctccgcccatggcagccactcatctgctttctgtttctatggctttgcctattctggacattttatataaattggatcatataatatgtggccttttttatctgacatctttcactttgtatcatgtttcggagttcatccacgttgtaggtgtatcagttcttaattcctttttatgactacatcacagctctgttgtatggataggccacattggtttatcatttcaccagtggatggacatttggattgtttctgcttattggctactgtgaataatgctgctgtcaacatatgtgtgcaagtctttagggaggatgtatgttcccagttctattgggtatctgtctgtaagtggaattgcaggtcatgtggcgattctgtgttgaactttttaaggatgtcaaagtgtttttcacagtggctgcaccatttgtgttccaccagcaagatatgagagttctagtttttcccatcctcaccaattttttttttttttttttttttgagccagagtttcgctcttattgcctagtctggagtgcaatggcgccatcttggctcactacaacctccgcctaccgggttcaagcaattatcctgcctcagcctcctgagtagctgagattacaggcatgcaccaccatgcccaggtgatttttgtatttttaggagagacggggtttcaccatattggtcaggctggtctcgaactcctgacctcaggtaatccaccctcccccggcctcccaaagtgctgggattacaggcatgagccactgcgcctggcctttccaattttttgttgttattttatttttctggtctcagaaactgcctcatatgtctaattttttaatactagtcatcatagtagttggaaagtggtatctcattgtgggtttgatttgcattgacctaacaactaatgatattgaacatccctcttttcatgtgtttattggttatttgtgtatcttctttcaagaactgtgtgttccttttttcttttttttttttatgatggagtctcactctgttgcccaggctggagtgcagtggcgcaatctctgctcactgcaatctctgcctcctgggttcaagcgattctcttgcctcagcctgctgagtagctgggattacagacatgtgcctccacgcctggctatttttttttttccatatttttttagtagaggcagggtttcaccatgttggccaggctggtctcaaactcctggcctcaggtgatccgcccacctcggcctcccaaagtgcttggattacaggcgtgtgccaccacgcccagcctcaaatcttttgctcatttttaaattgtgttatcttttactgagtttgtttgtttgttttgagatggagtcttgctctgtcgcccaggctggagtgcagtggcatgatctcagctcactgcaacttctgcctcctggattcaagtgattctactgcctcagtctcctgagtagctaggattacaggcatgcaccgccatgcctggctaatttttgtatttttagtagagatgggggtttcaccatgttggccaggctggtcttgaactcctgaccttgtgatccgcctacctgggtctcccaaagtgctgagattacaggtgtgagccaccgtgcccagcctgttgagttttatatatgagttctttatgtattctgggtactagacctttatcagacacatgatttacaagtattttcttccattctgtgcattgtcttttacttttttatgatgttctttgatgcacaaatatttttattttgatgaagtccagtttattaattttttcttcatttgcttctgcttttagttgcctaatccaaggtcacaaagatttacctctatgttttcttctagcagttttgtagttttagctcttacattaagtgcttcatccattttgagttgatttttgaatatggtatgagataggtgtccaaatgcattcttttacatgtgggtatcgaattgtaccagcaccatttattgaaaagactattctgtccacattaaattatttcaacacccttgtcaaaatcaattgattgtaaatataaaggtttgctactggactcttagttatatcccagtgatctgtgtatctatccttaaactacactgtcctgattacttagctttgtcgtaaattttgaaatcaggaagtatgaatcctctaactttttctttttcaagattttttcagctacatggagcccctcctacatccatgtgaattttgggataagtatgtcaatttctgcaaaaaaaaatactaactggaattttgaaaggaattgtgtcgaatcagtagataaatttggaaaatcttccagtctgtgaacatgggatgtcttcccatttatttagatcttctttactttccttcaccaatgttttgtagttttcagagtatatgttttatactgcttttgttaggtttatttctaagttctgtattccctttgatactattgtaaatggagctgttttcttcattttcagattgcccattgctagtatagatttttgtatattgatcttgtgtctggcaaccttgctaaacttgtttattgggtctaacaggtttttgtagattcttttgcattttctatagatgagatcatggcttctgacatggtctgccaatagagataattttacttcttcctttctatctgtatgtcttttattttactgtcttgcctgattgccctggctggaacttctagtaaaatgttgagtagaagtggcgagaatgggcctcctagtcttgtttctgatcttaaggggaaggcattcagtcttttaccattaaatatgatgtgagctttgtgttttcttaggctccctttattaggttgaacttcccttctactcctagaaggaattctaggagttctttctgttcctagtttgttcagtgtttgttatgatgaaagggtgttgggttttgtcaaatgctttttctatgcctattgagatggtcatctggtttttttcctttattaatatgatatattatactgatggagttttatatgttgaaacacagtttcattcctgggttaaatcccagttggtcatgatgtgaaatcctttgtatgtatatgttgctggatttggtttgctaaagttttgttgaggatttttgtgtctatattcatgagagatattggtctttggttttcttgccatgtgtttgtctggatttggtatcaaggtaatgctgctggcctcatagaatgcactgggaagtgttttcttcttttctactttttggaagagtttttgaaagattggttttattttttacaccccatttgttagaattcgtcatcccatccatgaattcatgtagccatgtaggcctgaactttttttgtgggaagtttttttgactactggttcaatctctttattcattataggtctattcagaattttttttttttttttctgacatggagtctcgctctgtcacccaggctagaggatgttggcgcgatctcggcccactgcaacctccgtctcctgggttcttgcaattctcctgccttggcctccctagtagctgggactacaggcatgtaccaccacacgcagctaatttttctatttttagtagagacgaggtttcaccatgttggccaggcttgtcttgaactcctgacctcaaatgatccaccctccacagcctcccaaagtgctaggattacaggcatgagccactgcacccagcctattcagaattttctatttcttcttcttcttctttttttttttttttttgagatggagttttgctcttgttgcccagactggagggcaatggcacaatctcagctcactgaaacctccacctcccaggttcaagcaattctcctgcctcagcctcccaagtaactggggttacaggcgtgcaccaccatgcccggctaattttgtttcttgtgttttttttttttttttgagacggagtctcgctctgtcgcccaggctggagtgcagtggcacgatctcagctcactgcagcctccgcctcctgggttcaagcagttctcctgcctcagcctcacgagtagctgggattacaggcatgcaccgccacacccagctaatttttgtatttttagtagagatggggtttcactatgttgaataggatggttttgatctcctgacctcatgatccacctgcctcggcctcccaaagtgctgggattacagacgtgagtcactgtgcccagcctaattttatatttttagtagagatagggtttcactatgttggccaggctggtctcgaactcctgacctcaagtgatcttcccacctcggcctcccaaagtgctgggattacaggtgtgagccactgcaccctgcctctctttcttcttgagtcaatctaagtagtttattctttctaggaatttgttcatttcatctattttatctaatttgttggcatccaattgttcacagtattcttctgtaatactttttatttctgtgaaattggtagtaatgtctcctctttctgattttataatttgaattggctgggcacagtggctcatgtctgtaatcccactttggaaggttgaggcaggaagaccacttgagcctaggagttcaagaccagcctgggcaacatagcaagacatcatctctaccaaaaaaaaaaaaattacctggacctgatagtgcacctgtagtcccagctactcagaagactcaggtaggagaattgcttgagcccaggagttcaaggctgtagtgagctatgattgccagttttattgccaattgccactatactccagcctgggcaacagagcacaacgctaataataataataataataatttgaatcttctctcattttttcttagtctagctaaaggtttgtcaattttgttgctcttttcaaaacacctccttttggttttcttgctttttctgtgttgtttttctatcctctatttcttctatttccactctgttacttcctccacacattcttgtgcacagtgctttgcttgatagtgatattcctctggtagctccaaggaatatttgtcacaattatcacgtacatgtggaagacctgtggtaacattggactgtaaagtttgtaggatcccagtgcagaggcaggctgctgagtgcaagagcgagatttgcaggatgtgttgtagaaagaacgtccttgagtgggttgagcgcccatgtgccttgcctcctccttttcccagcaagccagaggccaggatgctggagagtagggcaagcaggaagctgccgatctcagtcctcagtggggctggagccacccttgcctctgctgtgtgcacctctctgcagccatggggccacacaggtacctggcaaaagggttacatggagaacggtgtgcaaccacaatttcctgttcctgtctccatgtagactctagaataacctctaggaagcaaagctaaaatggggaagagagctttgcttaaagtgctctattgactgtggtgatcaacagctttgccaggaaaatggccaaaatagaacaaattcacatgaaaggacctcaaagctctgctctgaataaagtagtgattgctaaatgggatgttaagcatgaactatttcaagtagttctgctgaatagagccacattttctcattgagttagcttttagcatgctatggaagacattcagtttgccatggattctgtagatacaaaatgcttttcaagttggtttctgtgggaaagaaatcaggcttcacatgtacacaggcctttctactgcactttgccaagcactgccttatccttaacccttttattgccccaggaaatagaaaagtccgtagttccccctactttacgaggaaatctgttacccagaacagttgagcaatttgcccaggatcccaactctggtgtgtgccaagcccaggcagggacccaggcccccagctcccaggtgctgcccctgccgaggctcccctgggctgaggaaggcgcttctcccgggctgctggcactgacgattgtttgctgagatcagaagtgaagacaagctctgctgccaggcgctcgccttgtgccaggctaatgcctgaagcacatctttccctcagtcctcacaacaacctgggaagtgactgcgtctttccccatttgacagaggagaaaaccctagctcagaggttcagaaagttgcctgaggcctcatagcgggcaggcggcaggggtgggacatagacccaggtgtgtgacacccgcctctgcctctcctgtggctctgaggtccaaggcctgggccaggaccaactgcaggatggcagcaagcaccaggttgtggcgacatgtcataggcttagtggcctcacacgtcgtattttaggacaaagcctacacatgcgaatctttaaatcgcagagggtcctgcaaatgagcccaggagtgaggggagatgggggttcactctgaggactggaacgtcagaagagttggttgaatctgaggattggagaacaagcggggtttatgtattttgattatgttctacatctttccactttgttttatttgttcttcgacttgagcttcttcatctgcgtagaggatgtatttgcagtggaaaaggaaatggaggcaggggatagatgctcaagggcacatgaagtgaagccacagaaatcttttaaaattagcatcagcttctctatttagttctgttgtcctattctcttctctgggaagatacccctcctgtagtagttttgcggtaaagttttaacaaagtactcaaaacaaatgactcagttttcagatttgctaacacttgcaagggtttggagaaaatatttatagttgtgtttagcatcttcatagtctggagtttgctgtttgagttagagaattttctgtctgtgttagaggtacctctaacgcaagcatagttggtgtgaagtttcacattctgtgtgccccatgtgcttgagtagaagaggtgtctgttcttactgtgcttacagtggactctgaaatggtgtctatggtgtggttccagttttgtaaaacaaaactataaaatcccactaggctgggtgcagtggctcatgcctataatcccagcactttgggaggccaaagtgggaggatcacttgaacccaggagttcaaaatcagcctaggcagcgtagtgagaccccgtctctacaggtaattttttaaattagccaggtgtgttggcgtgcacctgtggtcccagctactccagctactcaggaggctgaggtgggaggatcacttgagcccaggaggtcaaggctgcagtgagccatgtttgtaccactgcactccagactgggcaacagagcaagaccctgtcttaatcaattaataaaaataaaaaataatttctcactgaaaacctagaagaaactacaacaaaggtgactgttatggggccgggcacggtggctcatgcctgtaatgccagcactttgggaggcccatgtgggcagatcacctgaggtcgggagttcaagaccagcctgaccaatatggagaaaccccgtctctactaaaaatacaaaattagctgggtgtggtggtgcatgcctgtaatcccagctactcaggaggctgaggcaggagaattgcttaaacccgggaggcggaggttgtgatgagccgagatcgcgccattgcactctagcctggacaacaagagcgaaactccatctcaaaaaaaagactattttgatccagggattataagtgattaaaatttaccatgttttcccataatgggtaggaaaactttttcatgatcagggagaaaaataggtatattttacaagggacccatcttttgtgggtcagtgagcaacctttcttctccgaggcacgtctctgacctacccagcccatataaatctgaaccccagtaggttgtccccccttccccctgccccacacaaagattttagagctagaaggagactggaaaacacataaccttgccacttccttctgcagatgaggaaagcaaggcctggcaaaagcaaggttcctggtctcagggtagtcagtggttgtgccgggcctcctcagcccctcatcctcaaggcccacaacagagcagcggcaagaacagtcccatccagggacactcacaggctaccgtagagacacacgcaaaccactggcgcctgtgcttccagagctgtgggcagagtgccatggagccagctggagagggaagtgctgtcagggccttggagtggtcagaggatctcacaagaggtggcactggtacaagaaaggcaagtaggagtgtagcaggcaggcaggacagagggtgttctaagcagaggggacatgaagtataggcactgagcagaaggcacccttgcccagggtgcagaaaggggctgtattgggagactggcacaggccggggcagggagggctgggctaaggcattggcatcattcttgaagagtttgaagccaggcaggtggcctggtcagaccatgtttgaggaaggagcctgtgtcacaattccctgtgaccagtcagagggtcttctgctggacagatcacatgcacccataagtaggtcagatgcccaggagtgttttgcctcagatatggagcaaaattagcctgacagtaaatgcagctctggtcctacctactggagcttaaagcaagactccgaagaatcaaactgtttcagagtaacttaccagcatcttagaacaaagctcaagaatatttacagattgcaaaaatatccaacatcagcaagataaaattcacatgggcaaccaattaacatttacccaacaagcagagaagcaggaaaatacgacctgcaatgaaaggggaagaaatccgtcaataggagctgacccagaaatgatacagatggtaaaattcatagacaggacattaaaacagttgttacacctttatgtgttcaagaagctagtagagagattcagcctgttaagtagaaaatgagagatagaaaaactccaggctaggccaggcatgcaacggctcacacctgtaatcccagcacattgggaggctgaggtgggcagaccacctgaggtcaggagttgcctggccaacatggcaaaacctcatctctactaaaaatacaaaaattagccaagcgtggtggcacacacctgtaatcgtagctactcaggaggctgaggcaggagaatcacttgaacctgggaggtggaggttgcagtgagcaaagattgcaccactgcactccagcctgggcaacagagcgagactctgtctcaaaaaaaaaaaaaaaaaaaaaaaaacaatatcaaaaaactccaggctgggtgtggtggctcgtgcctgcaatcccagaactttgggacgctgagctgggagaattgcttaagctcgggagttcaagatgagcctgggcaagatggcaagaccctgcctctaaaaaaaaaaaaaaacaacaaaacaaaaaacaacaactcaaatcaaatttgtagggattaaaattgcaatgtctgagctgaaaaatatcactggatgagattaatggcagcatagaaattgcagaagaaaagactagtgagcttgaagacacagcagtgaaaaaccatccacactgaagcccagagggaaaacaggctggaaaatgttcagagaatcagtgagcacagaccccttcaagtggcctcacgtaaatgaaatccaagtcttaagagggaagaagggtgacaggaaaaaaagatgtgaagaagaaatacaactgaaagttgtccaaatttgatgaaataattatgctgagtcaagaagccaaagaatacatactgttatcatttcatttatataaaatttggccaggtacagtggctcatgcctgtaatcccaacactttgggaggctgaggcgagcagattgcctgagcccaggagttcaagaccagcctaagcaacatggcaaaaccccgtctgtacaaaaaatacaaaaattagctgggtgcctgtagtcccagctgctcaagaagctgaggtgggaggatcccttgagcccaggaggcagaggctgcagtgagccatgatggctgccacctcactccagcctgggtgatagagcatgaccctgtctcaaaaacaaacttatttatataaaatactagaaaatgctaacacaggccaggtgctgtggctcatgcctgtaatcccagcactttgggaggccagggcgggtggatgacctgaggtcagtagttcaagaccagcctggccaacgtggtgaaaccccgtctctattaaaactacaaaagtcagctgagtgtggtggtgcacacctgtaatcccagctacttgggaagctgaagcaggagaattgcttgaacctgagaggcagaggttgtggtgaaccgtgatgacgccattgcactccagcctgggcaacagagcgagactccgtctcaaaaaaaaaaaaaaggaaagaaaatgctaacacagatcagtgcttactcaaggcctggcagaaatttcaaaggggaggtgtggcagtggcttcaagagtgtatgcatatgtcaaagcttacccaattatgtactttaaatgtgtgcatttcattgtatgtcagcatacccctgtagagctggtttttttttttttttttgagacagaatcttgctctgtagcccagactggggtacagtggtgcgatctcggctcactgcaagctccgcctcctgggttcataccattctcctgcctcagcctcccaagtagctgggactacaggcgcccgccaccatgcccggcaaattttttttttttttttgtattttatgttgatacagggttttaccacgttagccaggacatacaaaaaattagccaggcgtggtggcgggcgcctgtagtcccagctactcaggaggccgaggcaggagaatggtgtgaacccaggaggcggaacttgcagtgagccgagatcgcaccactgcactccagcctgggtgacagagcgagactccgtctcaaaaaaaaaaaaaaaaaaaaaaagagttagccaggacggtctagatctcctggcctcgtgatctgcccacctcccaaagtgctgggattacaggcgtgagccaccgcacccggcctgtttttgttttttagagacagagtctcactccattgcccatgctggagtgcagtggagtgattgtggctcactgtaacctcaaactcctgggtcaagccatcctcccacctcagcctcccaactagctaggacactacaggcatgcaccaccgcacctagctaatttttaaaaaaatttgtagaggcatagtcttgctatgttgcccaggctggtcttggactcctggcctcaagcaagcctcccaccttagcctcccaaagtactgggattacagatgtgagccaccatgtctggcctctgtagagttgttttaaatattaaagtgtacaaaaaaaaaatttaaatgggccgggtgtggtggctcatgcctataatcccagcactttgggaggtcgaggcgggtagattgcttgagctcaggagttcaagaccagcctgggtattattgtgaaatcccatctctatgaaaaatacaaaagttagccaggtgtggtggcatgtgcctgtagttccagctactggggaggttgaggctgcagtgagctgtgatcatgtcagtgcgctccagcctgggtgacagaatgagaccctgtctcaaaaaaaaaaaaaagttttaaatgaagattatagggtaccctacattgtgtttggtttgcagagggaacagaaatgagtgaagctgcctaagcatggtggctcacacctgtaatcccagcactatgggaggccgaggcaggtggatcacctgagctcaggagttcaggaccagcctgagaaacatggtaaaaccccatctctaccaaaaatacaaaaaattagctgggcatggtggcacatgcctgtaatttcagctactcgggaggctgagatgggaggattgcttgagcccaggaggcggaggttgcagtgggctgagatcatgccactgcactccagcctgggcgaaagagtaaggccctgtctcaaaaaaaaaaaaaaaaaggaaaaaaaaaaggaaatgattgaagctgtttttggagttaactgaccaaaagttaaatgactaaaagaagagcgaggcaggaggttatagaagcaatcatgaaaaaaatacagatccccagggtcccaaacctggtttccgaggatgggtagtgtttgaacttggacttgagactcaatgggcattttcagtgaccagcaggtaaagaggcttggcctagtgtttctgagtagggaagagtgctcctccctgctgccttgggaggactgtctgctgctggaccaccctgaggactgtgagacattagctctgtgggcttctaggctcctggcagtgaacctctgggagtgaaggatgcacaaaggatgttgtgggaaagagaagatctgagatgtcctttgggtcatctttggaggatcttgactctgaggctggagggtttgtggctaattccatgggcagtgggggctgttggaggctcttgagcagggccggacaggacccaaatggagaaggtctgcagtgagctgtggaaattctttggcctgattcgctggatttgtggtgcacatctgtgagatgtgagattgggatggagtggacatggggactctgacatggattgttttggggcagaagaagccaatccatgctggcgtcccagcctgggtctgtaatctcattaatctccttttggtgactggaccagttgcctgtacaagtgcctcttggtctccttgatccaacctcactgagccagcgtcgcttgtatgcatgatactgcaagacttccttcccagctggcctgcacgcaggtgccttggagaggcattgggcagatggcatgtggccatttccagcagtggggcgcagtgctcagggagactgcagcatcctggagccctgccagccaggagggactgttcccattgcgggcagaatctgttacttgcaatcagaagaacttcaactaatacttgttttttgcctgtagattcaattgaccttgggaatgttgcttaaactcgcctttcactttcattttcctatcagtaaagtgaagggtcatatccacattagagccatcagaggagcttattaaaaatgtccaggcctcggccctccctggagatatgaattcagcaggtctggggtgaggcccaggcatcttggttggtttttttttttttttttttattgatttatttgagacggagtcttgctctgtcgcccaggctggagtgcagtggcatgatctcggctcactgcaagctccacctcccgggttcacgccattctcctgcctcagcctcccgagtagctgggactacaggcgcccaccaccacacctggctaatgttttgtgtttttagtagagatgggttttcactgtgttagccaggatggtctcgatctcctgaccttgtgatccgcctgccttggcctcccaaagtgctgggattacaggcgtgagccaccatgcccggcctattttttatttttgagacagagtctcagtctgtcattcaagctgaagtgcagtggtgcgatcatagctcactataaccacaaacccctgggctcaaacaatactcctgcctcagcctccaaaatggctaggggtatgcaccatcacacctggctcattttttaatttttattttgtagagatgaggtcttgctgtgttgtccaggctggtgtcaaactactggtctcaagtgatcctcccacccctcagcctcccaaagtgctgggattgcgggcgtgtgccactgtgcctggccagttttgttttttggttttgggtttttttttttttttttttttttgagatggagtcttgctctgtcgcccactggagttcagtggggtgatcttggctcactgcaacctccgcctcttgggttcaagtgattctcctgcctcagcctcctgagtagctgggagtacaggcacccgccaccacgcctggctaattttttttttttttttttgagacagggtctcactctgtcacccaggcgcgtagtgcagtggcacaatctcagctcactacaacctctgcctcctgggttcaagtggtcctcccacctcagcctcttgagtagctggggctacaggtgagtgccactatgtatttgtatttttagtagagacggggtttctccatgttggccaggctggtctcaaactcctgatctcaggtgatctgcccgcctcggcctcccaaagtgctgggattgcatgcgtgagccactgtgcccagccacacccagctaatttttgtatttttagtagagatggggtttcactgtgttggccaggctggtctggaactcctgacctcaagtgatccacctgtcttggcctcccaaagtgttgggattacagataggagccaccacaccgagcctggtttttatttttcatgaaagtcatacatgaaatgccaagtgtggtggtatgtgcctctagtcccacctactcaggaggctgggtgggaggatcactggagaccaggatcatccaccgcactccagcctgggcaacagagtgagcctccatctgtaaaagaaagaaaacagagtcacatgtgaaaatcagtaggttgacatgtcagtgggttctataagatgtgctataagaaacatgtctctcctgccaattttgccctctctggagagttcctttcagttcttttcgctgcctgtctctgaatgctgcttcgggagctgtgtttggtcccctgacttcaggtgtttctggttgactctctgcgggaagagaagcatgcagagctcttgcatcccccgtcccccattcccccagccacccacctcccttcctacttccaccctgccagagctgcagtgcttcctgggcacgggccttgctgtgaggacagaggagctcttcacagcggaggcaggggatgaatcacacctgcagttccttgtctgtgtgactctttgttttccctggacttgataatcatcttgtttgctcatctagttttttttctttttttttttgagacagagccttgctctgttgcccaggctggcgtgcaatggtgcgatcaatctctgctcactgcaacctccaactcctgggtccaagtgattcttctgcctcagcctcccgagtagctgggcttaacaggcgtgtgccaccacacccagctaattttttgtatttttaatagagacagggtttcaccacattggccagcctggtctcaaactcctgacctcaggtgagccacctgccttggcctcccaaagtgctgggattacaggcatgagccactacacccagcctgctcatctagttttctaagtgcagttccacacattcaatcccaaactctctgccagttgtctcacacattaggaatgtgtcctctccatttcttccccctgcagagatctctcctgcaccctcttggccagctccagtctggcctcgttcctctctctacccgggacccagctgttgtcctagcgtcacctttgacctcccctcatgttagagcccctttctcccggatcccgggtcttcctctctctgtgtctgtgtttgtttgggtggagtttatcttccagtcggttcccaaggaagggttcatggttggtgactttttggaggtattgcatgtctgaaaagtctttcatctgtgttcacccttgaccttgctggatatagcagtctaggttggaaaccattttcctttaggattttgagggtctttctccattgtctctcggcttccaggattgctactgagaagccagaagcctttctttttttttttttttttttttttgagacggagtctcgctctgtcgcccaggctggagtgcagtggcatgatctcggctcactgcaagctctgcctcccaggttcacgccattctcctgcctcagcctcccgagtagctgggactacaggcgcccgctaccacgcctggctaattttttttttttttgtatttttagtagagatggggtttcaccgtgttagccaggatggtctcgatctcctgaccttatgatctgcccgtctcggcctctcaaagtgctggaattacaggcgtgagccacctcgcccggcccagaagccgttctaacacctgatccttgatacttgacctgtttttctttctgaaagtttgtaaggtctctttgttcctagtgttataagaacagatacatagtggtatgccttggtgagggctgtgttcatccttgcagccaggtggttgcagcctatgtgctggtgggtgtctgggtcctctgctggggtcctcttctgccccgcctctcttgttttcctttttttgttgttatgtttttgtgtgttgttgttgttgttgtagggttttttgttgttgtggggttttgttttgttttgttttgtttttgagacggtctctcactctgtcacccaggctggagcacaatggcgcaatcacagctcattgtagctttaaacttctgggctcaagcaatcctcccaccacagcctcccaagtagctgggaccacaggcatatgcaccatgttcagctaatttttttattattttttgtagagatggagtctcactatattgcccaggctgcttttgaactcctgggctccagcaatcctgccaccttggcctcccaaagtgctggattccaggcatgagcaactgcacctggcacccctcctgttttctgtctgctctggctgaaggcctccttttccttttctttttttttttttttttttttgagttggtgtttttgcccttgttgcccaggctggagtgcagtggcgcaatctgggctcactacagcctctgccccccgggttcaagcgattctcctgcctcagcctcccacgtagctgggattataggcacctgccaccatgcctggctgattcttatattttcagtagagacaaggtttcaccatgtttgccaggctggtttcgaactcctgacctcaggtgatccacctgccttggcctcccaaagtgctgggattacaggcattagctactgtgcccagcctggaggcttccttttgtattgtggactttctaagctggcctccacttttcctttctctcctgtttctgtctttttatgcttttatcctgctttctagaagacattctcaaccttatttctccaaccctctgtcagattatttccatgatcacatgtttaatttctgaaagttcctgttgttgtttgatggctgtagagtcagtcttctctcatctccctaaggatgttttggaagtttcttctccctgcctggtctttgtatgtcccaagttgtgtgttttctgtctagttcgccttttacatggcagaggctttcttcagatgttggcagtcccctggttggaagagtgaggcccagcaaggctgactggaagccctgagcacatgcatggagcctgtgggccccgcgggtctctgacagcaatctggctgggctgctgggtggggagtcgttgcttttagccttccagggcccgctgagtccttgccatgcatcccccactttccagcttccagaattgtatggctgcttcctcccctcattctctctgtccttaggagatttgaaccttttttctttgagatggagtcttgctttgtcacccaggctggagtgcagtggcccgatctcagctcactgcagcctccccctcctgtgttcaagcaattctctgcctcagcctcccgagtagctgggattacaggcgcatgccaccatgcctggctaatttttgtatttttggtagagacagggtttcgccatgttagtcaggctggtctcgaactcctggcctcaggtgatccggtctgcctcggcttcccaaagtgctgggattacaggcgcgagccactgcgcccgccccgtttttctttgtttaacccattccctctcatggtagtggtgcttgagaagggagtgaaagagtaattgtgtgctcattatcatcactgcccagaagcttctggcttcttcagcgccctgcaggtgactcttgcacatacccagcgctgagcaccatggtgcagctcatccccttcacctccacggttctggtatcacagtcttcagagtatagccactattttcctctaagcctctgaacatctttgagtggtatttaggtgctggtggggctgcctgttacactgtaagttgttccgtcagcacaactatgctgcctgcaaatgaaggtatgaaacctccccaaactgctgtctaatggtgtgggatggaaccagctccctttgagagaaactaaattgttttttgccacttcctttaattttttccatgttgcctttttttcctatacctccatttaaacatctattgtttttgagctctcttcttcaaaacttgcttctaggaactattacccctcttcaccatattgaactctaagtcttttctctcattctggaaggccatgatacctagaagtagaccacagggttctaacggggtgccctgggtcctgcagcagtcccctcatcgtgctttaacaacttatgacccagtagtttaaacaacgacctagggaagcttgtcccagcctgccctgcgtgtgcccccagtaaaaccatgagcggcaggaaggggagcccctcgcgatgcttgccatgaccctagaggagcagagcccagagatcatctttagggacctctccctctgggctgcactcatccagaaggtgcttccccgagcctgtctgtagagtcagccacagagcagggcgatgagctatcagagaccagggtgtgtgccactgggtccagcttctgctcttcttgtctcacagcaatatttgagtcctggtgctagccatggcgcagtcgttgggctggtatcagtgacaaggtctggagggtagacaggaagagtggccagttggctccaccagcccctgctcaggaaggacagaatgtgacaggcacccaggaaacctgcttctgagcgttttctttagcgcaccccctacaattagcagatgcagcttcttgctggattctgaggtcacacctcagaccagatgtagaggcccagcagtaactggagtcagtgcagaaggacccaccacggagagggagaggcctctgacaggccagaagagagcagcagtggagcctgtttctgtctggagccctgctctgctgggccagaagtttccaaatgttttttagcagtgggacccattcttcaaattaaaaaaaaatttttttgagttaggctcttgttccgtcacccacgctggagtgcagtgacacaatctcagttcactgtaacctcaacctcctgggctcaagtgatcctcttacctcatcctcctgagtacctgggactacaggtgtgtgtacaaaatacaaaaaacactcccagctgtccagccttaaataaaatcttgtacataagccagatgtgttcaacaagtaacagcaaaactggtcccatgaaactgccccttccacaggggccctgaggcacctctgcaaggccagggccccacaggcgctgctggaaaactgctggtcttcgggccagtgaggacagagagagagctcagcacagcaggccccgggcagccatacccacctcgtaccacggtcagagtctcgaggagcctcagagatcatggtccccggctcctccagctaaggacacagaccacgaagaggaggtcctcctagtgtgtcagccctggctctgagaatttacctttaatttaattctagacctattaacatgggtatcgggtttttaagcccatctgaaattgggaagaatagaccagaagcaggaagagggtctgctacagggaaaaaagaactagaaagaccaaacagaagtcagaaagtacagctaccacggggccatgtgacaaatggcccaaccaacccacacgcctcagcgccccctgaggctgcacggatagacggacagacacacagcagcaccatgaatccttgagggaaagtaaagctcagcatgtgtcagtctttacggggattcaaggttaaaacagggagggagagagacttggagggaaaagaaaaggcagtgtggaaagcacaaatggccgcctggataaccgtggtttgtttgggttaggattatttccagaggcgtctttcctggggcatttgtgctgccgcttcaaaaaccctcggtccaccctggtattcctgaaacattcctgctgaatttcttccaagttctgataagtccatgccaaaatggtctgtctagatacatgtttcctttggctgtgaaatcttcagcatgtttttgtttttcagcctgggtttaccacattctgactgaggaacatgtgtgagtgtgtgtgtgcgtgcgcacacgtgtgttgataaaagctatgataaaagctcagctacaagaagtttgaagaactgtggtctgagccccagacacttgtgttttctttttcttttcttttctttttttttgagatggagtctcgctctctcccccaagctggagtgcagtggcgcaatctgggctcactgcaagctccgcctcccaggttcacaccattctcctgcctcagactcccgagtagctgggactacaggcgcccgccaccacgcctggctaattttttgtatttttagtagagacggggtttcactgtgttagccaggatggtctcaatctcctgacctcgtgatccgcccacctcggcctcccaaactgctgggattacaggcgtgagccaccacgcccggcctgtttgttttttttttttgatacggagtttcactcttgttgccgaggctggagtgcaatggcgcgatctcggctcaccacaacctctgcctcccgggttcaagcgattctcctgcctcagcctcctgagtagctgggattacaggcatgagccaccacacctggctaattttgtatattttttagtagagatggggtttctccatattggtcaggcttgtcttgaactccggacctcaggtgatacgcctgcctcagcctcccaaagggctgggattacaggcgtgagccaccacgcccagcctcttttgcatttttatgaagtttttaatatgaataagccaaaattttagatcacctactactttttttttgtttttttagtagagattaggtctcgagctactgggctcaggcaattctcctgcctcagtgtctcatagagctgggattataggtgtaagccactgtgctcggccttttttttttttttaattgaatttttttttatttttttgatacgtagtttcactctttttgcccaggctggagtgcaatggcgcaatcttgactcaccgcaacctctgcctcctgggttcaagcaattcttctgcctcagcctcctgagtaggtgggattacaggcgccccccaccacgtccggctaattttgtactttttttttagtagagacgaggtctctccatattggtcaggctggtctcaaactcccgacctcaggtggtccgcctgcctcagcctcccgaagtgctgggattacaggcatgagccactgcacccggcctaattgaaatttttattgagataatggtcactgcacttgtatttataagaaatcctgagtaccctttacccagttcacagcaatggtaactgcaaaactatagtacactgtcacaaccaaggcttgtctacttttttttttttctaaattgtgataaaatacacatgagatttaccgttagtgacagtacatttgcaatgttgtgcaaccattgtcactatatagttccagaacattcttttttttttcttttttgagatggagttttgctcttgttgtccaggctggaatgcagtggcacaatctgggctcactgcaacctctgcctccccaggttcaagtgattctcctgcctcagcctcccgagacactaggactacaggcatgcgccaccatgcctggctaattttgtatttttagtacagatggagtttcaccatgttggccaggctggtctcaaactcctaacctcaagtgatctgcccacctcggcctcccaaagtgctgggattacaggcatgagccactgtgcccaacctagttccagaacattcttatccctcaagaaagcccctagcaatgtgaagccactccccattcctcctccctcctctctcccagcctgtagcagctgctcacctgatttctacctgggattttcctcttctggatgtttcatagaaatggaatcctggctgggcgcggtggctcacacctgtaatcccagtactttgggaggctgaggtgggtgggtcacaaggtcaggagttcaaaaccagcctggccaaaatggtgaaaccctgtctctatcccagtactttgggaggctaaggtgggtggatcacaaggtcaggagttcaagaccagcctggccaagatggtgaaaccttgtctctactaaaaatacaaaaattagctgggcatggtggcaggcccctgtagtcccagctactcgggaggctgaggcaggagaatcacttgaacatgagaggcagaggttgcagtgagccaacatcacaccattgcactccagcccgggcgacaagagcaaaactgtgtcaaaaaaaaaaaaaaaaggaatcctacagtgtgtggccctgagtgatacgtgctctctctgacagcccctgagtgtgtctgggttttgtctgtttaaatgagggtttattcagccccagacttctggtacaaaccaggggacagctagccgctcttgcactcagcacagctaacaaaccagcagtgccaggctcagccgggagttcttttgcctccaaagaaaggcttgagaagaatctacactaactttagtggaggcacttacatcagtgcctccactaaaaataaagcaaaaacaagcaaatccaggtgacagttacaaaaaaaaaatacagtgagtttataaaataaatacagcaaaggtgtgttgagaccgccagtgaatcaggtcactgtgatgaaagccgcacagcaggtctgtgtgttaaccccacgcggcaccttccttggtcactgtgagcaaacagtggaattccctgctcccaagatcctgtgctgcttcccactggcaccactctcagaccgtaagaaatcggtttgctccagaggaagatgatgaagtcatttgctttgaggtccagtgattatcattgtttctgacctaatagaaaatcatccctcactgatgcccagccctgctggtctcgaagcccctcacaggcatcatgtcatgacacccagggtgtgcccagagccccagcaggcaggactgccaggcagggctaggaccaggcctctctgttactaacctagagagcagtcagcaaagcaacccccgagtttgccaacttttcaagcgttggttttttgtctgttgaaacctcggtgtattttagcagaggcgccttcccgagtcacccgacatctgtggctcggggtcatgattgccgcgaccacccggggtgctgagctccgccccggcctggcgtctgctctgaaaaggtccagactcaggcagagcagacaccccagggccactttgccagtccttcagcaggcgccatgggctcctcctccaaacctgttccatcggcctcttagggcctgcctgtaccaccagcccctggcttattgcaccagcgtccggaacggggttcttgttctacctgcccttccctgcagcttgtcctcactgcagccagaagggtcctcagacgacatgtgctagttcatatctctcctctttttttgtttttttgggttttttttgagacagagtctcactcttattgcccaggctggagtgcaatgtcacgatctcagctctctgcaacctctgcctcccgggttcaagtgattctcctgtctcagcctcccaagttggtggaattacaggcgcatgccaccatgcccgattaattttgtacttctagtagagatggggtttcatcatattggtcaggctggtctcaaactcctgacctcagatgatccacccgcctgggcctcccaaagtgctgggattacaggtgtgagccaccgcgctcagcccacatctctcctctttttttacttttattttgtttattattacagagggtcttgctctgttgcccaagctagagtgcaatggcacgaatatggcttactgcagcctcaaactcctgggctcaagttatcctcctgcctgagattcctaagtagctgggactataggcacatgccaccatgcccagataattttttaaattttggtagagacaaggtcttgctgttgcccaggctcgtctcaaactccttggctcaagcagtcctccctccttagtcttccaaagtgctggcattacaggtatgagacaccgtgcccagccctttcctcttttcacacccttctggcagcttcccacgtcactcagaatgaaatcatacttcttccctcagcctgaagcctgccatcagccctagcagccactctggcctcaccactgggctgcagcctcccagcctccttgctgcaaccctgagctaccctcagttctacacttgctggggctgctgggtaccttccctaggtgttggcaggatcactgcccctccactccaggcagagtcagggtgtccctctggcccttctctctgttacgcagtatggcattggtttgtccgggttgtgccccaccctccccagtaggatggcagttctgggtgggcagaaacaagtgttttgtttgcagttgaggtttccccaaaacccagcatgtgtgggtgctcatttgtcgaacaaatgatcacatgcctccaattagaggtgtccaggagacagctggtgtgaggccttgggccacatgagccctgccagtggtaggggtggtatggtgtaccatggaacccagtctgggaaatactgggtaaaggcatgaggcaagatgataaacctggaaagatgtgtccagaatgacttgctcttcctcttttaaagagcatttactggtgtccccatgtgcttttcgtcagactgtgctctcccaccctctgagacctggcctccatccctaccccttcctgaagccctcctgggctgtctgcaggctggcctctcacctagagtgagggccctgccagggagtgccagtcctcctttcggagagaagccactatgccatgagcttccgtcgtgtaaagtcagacccagacagcccaggccctggtgtcaggagtgtggcagcagccagggccggggctctccttctccttcttgggccagccactggtcacacaggtgcactcaaattgggaagctctgtcatgctgtgcacttaggatttgtgtagttttcaaatgtatattttcctccagtaatacaaaatagagtttctttttattggataaaagcgggtgaggggctggggacgcagaatgtttctgagggaagcaggtggtcagggtccatcctccacgcacctcctcagcatcgggctgggctggagctgggcagacgtggcctcctcctgcagggagctcccaggcagcacaggggcccttcccagaggcctggcaggcagcgtgagtggggttgtgaagggtgggcagcagcgtgccaggtgagcaacgcgtgagggggcgtgtgtgtccggaagggacgactggcaaggccagggtgaggctgggccccgcttgctcttcccaccatgttctgttctagcggcttctagtaaaggctgttaatgggcggaggctcacattaggaggcagagcccggaagcgagagagccaagggagacagggaagttttatgttccagagacgttgcgaggtgatggagagaagaggaaagggatgcggggtagccatcctctgcccgctcacgagcacttctccgcctgccaccgtgctgcttccagcgcccatctttctctatctggagacccctcagagactccactttggtccttgctgttcttgcccttctgctgaagcacagtcatctcctcctctctccatcattcccgttgtccttgacttactattcaaaagctagctgcttcaaaccacagcgcgtctcagctctgggccaggactacgggcagtgtgtgggggagtcctggctctgctccaccacgtcggggccctggccagtgggctgaatggcgaggcctgggccgcttttctgtcttctccacgcggccttccgagtggggaaggcgggagcctggcgggagcctctcctccacatagcctggtggcctcagcctcggcctcagctggcaggcctctcccctcccttccctggagcccctgcatcccctggaatgggggcttagcctagaacagcgcttccccaaatctgcacctctgaaccccaggtccatggaatggaaatggatgtgatgtatggaaagggggttccatagccaaacaagttaagctaagttcagagggaaggtggtgaatagaaatcccaaacatctgatcccagcacagctagcggtggggacttgccttgagtgcgctccaggtggtccctggggactcggtcctggcacccctgccctcctggattgcatcccacagccctgctggccgccccgccccagcctccctgctgtgacaggggcaggggctgcggtgaccctgcagcacaggcgcggctccctcggatcccttggatctcaccggtgcatctgaggttctgcgtggaaagtggctcgggcttccaatgccgctctgctttaagctgggaccgctgtccagggtggtgcccagccttctggcatctgccatccaacccttccctctctcccctcagtggccctgtgtcctccgggcatcaaccctaatgccacctcctcacctgaccacccactgccagttgctcattttatttcctggtggtgcctcccatatctgaacctagcctggtgcttacgtccaattgcctgctctggtgctacctgagagccccatccagcccactcacgaaggcttccagagcctgtgcctgtaacttgggcaaatgtgtggagtgagcgaccaaagggctgagggagcagcgaagggagcccctcgctaggactctaggactctgttctctctgtgtctcttaaaatagctcactcgtggctgggcgcagtggctcacacctgtaatcccagcaccttgggaagccgaggcaggcagatcgctggaggtcaggagttctagatcagcctggccaacatggtgaaaccccgtctctactaaaaatacaaaaattagctgggcttggaggtgggcacccataatcccagctacttgggaggctgaggcaggagaatcccttgaaaccggaaggcagaggttgcagtgagccaagatcacgccactgcactccagacacagtgagactcaaaaaaaaactagctcggacgggtgcggtggctcacgcctgtaatcccagcacttttgggaggccgaggtgggcggatcacctgaggtcaggagttcgagagcagcctcaacatggagaaaccccgtctctactaaaaatacaaaattagcctggcatggtggtgcatgcctgtaatctcagctactcgggaggctgaggcaggagaattgcttgaacctgggaggcggaggttgcggtgagccaagatcacaccattgcactccagcctgggtaacaagagcgaaactccgtctcaaaaaaaaaaaaaaaaaactaaactagctcattcacctcactggcaggctgagacctgcagtcactccagcggcaccctgagtgagctcacacaagagagaactttggccaggcacggtggctcacgcctgtaatctcagcactttgggaggccaaggggaatggctcacttgaacccacgagttcaagaccagcctgggcaacatggtgaaacccagtgtctacaacaaaatacaaaaattagcctggtgtggtggtgtgcacctgtagtcccagattcttgggaagctgaggtgggaggatcacttgagccagggagatggaggttgcagtgagccgggattgcgccagggcactccagcctgggtgacagcgagaccctgtcttaaaaaaaatttttttaaagagaactttctgacagccagaatcaggtgggggcaggagggagggggtggccctgtgcctgtcagtgttttggctgcggagctgcgaccaagtctggatgtgtttgggatttctattcaccaccttccctctgagcttagcttaacttgtttggctatggaaccccctttctatacatcacacctatttctattccatggacctgggattcagaggcgcagatttggggaagcgctgttctaggctaagcccccattccagggggatgcagggactccagggaagggaggggagaggcctgtgatcactctgcaaagcagggctgggtggggaggccgggcggctggggaagaaacctgccatgtctgggaagaccggttggtccttagaggacctagcagcagcaaaggcaaacactggctcaggcagtggtgactggtggtgatgtgccgacaagagcggccaccgccccgtcctccttgctgctctgtctctccatcctccatgtcctgatccactgggactggccctggggctgaggtgtgagacttggtgcccacgggaggcatttcatacatgcgttcatcagcccacagttaggggcccctgcccagagcagccggcgggtgaggatgcgggcagcctggagagggcacctcgatccgggaggtgcaggtggagggaggtcccactgcctgagggccctgagagtgtctggccccggcaagtgtgtgacacgggcactatgacaggagcactgtgcggccagagtgtggcacagggcatccagtgtgattgtattcacggcagccctgagcacaaagcaaggagcaggagatgtgtggcggcagcgagggatctgccagtttccactgggtggcccactcggtcccatggaggccgaccaggagggcagggacccaagaccacagatgtagcagggaagactgtgggttccagaaaagcaggcagtgccaggcagtgggggacagccagcccctcggggctcgggtcacccaccagcactgctggtgaccagaggcccagatcctccagacagtgctgtgctcgcgggcatggaggcctggtccaactgaggggtgggaagccctggggcaaactggagttgccggtggacagcaaacaggacactggagggacttcctcctgtcctgtgaagagcagacaaaggaccggagatgctgagcatggacagaggctgcccaaggaccagggcagggcggcagtcttgtgccgcggcctggtcaacgcagatgttgcctgcccggcagcacattcgggaggacagctgtgcctagaggagaggggcctcagctgagccaggatggtgagggcagcacaggcaggtggcaggggctcctgggctggcgtttttgtttctcacagtgcccaccatggtccttcacagccaggtccgccgcatctctcctctcattcctccactctctgttcacctgggccatccctgcccttcttggcctcctgctggagtccatgctggtatctgctgggctgtccctcagtctggcccacctgacattctggagacaagtgaccatctcccccgtgagactggcactaggggcaggacgtggcctctctgcctcctgcggggcccacactggctgctgcatgctgccactaacatgtccccagttccggaagtctcctgtcctttctcttgtcacccaactcctgccttccctgaaagtcccttcccgcttccagcccgccggggtcagcttggtcagcgtccattccagccccaacgaccagatgctgtgggtgcttgacagcaggtggaacgtgcacgtgcggaccgggatcaccgaggagatgcctgtggggaccgcctgggagcatgtgccaggtaggagcctgcagacagggcctgtggtgccggccagccggggctaccatcactgggggctgctgggcgctccctccaggccgctgtctgtgaggcagcctttgtgctggggctgtgctgtcgccgctgcttcctgggccaggggacaagcctcccatcatgttccttatcaggggaacccaggccgtcctgctggtgcttttgtgggagggcagtttgcacactgcccaggcccttctgtcctttgacttctggctttcggtggctttgctggccctgccaactggtcgtcctttccctcggctcctgccccaagcccagcccatcatgggcactccgtccccgcagggaccctggtggaggtgtgcagcgtcacaagagtcggcttgggaagcagcggcccatcccgtccatggcaggggctcaggagggaccctgtctgcccacagggttgcaggcctgccagctggcgctgagcaccaggaccgtgtgggcccgctgtccaaacggagacctcgcccggcggtacggcgtcacagacaagaaccccgccggggactactggaagaaaattcccggcagcgtgtcgtgtttcacaggcaggtgcccggggccagtgggcttaaggccccttggggttcccagggctcctgtggacgatgtcggggggctctcaaagaagccgaccccactgggctccaatctctcaaagcaagaactgagggcaaagccaggagtgtgtcccagggagggaaggggctggacacctgggctctgccagagtctcctgggcaaggacaaggtgctgttgacatccacttacagctgagggtacgaagttcacatggagatggtggcttgtccagtgtcccccacctagaatgtggcaagcccagacctgcgcccaagctcccagctccatctgtgcccaccccacaggctgtgtgattgacaagtatgtgattggctcttgtccctgcagtgactgcgtcagatgagctgtgggctgtgggcccgcccggctacctcctccaacggctgacaaagacgttcagccactcgcacggcacccagaagagcagccaggccgccatgccccaccctgaggacctggaggacgagtgggaggtcatctgaaggagccctggccgagtcacgcggaggggcccggcgtctgtggcgggcacaggggcttcagagtgactccctggtggacgcgctgcctcaacacttgtccagacacctctggccaggttggacccgcacacttactttcatctatgttggtttctgtctcgttccagaacccacagcctccacccgtggctggcgtgattgctgcagcagtggcgcctcctagctcaggacagtggcgactgcccggctgcatgcactccgattacccacgtgctgccgtcctggtctcatccacagatagctccagcttttgttggtgggagtggtctccggaggcctcccagaaccaagggtagccgggcagctggtttggcccagggcctccttccacattagtagccccagggccagatggagccaaaggtcagctctctgcagcgcgggatgtgctcggtgatggctttgtcccatcataggggggtgtccccccagagacaaagctgcagagcacattccatgccagacgctctggccaggaagctgaggccgggcttgagaggagagcgctggccatgccaggagagaacccacgcacatgcacaccacaacacacaacacacctcacctcacaccacagcacacctcaccacaccacaccgcactgcaccatacctcaccacatctcaccacaccacagcacacctcaccacacaacacaccacaccccacaccgcactgcaccgcaccgcaccgcaccgtacctcgccacatctcaccacaccacaccacaccacacctcactgcccacacacggcgcaggctgcccgcctcctggagagcacacttcagctgaaacagtaaagcctgatgggtgcaaatggaacctggatgtgtgcacgtgtgtcccaggtagggacggcacaggagggtgcatggggcgtgggggagctgagcaagggtcgctcacttagaaatgtctttggaatggtgtttaactaatgctgctggcggacatcctaaaaccagatgcatcctcagaggacgagtctactaattattgcctttgttgttgtattacaaatctgcataaaatacctcatttcaaatcaaatcttacaaatttagaagagagatatgttttccgaaaacagtggaagccctttgttccttcccgggtttgtcctgagcctgcactgtcctcgcctgcagcctcagaggggcaggcatccccgcacagacttgactggcagggcggtcacgggacctgcgggctggctccgagtggcagcccatgccttctgcggggtatgggttgacacttgacaggttgaaaccagtgcctctatggacggctgctgtggccccttcagacaatgggcagtgcccaccccgcccactggcatctgcgtgtgagggctaggccgccctgccacacatcccgccccctcccggaggcagcttcaggacaggacaccaggctggctgctttttttagcctgcccctggcccaggcccagtccttggtgtcagggagcccccaggccgcaggtggagggtgataaaatatgttctctgacaggacccagccagccacataggtggaggttttccatgtccaaatgaggtcaagatgccgaaatcccagatctgacttcacacttcccttttctagaaccttttgtaaaagttggtggcagcagaggcagccccaggccgggctgcatctctctgtgtctgttgtgccttgcccggcgcctcacggatggcaaagctctcctcacccatgggactgtagtgcaattaaacccgcgtctaggtgatgcttttaaagttgtagcttcgtgctttgtacagttttctttctggttttaatttttagttgtgctttgagtcagtgcaataaactagactttttccaaacctggccgagtgtggtgcctgagctgtgagaagtgtcctcagccgacactcacgagggcagtgcaagggagaacctgccagcccagccccaccacagggagagtgcgtcagcagacctgtcctggcctggctggtgttgaaatacacaccggtttgcccaagtggctgttatgggggaatggccgctccagagctggctgtaccccatggtagcctctgaggaggacgctgtggggtgaggtccagggctgcctcctcatggagctgtgtgtgagcaggcgttggaggggttcgagcccctggttctgtatcttcagccagcaaacgaaaccatatcgcaaaccagagctgctggaaaccagcacacgcaaaagatgacgcccagcacagcagcaggacacaccatgtgccaggaaatgacctcagcaagaaacctcaggccgtgtgaagagcagcaaagctttccagaaggcataaaaggaaacttgaataaaggaagatatgttccacattcctggatggaggactacacacattatggaaagacctcattctttccaaaggaatttataggtgtagcttgatttcagttcaaatccccactgggattgttttgttggggcaggcagggaggaataatgttagtacccacaaatgcccatgactgtgcccaatgtgcttctcaccagagccctgcaaggggaagtctcattagccccttgagactcagagaggttaggtaacttgctcaaggtcacacagcactgggactggaagccagctctgtagaactgcagacctgtgctgtttgatgcctcctcactgtcccgtcactcctgggaagaagaaacgggtgagaactgctaagtgatgacaggtggagccccagcaggggccactctattgaatggcatggcccagaccctcggagggccaggcaacaggctagcaaggcccacagggagggagcagaatggagagggcatctcagatgcgcttaaggagcggcgggggcggggcatggggggtgtcacaactaatgtggccactgcttcattctctgggcaaaataatattaaatggattaaagaatctaaaaccagtgggaaaactgtctgatttctggatggcaaaggctttctaaactcaaaagtgataggacaagctacagaggaaaataagtacatagatttgatttctccaaaatacagaaatgctgctgggcacagtgatgtgcagttatagtcccagctacttgggaggccaaggcaggaggattacttgagcccaggagtttgaggctgcaatgaactatgatcacaccactgcactccagcctcggcgacagagcaagaccttgtttctcaaaaataaataaatagaaggaaataaatgtaaaaatgctgcaaattaaaaacctcaaagaagggaaataattgcaacaaatgggaattgatgttgaatatttaccttaaaaacctatacaacaataagaggagtgcgcccttcagcagcatgtatacaaaaattgcaacgatacagagattagcatggcccctgcacaaggatgactcgcaaattcataaagctttccataaatatatttattaaaaaccaataggaggagcacttcgagtcgagtgtaagggcccttcacaaaagcagaaggaacactggcccaaacccccagcaccccggaagcagaggtgagatgggagcagcttgggagccccccattggcgccgccctactggggaagccggtccgtacgtaggccttgcatctcgccacctccacttctgtcctcaagaacaagtcctaggtcaagggaaacagcacagcctgtttataattaggaaacacttaaaacagcctggcatttgggaacagccatgttaacgtgagcaaattcctctcatgaaatagcctgcagctattaagaagcacgtgtgtgcaggaagcggaggcgcaggacctcaccgcgccagcgtgaagttcccgggcatggtcatgaaagcgtggttctgtaagaaatcagagggagaaagggagagaagggggagggagacaacccaaacgttggagggtatttgttgtaaacttcaaacttttggcaggtttgaaatttttcataactccggggaggagcaagaggggtgaaaagaaacaagttctctacttgtgatcagcagctggtcatagtggttgcctggagtatatgcctttttgtatcctttgaatttccagccatgtaaatgtattatttattccaaaaataaagcagatttacattttaaaaa
